United States Patent Application Publication US 2019/0348154 A1 - sequence listing, part 65

SEQ ID NO: 243944 - DNA, 1536 bp, Klebsiella pneumoniae
atgaaccttttaaaatcactggcggcagtcagttcgatgaccatgttttcgcgcgtgctgggctttgcccgcgatgcgattgtggcgcgtatttttggcgccgggatggcgaccgatgccttttttgtcgccttcaaactgcctaacctgctgcggcgtatttttgccgaaggcgccttctcacaggcgtttgtgccgatccttgccgaatataaaagcaagcagggcgaagatgccacccgcgtgtttgtctcatacgtctccgggctgctgaccctggccctggctatcgttaccgttatcgggatgctggcggcgccgtgggtaatcaccattactgcgcccggctttgccgataccgccgataagtttgcgctaaccacccagctgctgcgtattacctttccctatattttgctgatctccctggcttcgctggtgggggcgatcctcaatacctggaaccgcttctcggtgccggcctttgcgccgacgttcctcaacgtcagtatgattggttttgcgctgtttgccgcgccgtatttccatccgccggtgctggcgctggcctgggcggtgacggtcggcggcgtgctgcagctggcttaccagctgccgcatctgaagaagattggcatgctggtcctgccgcgaattaatctgaaagatgccggcgcgatgcgggtggtgaagcagatggggccggcgatccttggcgtgtcggtaagccagatctcccttatcatcaataccattttcgcctcattcctcgtgtcgggctcggtgtcgtggatgtattatgccgaccgcctgatggagtttccctccggcgtgctgggcgtggcgctcggcactatcctgctgccatcgctgtcaaaaagcttcgccagcggtaaccatgacgagtattgtcggctgatggactggggactgcgtctctgttttctgctggcgctgccgagcgcggtggcgctggggatcctcgccaaaccgctaaccgtggctctgttccagtacggcaaattcagcgcctttgacgcggcgatgacccagcgcgcgctggtggcttattccgtagggctgatgggccttatcgtggtgaaagtgctggcgccgggcttctattcccgtcaggacatcaagaccccggtcaagattgctattatcaccctgattatgacccaggtaatgaacctggcgtttatcggcccgctgaagcatgcgggtctgtcgctgtccatcggcctggcggcctgcctgaacgccgcgctgctctactggcagctgcgtaaacagaaaattttcaccccgcagccgggctggttggccttcctgctgcgtctgattattgcagtgctggttatggccgcggcgctgctgggcgtcatgcatctcatgcctgagtggtcgctggggacgatgccgttccgtctgatgcgtttgctggcggtggttatcgccggggtggtagcctatttcgccacgctgctggtgctgggcttccgcgtgaaagagtttgtccgtcgcacggcgtaa

SEQ ID NO: 243945 - DNA, 1215 bp, Klebsiella pneumoniae
atgacaccgacttccctttccacccgcgacgcaggctggattatcttcattctcgcactcggcgccggctttagcgtcgcctctatttactacgcgcagccgctgctgccgttgatgggcgccaatctccacctgactgtagaaggtatgggtctggtccctaccctgacgcaggcgggttatgcgctcggcattctgttcctgctcccgctcggcgaccgccacgatcgccgccggctgatcctggtgaaaagcgcgctgctggcgctcctgctgctcctgtgcagcctcaccggccagctcagctcactgctggtggtcagtctgctgatcggtatggcggcgaccatggcgcaggatatcgtcccggcggcggcgatcctcgccccggcgggcaagcagggaaaaatggtgggcacggtgatgaccgggctgctgctggggatcctgctctcccggacggtcagcggcgtggtgggcgccgtattcggctggcgggtgatgtatcaggcggcggcggtcagcgtcgcgctgattggcctggtaatgtggcgcgtcctgccgcgcttcgctgtgcactcgacgctgagctatccgcagctgatggcctcgatggcgcatctgtggcagcgttacccggcattacgccgcgccgcgctagctcagggcgcgctctccatcgcttttagcgccttctggtcgacgctggcggtgatgctctccgaacactatcacatgggcagcgcagtagcgggcggtttcggtatcgccggggccgccggggcgctggccgcgccgcttgccggcggtctggccgataaatttggcgccggtaaggtgacacagatgggtgcggcgctggtcaccctctcctttgccctgatgtttatgctgccgctgctgccagtacacgctcagttggcgctgattgccctgtcggcgattggctttgaccttggcctgcagtcaagcctggtggcgcatcagaacctggtatatggccttgagccacaggcccgcggccgcctcaacgccctgctgttcaccgtggtgtttatcgggatgtcgctggggtcggtgctgggcagtaagctgtacgtgctggccggctggaacggagtggtcacgctggcagtgatcactggcgcgctagccctggcgatccgtctgctggagaatgcccgcatcctcgctgccgaacgcagcgcatcataa

SEQ ID NO: 243946 - DNA, 936 bp, Klebsiella pneumoniae
atgaaaagacaagagcgtatagaccgcattgagctgatgcgcacctatatccgcatcgtagaggccggatcgctctccgccgccgcagggcagatggacactacccaggcgaccgtcagccgccgcctgcagtcccttgaagggctgctgggggttaagctgatcctgcgcaccacccatgcgatgaagctcactgacgatggcgaacgctgttatcgtcacgcccgtcaggtggtggacgcctggctggcgctggaggatgacctgcgtattgccgacgatcggccggtgggcgttctgcgagtgcgggcgccccacgcgtttggccagcagcagctgctggcgccgctggtggcatttctacagcgccatccgcagctgtcggtggagtggatgctaaacgataataccgtcgacttcctcagcgataatatcgactgcgctattcgcgtgggggcggaggtggatccagcaacggtatccgtactgctggcggaagtgccgcgctgcgtagtggcttctcctgagcttctggcgaagtatccgccgttaacctcgctggaggcgttatcgggcctgccatggatcgccattaataccttttatcagcatgaggtacggctcaggcatcaggcaagcgggcagattgtctctacagcgattactccctgtctgagcactgacagtctttacgtcgcgcgcaacaccgcgctggcggggctgggggtggcgatggtgtccagctggacggtcgtggaggatattgccgccggacggctgattgagctgttcccgcagtggcgacccgcctcgctgccggttcatctggtttatccctgggcgcgctattacccgacacgcctgcgtaagttcctcgacctgatgcgggagatcatgccggatctcgccgggatgcagcgtccgcaaagcgcataa

SEQ ID NO: 243947 - DNA, 3234 bp, Klebsiella pneumoniae
atgaaaagaatgttaatcaacgcaactcagcaggaagagttgcgcgtcgcccttgttgatgggcagcgcctgtacgacctggatatcgaaagccccgggcacgaacagaaaaaagcgaacatctacaaaggcaaaatcacccgcattgaacccagccttgaagccgcgtttgttgattacggcgccgagcgtcatggtttcctccccctcaaagaaatcgcccgcgaatacttccccgccaactacaatgcgcatggtcgtcctaatatcaaagacgtactgcgggaaggtcaggaagttatcgtgcagattgataaagaagaacgcggcaacaaaggcgctgcgctcaccacctttatcagcctggcgggcagctatctggtactgatgccgaacaacccgcgcgccgggggaatttcccgccgtatcgagggcgacgaccgtaccgaactgaaagaagcgctggcgagcctggagcttccggacggcatgggcctgatcgttcgcaccgctggcgtcggcaaatccgccgaagccctgcagtgggacctgagcttccgcctgaagcactgggaagcgattcagaaagccgcggaaagccgtccggcgccgttcctgatccaccaggaaagcaacgtcattgtccgcgccttccgtgactacctgcgccaggacatcggcgaaatcctgatcgataacccgaaagtgcttgagctggcgcgccagcatatcgccgcgctgggtcgtccggatttcagcagcaaaatcaaactgtacaccggtgaaatcccgctgttcagccattatcagatcgaatcgcaaattgagtccgccttccagcgcgaagtgcgcctgccttccggcgggtctatcgttatcgatagcaccgaagcgctgaccgcgatcgatatcaactccgcccgcgccacccgcggcggcgatatcgaagagacagccttcaataccaacctcgaagcggctgacgaaattgcccgccagctgcgtctgcgcgacctcggcggcctgatcgttatcgacttcatcgatatgaccccggttcgccaccagcgcgccgtggagaatcgtctgcgcgaagccgtccgtcaggaccgggcgcgcattcagatcagccatatttcgcgcttcggcctgctggagatgtcccgtcagcgcctgagcccgtcgctgggcgagtccagccaccacgtctgcccgcgctgctccggcaccggcaccgtgcgtgataacgaatcgctgtcgctctctattctgcgtctgatcgaagaagaagcgctgaaagagaataccaaagaagtccacgccattgttccggtaccgatcgcctcctatctgctgaacgaaaaacgtgccgcagtgagcgctatcgaatcccgtcagggcgatgtgcgcgttattatcgtgccaaacgacgaaatgcaaacgccgcactactccgtcctgcgcgtgcgcaaaggtgaagaaacctcaacgctgagctatctgctgccgaagctgcatgaagaagaaatggcgctgccaggcgacgatgagccggcggagcggaaacgtccggaacagccggccctggccgcttttgtcatgccagatgcgccgccagccccgatgctcgaagagcctgccgccgcgcctgtcgccgcagcggcaccggtcgcggccgccgcaccggcgcagcctggcctgctctcacgcttcttcagcgcgctgaagaatatcttctctggcgccgaagaggccaaaccggctgaagttcaggtcgagaagaaagcggaagaaaaaccggagcgtcagcaggagcgtcgtaaaccgcgcgccaacaaccgccgcgaccgcaacgaccgccgtgataaccgcgacaatcgtgacaaccgcgataaccgtgacaatcgcgacacccgtgcggacaatgccgagggccgtgaaccgcgcgaatcgcgtgaagagaaccgtcgcaaccgtcgcgagaagccgtcgcagaacgtggaagcccgtgatgttcgccaaacctcaggcgacgacgcggagaaagcgaaatcccgtgacgagcagcagccgcgccgcgaacgcacccgccgccgcaatgacgacaaacgtcaggcgcagcaggaagccaaagcgcagactcgcgaagagccggttgtgcaggagacggagcaggaagagcgtgtacaaactctgccgcgtcgtaaaccgcgccagctggcacagaaagtgcgcgttgagtccgctgtcgtcgagccagttgccgagatcgtgccagaagccgtagtggctgaagttatcgctccgcacagcgagccggtgaaagccgagctgccggcaggggtggagagcgttgcggaccaggacgaaaatggcgaatcccgtgaagcgaacggtatgccgcgtcgctcacgtcgctccccgcgtcacctgcgcgtcagcggtcagcgtcgtcgtcgctatcgtgacgaacgctatccgacccagtcgcctatgccgctgaccgtagcctgcgcatcgccggagatggcttccggtaaagtctggatccgctacccggtggttcgtccgcaggatcagcagccggaagaggttcaggttcaggacgccagcgtcgcgaaaactgtcgaggccgtagcggccccggttgccgtcgttgaaaccgttaccgctgcgccggtcaccgtcgagccggctaccatggaaccagtaaccgctgagccggtagtcgtcgagccggtagcggccgccgagccgctggtcgttgatgctgcggaagttgtcgcgccagcagccgtcgagccagcgcctcaggagccggtcaccgaagcaccggctgtcgaagcgcctcaggctatcgcgccagtgacgctcgacgccgagccggtggtggtagaacctgaagcggtggaaacgacgcctgtcgttgcagcgccagtggaaactatcgccccggtcgcagaaaccgtggagcaagcgccagtgaccgaagcggcccctgccgaaccggtcaaagccgagcccccggtgagcaagccggtcgtagtggcgggtcatcgccatgccaccgcgccaatgacccgtgcgccagctccggactatgtcccggaagcaccgcgtcacagcacctgggtgcgcccgccgttcgcctttgaaggtaaaggcgccgccggtggtcatagcgcgacccataaagccaccgctgaaccgactcgcccacagcccgtcgagtaa

SEQ ID NO: 243948 - DNA, 996 bp, Klebsiella pneumoniae
atgagtggcgctaatgcgtccggctatttagaatcgcgcaccatgaaaactgagaccccaaccgtaaaaatggttgccattgctgctgatgaagcggggcaacgtatcgacaactttttgcgtacgcaattgaaaggcgtaccgaagagcatgatttatcgcatcctgcgtaaaggcgaggtgcgggtaaacaaaaagcgcgtgaagccggagtataagctggaagcgggcgatgaagtccgtatcccgccggtgcgcgtggcggagcgtgaagaagaggcggtatcgccgcacctgcagaaagtggccgcgctctctgaggtgatcctctatgaagacgatcatattctggtgctcaataagccttctggtaccgcggtacatggcggcagcggcctgagcttcggcgtgattgaagggctgcgcgccctgcgcccggaggcgcgtttccttgagctggtgcatcgtctcgaccgggatacctccggcgtgctgctggtggcgaaaaagcgctcagcgctgcgttcgctgcacgagcaactgcgcgataaaggcatgcagaaagattatctggcgctggtgcgcggccagtggcagtcgcataccaaagtggtccaggccccgctgttgaagaatattctgcagagcggggagcgcatcgttcgcgtgagtcaggaaggcaagccgtcggagacgcgctttaaagtggaagagcgttacgaattcgccacgctggtgcgctgcagcccggtcaccggccgcacgcatcagatccgcgttcatacccagtatgccggccatcctatcgcttttgacgaccgctatggcgaccgcgagttcgacaagcagctgtccgctaccggcttaaaccgcctgttcctgcacgcggcggcgctgaagtttacccacccggggagcggggaggtgatgcgcgttgaggcgccgctggacaaccagctgaagcactgtttacaggtgctacggaagagcaaataa

SEQ ID NO: 243949 - DNA, 585 bp, Klebsiella pneumoniae
atgtctgatcttatcctcgcgtcaacctctccctggcggcgcatgctgctggaaaaactgggtttaccgtttgaatgtgccgcgcctgacgtcgacgaaacgccccggcctgatgaatccgcacgtcagcttgtcacccgactggcgcaggccaaagcgcaaagtctggccacacgcttccctaatcaccttattataggctccgatcaggtttgcgtactggacggtgaaatcaccggcaaaccgcacaccgaggaaaatgcccgcaggcagttaagaaaggccagcgggtcaatcattaccttttataccggactggcgctgtacaactctgccagcggccatctgcaaaccgaatgcgaaccctttgacgttcactttcgccatctcagtgataaagagatagaaggctatgtgcgcaaagagaacccgctgcagtgcgccgggagtttcaagagcgaaggattgggcattacgctgttcgaacggctggaaggccgcgacccgaacaccctggtcggtttacccttaatcgcgctctgtcagatgttgcgccgtgaaaactacaacccgctgttaggctga

SEQ ID NO: 243950 - DNA, 522 bp, Klebsiella pneumoniae; identical to SEQ ID NO: 210705

SEQ ID NO: 243951 - DNA, 174 bp, Klebsiella pneumoniae; identical to SEQ ID NO: 210706

SEQ ID NO: 243952 - DNA, 1161 bp, Klebsiella pneumoniae
atgaagcttagtgaggactccccgggcaactggggaatcaccgaaccgggcagcgacgataccttgacacgtctaaccctggcgttagatgtcatggggggcgatttcggcccatccgtgacggtgcctgcagcactgcaggcactgaactctaattcgcaactcacacttcttttagtcggcgatcccgacgccatcacgccattactcgccaaagctgacttcgaacaacgttcgcgtctgcagatcattcctgcgcagtcagttattgccagtgatgcgcgacccgcgcaggctatccgcagcagtcgcggaagctcaatgcgcgtggcgctggagcttgtgaaagaagggcgggcgcaagcctgcgtcagcgctggcaacaccggcgcgctgatgggtctggcgaaactgctgctcaaaccgatcgaaggtattgagcggccggcgctggtgacggttttaccgcaccagcagaagggcaaaaccgtggtgctggatctcggcgccaacgtcgattgcgacagcacgatgctggtgcagttcgcggtaatgggcgcggtgctggcggaagaagtggtcggcattgccaacccccgcgtcgctttgttgaacatcggcgaagaagagatgaaaggcctcggcagcatccgcgatgctgccgcagtgctcaaaacgctgccttccctcaactacatcggctatcttgaagccaatgaactgttgaccggaaaaaccgatgtgctggtttgtgatggattcacgggcaacgtcacattaaaaaccatggaaggtgttgtcagaatgttcctttcactgctgaaatctcagggagagggcaaaaaacggtcgtggtggctgctgttactaaaacgttggttacaaaaaagcctggcgaggcgattcagtcacctcaaccccgaccagtataatggcgcctgtctgttaggattgcgcggttccgtgatcaagagtcatggtgctgccaatcaacgcgcctttagcgtcgcgatagagcaggcagtgcaggcggtgcagcggcagatccctcagcggatcgccgcgcgcctggaatctttatacccagctggtttcgagctgccggaaagcgacagtgacgtgaacgcccgacagcaaagcgggacgaatggccacgattga

SEQ ID NO: 243953 - DNA, 954 bp, Klebsiella pneumoniae
atgtatacgaagattattggtaccggcagctatctgcccgagcaagtgcgtacaaacgccgacctggaaaaaatggtagaaacctctgacgagtggattgtcacccgcacaggtatccgtgagcgtcgtattgccgcagcgcatgaaacagttgctacgatgggctttgaagccgcaaagcaggcgctggcgatggcgggcgtgtccgcggagcaaattggtctgattatcgttgcgaccacctccggcacgcacgcgtttccgagttctgcatgccagatccagtcaatgctgggcgttaagggttgcccggcgtttgatgtcgccgccgcctgcgccggtttcacctatgcgctaagcgtcgccgatcagtatgtgaagaacggcgcggtagattatgcgctggttgttggcgccgatgtgctggcgcgcacctgcgatccggcggatcgcggaacgattattattttcggcgacggcgccggcgcggttgtgctgggcgcctccgaagagccgggcattatctcgacgcatctgcatgccgacggcagctatggcgaactgctgaccctgccgaacgccgatcgcgtcgatccggaaaacccgatctatctgacgatggccggcaacgaagtcttcaaagtggcggtcaccgagctggcgcacatcgttgatgagacgctggcagcgaataatcttgaacgttcagcgctggactggctggtgccgcatcaggctaacctgcgtattatcagcgcgacggcgaagaaactgggtatgtcgatggataacgtcgttgtgaccctcgaccgccatggcaacacctccgcggcgtcagtcccttgcgcgctggatgaggccgtccgcgatggccgtattcagcgcggtcagctgattttgctggaagcctttggtggcggtttcacctggggttccgcgctggttcgtttttag

SEQ ID NO: 243954 - DNA, 930 bp, Klebsiella pneumoniae
atgacgcaattcgcatttgtgttcccggggcagggctctcaggccgtaggcatgctggccgaaatggctgccgcctggccggtcattgaagagaccttcggtgaagcttccgcagcgttgggttacgatctgtgggcgctgacgcaacagggcccggcagaagaactgaataagacctggcagactcaaccggcgctgctcgccgcctccgtggcgctgtaccgcgtctggcaacagcagggcggcaaagcgccagcgctgctggcgggtcacagcctcggcgaatactccgcgctggtatgcgcgggcgttatcggtttcgctgatgccgttcgcctggttgagctgcgtggtaaattcatgcaggaagctgtaccggaaggtaccggcgccatgtccgcgattatcggtctggacgacgccgctatcgccaaagcctgtgaagagtctgccgaagggcaggtggtctctccggtgaactacaattctccgggccaggtggttatcgccgggcacaaagaggccgttgaacgtgcgggcgccgcctgtaaagccgccggtgccaaacgcgcgctgccgctgccggtgagcgtgccgtcccactgcgcgctgatgaagccagccgcagaaaaactggcggtagagctgcagaagatcaccttcaacgcgccgacgattccggtggtgaataacgtcgacgtgaagtgcgaaaccgcgccggacgccattcgcgacgcgctggtgcgccagctgtacagcccggtgcagtggaccaaaaccgttgagtttatggctgccgagggcgtatcgcatctgtatgaggttggcccgggtaaagtcctcaccggcctgaccaaacgtattgttgacaccctgaccgcttccgcgcttaacgagccggcggcgatgtctgcggcgcttgagcaataa

SEQ ID NO: 243955 - DNA, 735 bp, Klebsiella pneumoniae
atgagttttgaaggaaaaatcgcgctggttaccggtgcaagccgcggtattggccgtgccatcgctgaaacgctcgtcgcccgtggcgcgaaagttatcggtactgcgaccagcgaaagcggcgcgcaggcgatcagcgactatttaggcgccaatggtaaaggtctgatgttgaatgtgaccgacccggcatctattgaatctgttctggaaaatgtgcgcgcagagtttggcgaagtggatatcctggtgaataatgccgggatcactcgcgacaatctgttaatgcgcatgaaagatgacgagtggaacgatattatcgaaaccaacctgtcatcggttttccgtctgtcaaaagcggtaatgcgcgctatgatgaaaaagcgtcatggacgtattatcactatcggttctgtggttggtaccatgggaaatgcgggtcaggccaactacgccgcggcgaaagcgggtctgatcggcttcagtaaatcactggcgcgtgaagttgcgtcccgcggtattactgtaaacgttgttgctccgggctttattgaaacggacatgacgcgtgcgctgaccgatgagcagcgtgcgggtacgctggcggcagttcctgcggggcgccttggcaccccaaatgaaatcgccagcgcggttgcatttttagcctctgacgaagcaagttacatcactggtgaaacgttgcacgtcaacggcggaatgtacatggtctga

SEQ ID NO: 243956 - DNA, 237 bp, Klebsiella pneumoniae; identical to SEQ ID NO: 210711

SEQ ID NO: 243957 - DNA, 1242 bp, Klebsiella pneumoniae
gtgtctaagcgtcgtgtagttgtgaccggactgggcatgttgtctcctgtcggcaataccgtagagtctacctggaaagctctccttgccggtcagagtggcatcagcctgatcgaccatttcgatactagcgcctatgcaacgaaatttgctggcttagtaaaggattttaactgtgatgacattatctcgcgcaaagaacagcgcaagatggatgccttcattcaatatggaattgtcgctggcgttcaggccatgcaggattctggccttgaagtgacggaagagaatgcaacccgtattggcgccgctatcggctccggtatcggcggtctcggcttgatcgaagaaaaccacagttcgctggttaacggcggaccgcgcaagatcagcccattcttcgttccttccacaattgttaacatggtggccggacatctgaccatcatgtttggtctgcgtgggccaagtatctctatcgcgaccgcgtgtacttcaggcgtgcacaacatcggccaggccgcgcgcatcatcgcctatggcgatgccgatgcgatggtggcaggcggcgcggaaaaagccagtaccccgcttggcgtgggcggcttcggcgcggcgcgtgcgctctccacgcgcaatgacaacccgcaggcggcgagccgtccgtgggataaagatcgtgacggcttcgtgctgggcgacggcgcgggtatggtggtgctggaagagtacgagcatgccaaaaaacgcggcgccaaaatctacgccgagatcgttggcttcggcatgagcagcgatgcttaccacatgacgtcaccgccggaagatggcgcgggcgccgcgctggcaatggtgaatgctattcgcgatgcgggtatcgaaccgggccagatcggctacgtcaacgcccacggcacctcgacgccggccggcgataaagcggaagcgcaagcggttaagtctgtcttcggtgatgcggcgagccgcgtactggtgagctctaccaaatccatgaccgggcatctgctgggtgcggcaggggcggtagagtcgatttactctatcctggcgctgcgcgatcaggcggttccgccgacgatcaacctcgacaacccggatgaaggctgcgacctcgacttcgttccacacgaagcgcgtcaggtttccggtatggagtacaccctgtgcaactccttcggctttggcggcactaacggttcgctgatcttcaaaaaagtgtga

SEQ ID NO: 243958 - DNA, 810 bp, Klebsiella pneumoniae
atgttcttgataaacggcgttgtacaggacacgttggcagcgaacgatcgcgccatccagtttggcgacggctgttttaccaccgcccgcatccagcaagggcaggttgcgctactggacgcccatctgcagcgtttacagacaacctgtgaaaaattacatatcccatttaacgactggctgacgctgagcgaagagatgcagcgtctggctcggccgcacgcgcagggcgtgctcaaggtgactctcacccgcggcgttgggggaaggggatacagtacggcaggctgcgtgtcgcccactcgcattctcagcttctctccattcccggcgcattatgcgcgctggcgggaggagggcattactctgacccagagtccggtgcccctggggcgcaactcctggcttgccggcctgaagcaccttaatcgccttgagcaggtgctgatccgctctcatcttgagcagacggacgccgatgaggcgctggtccttgacagtgacgggtggcttacggaatgctgtgccgcgaatttattctggcgtcagggacgtgatgtatttactccgcgactcgattatgccggggtcaacggcattatgcggcagcgctgtatcgcgcagctggcaccatcgacgtttcgcgttgtcgaagtgacagcgcgtcccgagacattgcgggaggccgatgaagtgctgatctgcaatgcgctgatgccgctgatgccggttcgccgctgggaggagaccacctggtcctcgcgtgagctttaccattttttagcccctttgtgtgagctgtctggttag

SEQ ID NO: 243959 - DNA, 1023 bp, Klebsiella pneumoniae
atgaagaaaatgttacgttttatcctgttgctggtcgtgctgttgggcatcgccgcggcggcaggcatgtggaaggtacgccagctggcggacagcaagctgctgattaaggaagagaccatctttaccctcgaagccggcaccggccggctggcgctgggccaggatctctatcgcgagaaggtgatcaatcgcccgcgcgttttccagtggctgctgcgggtggaacctgagctgtctcacttcaaggccgggacctatcgcttcacgccgcaaatgacggtgcgcgagatgttgcagctgctggccagcggcaaagaggcgcagtttccgctgcgctttgtcgaaggcatgcgcgtcagcgactacctgcgccagctgcgcgatgccccgtacgtgaagcacacgcttgaagacgatagctacgcgacggtggctaaggcattaggtcttgagcatgccgactgggtagagggctggttctggccggatacctggatgtacaccgccaacaccagcgatatcgccatcctcaagcgcgcgcatcagaaaatggtcgccgaagtggcgaaggtctgggaaggacggatggagaatctgccctatgccgatcagaaccagctgttgaccatggcctcgattattgaaaaagagaccgcggtagcggaagagcgcgaccgcgtcgcgtcggtatttatcaaccgcctgcgcatcggtatgcgcttgcagaccgatccgaccgtaatctacgggatgggcgaaggatatactggtaagttaacgcgtaaggatctcgagacgccgaccgcatacaatacttataccatcagcggtttgccgccgggccctatcgcggtgccgggcgaggcctcgctgaaggcggccgcccatccggcgaaaacgccatatctttatttcgtcgccgacgggaaagggggccatacgtttaccacaaacctggtcagtcataaccgtgcggtgcaggattatctgaaagtacttaaggaaaaaaatgcgcagtaa

SEQ ID NO: 243960 - DNA, 642 bp, Klebsiella pneumoniae; identical to SEQ ID NO: 139063

SEQ ID NO: 243961 - DNA, 1005 bp, Klebsiella pneumoniae
atgaaatggtatccgtggctgcgcccctcgttcgagcaactggtcggtagctatcaggccggacgaggccaccacgccttactgttacagtccctgaacgggatgggcggcgaggcgttgatttacgcgctgtgccgcttcctgatgtgccgccagcccgaaggacataaaagctgcggccactgccatagctgtcagctgatgcaggccggcacgcaccccgattactatgcgctcagccccgagaagggcaagagcgcgctgggtattgacgcggtgcgcgatgtcaatgaaaagctctatgaacatgcgcgccttggtggggcaaaagtggtctggattagcgatgctgccttgctgaccgatgccgccgccaacgcgttgctgaaaacgctggaggagcccccggagaatacctggttcttcctcgcctgcgaggagccggcgcgtctgctgaccactctgcgcagccgctgtcgcctgcatcatctggcgccgccgtctgagccttatgctctggcctggctggagcgtgaggtgagcctgccgcaggagtcattgttgaccgcgttacgcctgtgcgccagcgcgccggctgcggcgctcgaactgttacaggaaccgctgtggacggcgcggcagcagttgtgtcaggcgctggcggctaccctggcgagcggtgactggctggcgctgctgccgatactcaatcatgaacaggcggcggttcgcctgcactggctggcgtcgctgctggtcgatgcgcaaaaacgacagcaggggattaccctggtgagtaaccctgacgtctggccgctgctggagcagctggcgcacagcctgcccgccgcccggctgcaggcgattgcccatgacgtctgtacctgccgcgagcaattgctcaacgttgtcggtgtcaaccgcgaactgctgcttaccgagcgcctgctgcgctgggaacattacctgcaacccgggacgggtttacccgtctcccacctctga

SEQ ID NO: 243962 - DNA, 795 bp, Klebsiella pneumoniae
atgtttttagtcgactcccactgccatcttgatggtctggattatcaaactctacacaaaaacgtcgacgacgtgctggcaaaagcggccgcacgcgatgtgaaattttgcctcgccgtcgccacgacgctgcctggctaccgcagtatgcgcgaactggtggggacgcgtgacaacgtcgtcttctcctgtggcgtacacccattaaaccaggacgagccctgggaggtagagaccctgcgcgcgctggcagcggaagagggcgtcgtggcgatgggggagaccggtctggattatttttataccccggaaactaaagcccaacagcaaagctcgttccgcgaccacattcgtatcggccgtgagctcaataagccggtgatcgtccatacccgtgacgcgcgtgccgatactctggctattttgcgcgaagaaaaggtgacggattgcggtggcgtactacactgtttcactgaggacagggagacagcgggcaagctgctcgatatggggttctatatctcgttttccggtatcgtcacttttcgtaacgccgagcagctgcgtgatgcggcgcgctacgtgccgctggatcgcctgctggttgaaaccgattcgccgtacctggcgccggtcccccaccgcggcaaagagaaccagccggcgctggtccgtgacgttgccgagtatatggcggtactgaagggggtgtcgcttgagcagctggctcagcagaccaccgacaattttgccaccctgttccacatcgaccccgcccgtttgcaacctgcttga

SEQ ID NO: 243963 - DNA, 1434 bp, Klebsiella pneumoniae
atgtttaagaatgcatttgctaacctgcagaaggtcggtaaatcgctgatgctgccggtatccgtactgcctatcgcaggtatcctgctgggcgtcggttccgctaacttcagctggctgccagccgtggtctcccacgttatggcagaagcaggcggttcagttttcgccaatatgccgctgatcttcgctatcggtatggccctcggcttcaccaataacgacggtgtatccgcactggctgcagtcgtggcttacggcatcatggtgaaaaccatggcggttgttgcgccgctggtgctgcatttacctgctgacgagattgcggcaaaacaccttgctgataccggcgtgcttggcggtattatctccggtgctatcgccgcctacatgttcaaccgcttctatcgcatcaagctgccagaatatctcggcttctttgcgggcaagcgttttgtgccgattatctctggtctggccgctatcttcaccggcgtgatcctctccttcatttggccgccgatcggctccgcgatccaaaccttctcccagtgggctgcttatcagaacccagtggtggcgtttggtatctacggtttcatcgaacgttgcctggtgccgtttggtctgcatcacatctggaacgttcctttccagatgcagatcggcgaatacaccaacgcggctggtcaggtgttccacggcgatatcccgcgctacatggcaggcgacccgacggcgggcaaactgtctggcggcttcctgttcaaaatgtatggtctgccggcagcggctatcgctatttggcactctgctaaaccggaaaaccgcgccaaagtgggcggtatcatgatctccgccgcgctgacctcgttcctgaccggtatcaccgagccgatcgagttctcgttcatgttcgtggcgccgatcctgtacgttatccatgccattctggcgggcctggcgttcccgatctgtatcctgctgggtatgcgtgacggtacctcgttctctcacggtctgatcgactttatcgtgctgtccggtaacagcagcaagctgtggctgttcccgattgttggtatctgctatgcgatcgtgtactacgtcattttccgtgtgctgattaaagccctggatctgaaaactccgggtcgtgaagacaccaccgaagagagcaaagctggcgccaccagcgagatggctccggctctggtcgccgctttcggcggtaaagagaacatcaccaacctcgacgcatgtattactcgtctgcgtgttagcgtggcggatgtagcgaaagttgaccaggctggcctgaaaaaactgggcgccgctggcgtggtagtggcaggttctggcgtacaggccatcttcggtaccaagtccgataacctgaaaactgaaatggatgagtacatccgtaacagttaa

SEQ ID NO: 243964 - DNA, 357 bp, Klebsiella pneumoniae; identical to SEQ ID NO: 139055

SEQ ID NO: 243965 - DNA, 375 bp, Klebsiella pneumoniae; identical to SEQ ID NO: 210720

SEQ ID NO: 243966 - DNA, 648 bp, Klebsiella pneumoniae
atgatgaaaatgtgtcgctatgcgttaatcacagcactggcgatattcctcgctggctgtgcggggttgcgggagcagcccgcgccggtagaagaggccaaaccgcagccgcagcagcctgcgcagccgcagcccacggtgccgaccgtaccggcggtgccctctgtcccggcgcagcctgggccgattgagcatcaggatcagcagtcgggtcagccggcgccgcgcgtgcgtcattatgactggaacggcgcggttcagccgctggtggggcagatgctgcaggcgagtggggtcaatgccggcagtattctgctggttgacagcgtgaacaaccgcaccaacggttcgctgaatgctggagaagccaccactgcgctacgtagtgcgctggccggtaacggcaaatttaccctggtatcggcgcagcagctggcggtcgccaagcagcagctgggcctgtcgccgcaggacagccttggcagccgcagcaaagccatgggcatcgcccgcaacgtgggcgcgcagtatgtgctttactccaatgccaccggcaacgtcaacgcgcctgagctgaaaatgcagctcatgctggtgcaaaccggtgagataatctggtcaggtaaaggtgctgttcagcaacaataa

SEQ ID NO: 243967 - DNA, 828 bp, Klebsiella pneumoniae
gtgctgttcagcaacaataagctaacgcgcgacgagctcttgtcgcgcttctttccccattatcatcctgtcgcctcgctgagccagagtggcctcagcggcggcagtgtgattatcagcgacggcgaccggcggcacgtgctgcgtcagccgcacgatccgtctgccgccacttactattttcgccgtcagtatcgcgcactccgccgactgcctgccagactggcgccaaccccgctgttttactcaccctgctggatggtggtggagtattgcgcaggggaggtgaaaagcgagttaccggcctccccgcagctgtcaggcttattgtatgatttgcatcagcaaccgcggtttggctggcgggttagcctcacaccactgctggcccagtactggcagaggtgcgatccggcgcggcgcaagccgcgttggctgcgctggcatcagcggctgcgccgccagggcgagccccgtcccctgcggctggcgccgctgcacatggacgtccatgccggcaatattattcataatgagtccggcctgaggctgatcgactgggaatatgccggtgatggcgatatcgcgctggagctggccgcggtgtggatcacgcctggcgagcgccgtcggctggtagaagcgtatgcccggcgggcggccatcgacgcgcagctgctttggcggcaggttgtactctggcgcccgtgggtactgctgttgatggcgggctggtatgaaatgcgctggcggcagagcggggaccggcaatttatcacgctggcagatgaaacatggtgtcagttagacaacgaacgtaaaggataa

SEQ ID NO: 243968 - DNA, 1023 bp, Klebsiella pneumoniae
gtgggcccagtgatgttggatgtcgaagggtatgagctggatgcggaagagcgagaaattctggcgcatccgctggtgggagggttgatcctctttacccgaaattatcacgatccggcgcagctgcgcgagatggtgcgccagatccgcgacgcctcccggaaccacctggtggtggcggtcgatcaggaaggggggcgggttcagcgtttccgcgaagggtttacccgtttaccggtggcccagtctttcgccgcgctgctggggatggaagaggggggcaaactggccgccgaagccggctggctgatggccagcgaaatgatcgccatggatatcgatattagttttgcgccagtgctggacgtcggccatatcagcgccgcaatcggcgaacgttcttatcatgaagatccgcagaaagcgctgacgatggcgcgtcacttcattgacgggatgcacgccgcgggcatgaaaaccaccggcaaacacttcccgggtcacggggcggtgactgccgattcgcacaaagagacgccgttcgatccgcgggcggcatcggttatccgcgaccatgatatggcggtgttcaaaagccttatcgccgagcagcgtctggatgccattatgccggcgcatgtgatttacccggagctcgatccgcgtccggccagcggctcggcgtactggctgaaaacggtgctgcgcggcgaactgggctttgacggggtgattttctccgacgatctgtcgatggaaggggcggcgatcatgggcagctatgccgaacgcggtcaggcatcgctcgacgccggttgcgatatgatcctcgtctgcaataatcgtaaaggcgcggtcagtgtgctggataacctgtcgccgatcaaagcagagcgtgttacgaaattgtatcataaaggttccttttcccgtcaggagttaagggattcagcccgttggaaaacggtgagtgcccagctggagcagcttcatgcgcgctggcaagaggcgaagtccgcgtaa

SEQ ID NO: 243969 - DNA, 543 bp, Klebsiella pneumoniae
atgattatctatttacacggttttgactcgaacagccccggtaaccatgagaaggtgatgcagctgcagtttatcgacccggacgtgcggttgattagctacagcacgcggcatcccaagcacgatatgcagcatttgctgaaagaggtcgataaaatgctgcagctcactgccgatgaccggccgctgatctgcggcgtcggccttggcggctactgggcggagcggattggttttctgtgcgatatccgccaggcggtgttcaatccaaacctgtttccgcatgagaacatggaaggcaaaatcgaccgaccggaagagtatgctgacatcgccaccaagtgcgtgaccaacttccgcgagaagaaccgcgatcgctgcctggtggtgctttcccgccaggacgaggcgttggacagccagcgttccgccgatctcctgcaccactattatgaaattatctgggatgaagagcagacccataagtttaaaaatatctcgccgcatctgcagcggctgaaagcgtttaaaaccctcggctaa

SEQ ID NO: 243970 - DNA, 1305 bp, Klebsiella pneumoniae
atgactacgccattgaaaaaaatcgtaattgtgggtggcggcgctggcggactggaactggcaactcagctggggagaaagttagggcgccataagaaagcgaaaatcaccctggtggaccgtaaccacagccatctgtggaagccgctgctgcacgaagtggccaccggttctctggatgaaggcgttgatgcgctgagctatctggcccatgcccgcaaccacggtttccagttccagctgggctcggtggtcgatatcaaccgcgaagggaaaaccatcaccctcggcgagctgcgcaatgaaaaaggcgagctgctggtggctgagcgtaaactgccgtacgacacgctggtcatggcgttgggcagtacctcgaatgattttaatacccctggcgtaaaagagaactgcattttcctcgacaacccgcaccaggcgcgtcgcttccatcaggaaatgctcaacctgttccttaaatactctgctaacctcggcgctaacggtaaagtaaatatcgccatcgtcggcggcggcgccaccggcgtggagctctccgctgagttgcacaatgcggtgaaacagctgcacagctacggctacaaagggctgaccaacgaagcgctgaacgtcacgctggtcgaggcgggcgagcgcattctgcctgcgctgccgccgcgcatttccggggcagcgcataatgagctgactaagctgggcgtacgggttctgacgcagaccatggtcaccagcgcggatgcgggcggcctgcacactaaagatggcgaatatattgaggcggatctaatggtctgggcggcggggatcaaagcgccagatttcatgaaagagatcggcggcctcgaaaccaaccgtatcaatcagctggtggtcgagccgacgctgcagactacccgcgatgcggatattttcgccatcggcgactgcgcctcctgcgcccgcccggaaggcggctttgtgcctccgcgggcccaggcggcgcaccagatggctacctgcgcgctgaacaacatcctggcgcagatgaaaggcaaaccgctgaaggcgtacacctataaagaccatggctcgctggtgtcgctgtcaaattactccaccgtcggcagcctgatgggtaacctgatgcgcggttcgatgatggtggaagggcgcattgcgcgcttcgtgtacatctccctgtaccgtatgcaccagattgccctgcatggttacttcaagaccggcctgatgatgctggtcgggcgcatcaaccgcatcattcgcccgcgcctgaaattgcactaa

SEQ ID NO: 243971 - DNA, 540 bp, Klebsiella pneumoniae
gtgaataaatctatgttggcgggtatagggataggcgtggctgccgcgctgggcgttgcagctgtcgctggtctcaacgtgttggatcgcggcccgcagtatgcgcaagtggtctccagtacaccgattaaagaaaccgtgaaaacgccgcgtcaggaatgccgcaatgtcacggtaactcatcgtcgtccggtacaggatgaaaaccgcatcgccggttcggtgctgggcgcggtggcgggcggggtgattggccaccagtttggcggcggtcacggacgcagcgtggcgacggtcgtaggtgcgctgggcggcggctatgcaggcaaccagatccagggcgcgatgcaggacaacgatacctacaccaccacccagcagcgctgcaaaacggtgtatgacaaatccgataaaatgctcggctacgatgtgacctataagataggcgatcagcaggggaaaatccgcatggatcacgatcccggcagccagatcccgctggacaacaacggccagctggtcctgaacaacaaaatctaa

SEQ ID NO: 243972 - DNA, 2190 bp, Klebsiella pneumoniae
atgaaaaagcgcctctgggtgctccaccctctgctgctggccagcacgctgcctgcgctggcggctcagtctgatgaagacagcatcatcgttagcgcaaaccgcacccatcgcaccgtggccgaaatggcccaaaccacctgggtcattgagggccaggagattgagcagcaggtccagggcgggaaagagttcaaagacgtgctggcgcagctgatccccggcatcgacgtcagcagccaagggcggaccaactatgggatgaacatgcgcgggcgcgcgatcgtcgtgctgattgacggcgtccggctcaactcctcacgcaccgacagccgccagctcgacgccatcgatccattcaacatcgaacatatcgaagtgatctccggagcgacctcgctgtacggcgggggcagtaccggcgggcttatcaacatcgttaccaaaaagggacagcaggatcgtcaggtcgatcttgaggtgggcagcaagagcggttttgcgaacagcaacgatcatgatgagcgcgtcgcggcggccgtcagcggcggaacagaccacgcatccggccgcttgtcggtagcctatcagcgtttcggcggctggtacgacggcaataacgatgcgctgatcctcgataatacccaaacggggctccagcactctgaccgcctcgacgtgatggggacggggacgattgagatcgatgataaccgccagctgcagctggtcacccagtattataaaagccagggcgatgatgactacggtctgtggctcgggaagaacatgtccgcggtcaccagcggcggcaaagcgtataccaccgacgggctcaattccgatcgtatccccggcaccgaacgccatctgatcagcctccagtactccgatgccgactttttcggccagaatctggtgagccaggtgtactatcgcgatgagtccctcaccttctatccgttcccgacgctcacgaaaggtcaggtcagtagcttctcctcgtcgcagcaggataccgatcagtatggggccaagctgaccctcaacagccaaccgctggcggggtgggatctcacctggggtctcgacgccgatcatgagacctttaatgccaaccaaatgttcttcgatctgccacaatcgatggcctccggcgggttgcacaacgaatcgatctacacaaccggccgctacccgggatacagtatttccaatgtcgcgccattcctgcagtccagctacgatctgaacgatatctttaccgtcagcggcggggtacgctaccagtggaccgaaaaccgggtcgacgactttgtcggctacgcccagcagcaggatatcgccaacggcaaagcgcgctccgccgacgccatcaaaggcggcaaaaccgattatgacaatttcctgtttaacgccgggatcgtggcccacctgaccgagcgtcaacaaacctggtttaacttctcgcagggtgtcgagctaccggaccctggtaaatactatggcatcggtaaatatggcgctgcggtgaatggtcatctgccgctgatctccagcgtcaacgtcgatgactcgccgctgcaggggatcaaagttaactcgtatgagctgggctggcgctacaccggcgataacctgcgcacccagctggcggcgtattactcgacctcggataagaccattgtcgtcaaccgcaccgacatgaccatcgacgttcagtccgacaaacggcgtatttacggcgttgagggggcggtcgactactttattccggatagcgactggagcgtcggcggtaacttcaacgtgctgaaatcccaggtgcagaccgacggtcgctggcaaaaatgggacgtcaccctcgcctcgccgtctaaagccaccgcctgggtgggctgggcgccggatccgtggagcctgcgcgtgcagagccagcaggtgtttgacctcagcgacgccgccggcaacaagctggaaggctataacaccgtcgattttatcggtagttacgcgctgccggtggggaaactgaccttcagtatcgaaaatctgcttaacgaagactatgtgactatctggggccagcgcgcgccgctgctctacagcccaacctacggcagttcatcgctgtatgagtacaaaggtcgtggccgcacctttggtctgaactacgccttaaccttctga

SEQ ID NO: 243973 - DNA, 636 bp, Klebsiella pneumoniae
atgacaactgacgttcaaagttgcgccaaaaaaagccgtggccgaccgaaggtgttcgacagggatgcggcgctggacaaagccatgacactcttctggcagcacggctatgaggcgacctcgctcgccgatctggtcgaggcgacaggagcaaaagcccccaccctgtatgcggaatttgtgaataaagaaggcctattccgcgcagtgttggatcgttacatttcgcgctttgccgcgaagcacgaagccgtgctgtttgccgagggaaaatccgtcgatcgcgcgttgcgtgactacttcacggcggtcgctacctgctttaccagcaaagagacgccggccggctgctttatcatcaatacctccgccgcgctggccgcctcctcgacggatatcgccaataccatcaaatcccgccatgcgatgcaggagcaggcgctaacccagtttctgcagcagcggcaggcgcagggcgaactgcccgcggaccgcgatgtcgcgcagctggcgcaatttcttaactgcgttctgcaggggatgtcgattagcgcccgggaaggcgcggatttcgacaagctgatgcaaatcaccgacaccactctccgtctctggccgcaggtcctcgagtcctga

SEQ ID NO: 243974 - DNA, 258 bp, Klebsiella pneumoniae
atgaaaaccgttaatactctggctattgccgccgttttaagttccctttctttcgccagctttgccgctgtagaggtgcagtccacccctgcaggacagcataaagtaggcaccatctctgcttctgccgggactaacctgggctcgctggaagaccagctggcgcagaaagcggatgagatgggcgccacttcatatcgtattacttcggtaaccggtccgaatacccttcacggtaccgccgttatctacaagtaa

SEQ ID NO: 243975 - DNA, 960 bp, Klebsiella pneumoniae
atgagaaaccgtttccccgtgacgctttggctgacgctagtcgcgttagtcgccgcgctggccctccccgcgcgcgctaacacctggccccttcccccgccgggcagccggctggtgggtcagaatcagtttcatgtggtacaggatgacggcggttcgctggaagcgattgccaagaagtacaatgtcggcttcctggccctgctgcaggccaatcccggggttgacccctatgttccgcgcgccggcagcgtgctgaccatccccctgcagacgctactgcccgatgcgccgcgcgaagggctggtgattaacctcgccgaactgcgcctctattattacccgccgggcaagaatgaagtgaccgtctacccaatcggcatcggtcagctgggcggaaccaccatcacaccgacgatggtcacaaccgtgtccgacaaacgggccaatccgacctggacacctaccgccaatattcgcgcgcgctacaaggctatggggattgagctgccggcggtggtgcctgctggtcctgacaatccgatgggccatcacgccatccgcctcgccgcctatggcggagtctatctcctgcacggcaccaatgccgatttcggcatcggtatgcgcgtcagttccggctgcattcgtctgcgcgataacgatatcaaggcgctgtacaacactatctcgccgggcacgaaggtgaacattatcaacacgccgatcaaggcgtcggtcgagccggatggccgccgtctggttgaggtccatcagccgctgtctgagcatatcgatgacgacccgcagaccctgcccattacgcttaatgcggccatgactgcgttcaaacaggcgccgcagaccgacgggacggtgatggagcgcgcgatgaattatcgctcgggcatgccgattgacgtcacccgtcatgctgagcctggaccgcagtcgttgtag

SEQ ID NO: 243976 - DNA, 3447 bp, Klebsiella pneumoniae
atgcctgaacaatatcgatactcattgccggtgaaagccggcgatcagcgccagcttggcgagttgaccggcgcagcctgcgccaccctggtggcggagatggccgaacgccacaacggcccggtggtgctggtggcgcctgacatgcaaaacgcgctgcgtctgaacgacgagatcaggcagtttaccgacagcatggtgatggggctggcggactgggaaacgctcccttacgacagcttctcgccgcatcaggacatcatctcctcccgtcttgccaccctttaccagttacccaccatgcagcgcggcgtgctgatcgtcccggtcagcaccctgatgcagcgcgtctgtccgcacagcttccttcacggccacgcgctggtgatgaaaaagggtcagcgcctgtcgcgcgatgcgctgcgcgatcagctggagggggccggctaccgccatgtcgatcaggtgatggagcacggcgaatatgctacccgcggcgcgctgctcgacctgttcccgatgggtagcgatcagccctaccgccttgatttctttgacgatgaaatcgacagcctgcgcctgttcgacgttgacagccagcgcacgctggaggaagtggcggccattaacctgctgccggcgcacgagttccccaccgaccagaccgctattgagctgttccgcagccagtggcgcgaccgctttgaggtgaagcgcgatgccgagcacatctatcagcaggtcagtaaagggacgctacctgccggtatcgaatactggcaaccgctgttcttcagcgagccgctgccgccgttattcagctatttcccggccagcacgctgatcgtcaacaccggcgctctcgaggccagcgcggagcgattccagaatgaagcccgcgcccgctttgaaaaccgcggcgtcgacccgatgcgcccgctcctgccgcctgagctgctgtggctgcgcagcgatgagctattcagcgaactgaaaaaatggccgcgcgtgcagctgaaaaccgaacgtctggcggacaaagcggcgaatactaatctgggctaccagacgctgccggacctcgccgtccaggcgcagaacaaagcgccgctggataatctgcgccgcttcctcgagtcctttaccggtccggtgatcttctcggtggaaagcgaaggccgccgtgaagcgctgagcgaaatgctggcgcggattaaagttgcgccaaaacatgtgctgcgtctggaggaagccaccggcaacggccgctatctgatgattggcgctgctgagcacgggtttatcgacagccagcgcggcctggcgctgatttgcgagagcgacctgctcggcgagcgggtggcgcgccgtcgtcaggattcgcgccgcaccattaaccctgacactctgattcgcaacctcgccgaactgcatatcggccagccggtcgttcacctggaacacggcgtgggccgctacgcgggcatgactaccctggaagccggcggcatcaccggcgaatatctgatgctaacctacgccaacgatgccaagctatacgttccggtatcgtccctgcatcttatcagccgctacgccggcggggcggaagaaaacgcccccctgcacaagctgggcggcgatgcctggacccgggcgcgacaaaaagcggctgagaaagtacgcgacgtggcggccgagctgctggatatctacgcccagcgcgcggcgaaggcgggttttgcctttaaacacgaccgcgaacagtatcagctgttctgcgacggcttcccatttgaaaccacgccggatcaggcgcaggcgatcaacgccgtcctcagcgatatgtgccagccgctggccatggaccgcctggtatgcggcgatgtgggcttcggcaagaccgaagtggccatgcgcgccgccttcctcgccgtggagaaccacaagcaggtggcggtgctggtgccgaccaccctgctggctcagcagcactatgacaatttccgcgatcgtttcgccaactggccggtacgcatcgaaatgctctcccgcttccgcagcgctaaagagcaggcgcagatcctcgagcaggccgcggaaggcaaaatcgatatcttgatcggcacccacaagctgctgcagagcgaggtgaagctgcgcgatctcgggctgctgatcgtcgacgaagagcaccggtttggcgtgcggcacaaagagcgcatcaaagcgatgcgcgccgatgtcgatatcctgaccctcaccgccacgccgatcccgcggacgctgaacatggcgatgagcgggatgcgcgatctgtcgatcatcgccacgccgccggcgcgccgcctggcggtgaagaccttcgttcgcgaatatgacgccctggtggtgcgcgaggcgatcctgcgcgaaacgctgcgcggcggccaggtctactatctgtttaatgacgttgagaacatccagaaagccgccgacaagctggcggagctggtgccggaggcgcggatcgccatcggtcacggtcagatgagggagcgcgaactggagcgggtgatgaatgacttccatcaccaacgcttcaatgtgctggtgtgcaccaccatcatcgaaaccgggatcgacattcccaccgccaacaccatcatcatcgaacgcgccgaccattttggcctcgcccagctgcaccagctgcgcggccgcgttggccgttcgcatcaccaggcctatgcctggctgctgacgccgcatccgaaagcgatgaccaccgatgcgcaaaagcgcctcgaggccattgcgtcgctggaagatctcggcgccggctttgcgctggcaacccacgatctggagattcgcggggccggggaactgcttggggaagatcagagcggtcagatggaaaccatcggtttctccctgtatatggagctgctggagaacgcagtcgatgcgttgaaagccgggcgtgaaccctcgctggaagatctcaccagtcagcagacggaggttgaactgcgcatgccttccctgctgcctgatgatttcatccctgacgtcaatacgcgcctgtcattctataagcgcattgccagcgccaaaaacgaacaggatctggaggagatcaaagtcgagctgatcgatcgttttggccgcctgcccgatgccgcccgcaacctgctggatatcgcccgtctgcgtcagcaggcgcaaaagttagggatccgcaagctggaaagcaacgaaaaaggcggcgtgatcgaatttaacgagaaaaacaacgtcaatccggtgtggctgatcggcctgctgcagaagcagccccagcacttccgcctggacggtcccacgcgcctgaagttcatgcaggacctggaggagcgtaaaacgcggatggactgggttcgccagtttatgcgccaactggaagagaacgccgtcgcctga

SEQ ID NO: 243977 - DNA, 1200 bp, Klebsiella pneumoniae
atgtaccaacctgccgcactctttatcggcctacgctatatgcgcgggcgcgcagccgaccgcttcggtcgtttcgtctcctggctctcaactatcggtattacgcttggcgtaatggcgctggtgacagtcctgtcggtgatgaacggctttgaacgcgagctgcaaaacaacatcctggggctgatgccacaggccattcttagcgccaaacaggggtcggtgaaccctcagcaactgccggagcgcgaagcgaaacttaatggggtaacccgcgtagcgccgatcaccaccggcgacgtggtgctgcagagcgcgcgcagcgtggcggtcggggttatgctgggcattgatccggcgcagaacgatcccctgactccatacctggtgaacgtcaaacagagcgatctgcaggcgggcaaatataacgttattctcggcgagcagctggcgggccagctgggggttaatcgcggcgataaaattcgcgtgatggttccttccgcgagtcagtttacgccgatgggccgcgtgccgagccagcgtctgttcacggtcatcggcaccttcgccgccaacagcgaagtcgatggctatcagatgctgaccaacatcgacgacgcctcccgtctgatgcgctatccgctggggaatatcaccggctggcgcctgtggctggataaaccgctgcaggtcgacaccctgagtcagcagacgctgccgccgggaactcagtggcaggactggcgcgagcgcaaaggcgaactgttccaggcggtgcgcatggagaaaaatatgatgggcctgctgctgagcctgatcgtcgccgtcgcggccttcaacattattacctcgctggggatgatggtgatggagaagcagggcgaagtggcgatcctccagacccaggggctgacgccgcggcagattatggctgtctttatggtgcagggggccagcgccgggatcgtcggcgcgctgctgggagcggtgcttggcgccctgttggccagccagctgaataatttaatgccgatcatcggcgccttccttgacggcgcggcgctgccggtggcgattgagccgctgcaggtcattgttatcgccctggtggcgatggtgctggccctgttgtctacgttgtacccttcctggcgcgctgccgccacccaacccgctgaggctttacgttatgaataa

SEQ ID NO: 243978 - DNA, 702 bp, Klebsiella pneumoniae
atgaataagatcctgctgcaatgcgacaacctgtgcaaacgctatcaggaaggcaatgtgcaaaccgatgtcctgcacaatgtcagcttcagcattggtgaaggcgagatgatggctatcgtcggcacctccggctctggcaaaagtacgctgctgcatctgctcggcggcctggatacgcccacctctggcgacgtgattttctccggtcagccgatgagcaagctatccaccgccgcgcgcgccgacctgcgtaaccgcgagctgggctttatctatcagttccaccatctgctgccggactttagcgcactggaaaacgtggcgatgccgctgctgattggcaaaaagaagccggcggatattgaacgccaggcgaaagcgatgctgcaagcggtcgggcttgaacaccgcagccatcaccgtccgtcggagctctccggcggcgagcgccagcgggtggcgattgcccgcgcgctggtgaataaaccgcggctggtgctggcggacgagccaaccggtaacctcgacgctcgcaacgccgacagcatcttccagctgctgggcgaactgaacgtcgcgcagcgcaccgcgtttctggtggtgacccacgacctgcagctggcgaagcgcatgagccgccagctggagatgcgcgatggccgtctgaccgccgacctgaccctgatgggggccgagtaa

SEQ ID NO: 243979 - DNA, 1245 bp, Klebsiella pneumoniae
atggcgtctccgttatcgttactgattgcattgcgtttcagccgcggccggcggcgcggcggcatggtgtcgctgatctcggtgatctccaccatcggcattgcgctgggggtggcggtgctgatcgtcggcctcagcgcgatgaacggctttgagcgcgagctgaataaccgcgtgctggcggtggtaccgcacggcgaaatcgaacccgtgaatcagccgtggaataactggcaggaagcgctggcgaaggtgcagaaggtgaaggggattgtcgcggcagcgccctatattaacttcaccggcctggtggagagcggcagcaatatgcgcgccatccaggtgaaaggcgtcgacccgcagcaggagagccagctcagcgcgctgcctacctttgtgcagaataacgcgtgggccggattcaaggctggcgaacagcaggtgatcctgggcaaaggggtcgccgatgccctgcacgtgaagcagggggactgggtgtcgatcatgatccctaatgccgacgccgaccatcagctgctgcagccaaaacgcgtcaggctgcatgtgaccggaattttacagctgagcggccagctcgatcatagttttgccatgatcccgatgcaggatgcgcagcagtacctggagatgggcggcagcgtgaccggcatcgccatcaaggtcaccgacgttttccatgctaacaagctggtacgcgacgccggcgaggtgaccaacagctacgtctacatcaagagctggatcggcacctatggctatatgtatcgcgacatccagatgatccgcgccattatgtacctggcgatggtgctggtgatcggcgtggcctgctttaacatcgtctcgacgctggtgatggcggtcaaagacaaaagcggcgatattgcggtgctgcgcacgcttggcgcaaaagacggcttaattcgcgcgattttcgtgtggtatggtttattagccggatcggtaggcagtctgtttggggtggtgatcggcgtgatctgcgcgttgaacctgacgtcgatcatcaacggcatcgaatacctgattgggcataaattcctctccggcgacatctattttattgacttcctgccgtcagaattgcactggctggacgtcttttatgtgctggtgacagcactgttgctgagtttgctggccagctggtatcccgcccgccgcgccagccgcatcgacccggcgagggtgctgagtggccagtaa

SEQ ID NO: 243980 - DNA, 831 bp, Klebsiella pneumoniae
atgcagtcgcgccgtttacatcgattgagccgttttcgtcgcaataaacgtcggttgcgtgaccgtctgcgacagcggattttctttagggaggacaggatgaagcctgaagcgatggcaaaaccgagagtggtggtgttaaccggcgcgggcatctcggcagagtcggggatcaaaaccttccgcgcggccgatggcctgtgggaagagcatcgggtggaagatgtggcgacgccggaaggcttcgcccgcgatccggcgctggtgcaggcgttctacaacgcccgtcgtcgtcagctgcagagtccggaaatcgcgccgaacgcggcgcatctggcgctggcgcgtctggaggatctgctgggcgaccattttctgctggtcacccagaatattgataatctgcacgagcgcgccggcaaccgccgggtgatccatatgcacggcgagctgctaaaggtgcgctgttcgtggagcggccaggtgctggagtggaccggcgacgtcaccgccgaggacaagtgccactgctgccagttcccggcggcgctgcgtccgcacgtggtctggtttggcgaaatgccgctggggatggatgagatctacagcgcgctggccgacgcagatatttttatcgccatcggcacctccggccatgtctatccggcggctggctttgtgcacgaggcgcgactgcacggcgcccataccgttgaactgaacctggagcccagccaggtgggcagcgagtttgccgagaagcactacgggctggcaagcgaagtggtacccgcctttatcgataagctgctacaggaaaacgcgctgtaa

SEQ ID NO: 243981 - DNA, 345 bp, Klebsiella pneumoniae; identical to SEQ ID NO: 210737

SEQ ID NO: 243982 - DNA, 1629 bp, Klebsiella pneumoniae; identical to SEQ ID NO: 237518

SEQ ID NO: 243983 - DNA, 1725 bp, Klebsiella pneumoniae
atgagccatgcgcgacccggtctgacgacctgttctcagtatgatgcggccctgcacgccttgtcggcggcgcgccagcgctgggcggaaacctcagtgaaccgtcgtctggcgctcctgcgccagatcaaggatgccctggccggcattgccccggcgtgggtggccgcggcagcggcggccaaagggctgccggcgggcgatccgctggcgggggaagagtggctggcgggcccctgcgcgctaatggtcggctgcaacgggcttatcgccaccctggagcaactggaggagaagacctttctgcggcggatcccactgcggacgctggcggacggccgcctggcgctgcgggtggtgcccggcacgctctgggatcggctgcttctgtctggtgttcgcgctgagatatggatgcagccaggcgtcacccgggcccatctcgaccgctatgcggcgcgggcatacgacatcccgcctgccgcgcggcagggcaagctggcgctggtgcttggcgccggcaatgtggcctcgattgcgccactggatgtgctacacaagctgtttattgagaatcaggtctgcctgctgaagctcaatccggtgaatgattatctgcacgatctgctggcccaggccctggcgccgctgattgccatggatgcgctccgcatcgtcaccggcgacgcccgggcgggagcgtggctgaccacccatcccgctgtcgatgagatccatatcaccggctcccgcgagacccatgacgtcatcgtctggggcgagggtgaggcggctcgccagcgtcgggccgccgggacgccgctgaacccgcgtcgggtgacctcggagctgggcggcgtcagccccaccattatcgtacccgggccgtggagcgaggcggacatcgcttttcaggcgcagcagctggcgacgcagaagatgaacaacggcgggtttaactgcgtggccagccaggtgctgatcctgcagcaaggctgggagcctgcgacggccttgctgaatcagctgtaccgactgatcgccgcgaatacccgcccggactactaccccggcgctgaaaaccggctgaccgactttcgcctgcgcgcccgtcagccgctggagatagcccgcggtgacgcgctgccgttgattgtggcgaataccgacgatgatcccgggttctgccagcaggaggtctttggcccggggctgtcggtcacccgtcttgaggccgatagtgcggaaagctttctgcgccaggcgatcggctatgcgaatcagcggctgcagggcacgctgggggccaatattgtgatccacccgcgcacccgcaaagcgattggacgtaagcgttttaatgcgctgatcgccgagctgcgctacggcacggtggcgatcaactgctggagcggggtggccttcctgttagccccttgcccgtggggggcgtttcccggccacacgctcgacgatattcagagcgggcggggcaaggtgcataacagctttatgctggagaaaacggagcgcacggtgattgaggcgccgtttcggccgtttccgcgtagtctttggcatggcgaactgacgctgatgcccctgccgccctggttcatcacccaccgggggcaggaagcggtggcgcagcggctggtggatttttaccatcggccgcgctggcgcaaattgccggcgctcctctggcgcgcgctgcggggctaa

SEQ ID NO: 243984 - DNA, 1047 bp, Klebsiella pneumoniae
atgaaaaaatggtcacgccacctgctcgcggcgagcgctctggcaatcggcatgggcgctgcgcacgcggacgatagcaaaacgctctatttctataactggaccgagtatgtgccgccgggcctgctggagcagttcaccaaagagaccggcatcaaggttatctattcgacctacgagtcgaacgaaaccatgtacgccaagctcaaaacctataaagacggcgcgtacgacctggtcgtcccgtcgacctactttgtcgacaagatgcgcaaagaaggcatgctgcagaagatcgatcagagcaagctgactaacttcagcaacctcgatccgcagatgctgaataaaccgttcgatccgaataacgactactccatcccctatatctggggggcgacggccatcggcgtcaacagcgaggcgattgacccgaaaactatcaccagctgggccgacctgtggaagccggaatacaaaagcagcctgctgctgaccgacgacgcgcgcgaagtgttccagatggcgctgcgtaagctgggctattccggcaacaccaccgacccgaaagagattgaagccgcctataacgagctgaaaaagctgatgcccaacgtcgcagcgtttaactctgataacccggcgaacccgtatatggaaggcgaagtgaacctcgggatggtatggaacggctcggcttacgtcgcccgccaggcaggtactccgctggaagtgatctggccgaaagagggcggcatcttctggatggacagcctgtcgatcccggcgaacgccaaaaacgtcgacggcgcgctgaagctgattaacttcctgctgcgcccggatgtcgccaaacaggtcgctgaaaccatcggttatccgacgccgaaccttgcggcgcgcaagatgctcagcccggcagtggccaacgataaatcgctctatccggacgccgcaaccattgagaaaggcgaatggcagaatgacgtcggcagcgccagcgctatttatgaagagtattaccagaagctgaaagcgggccgttaa

SEQ ID NO: 243985 - DNA, 786 bp, Klebsiella pneumoniae; identical to SEQ ID NO: 210741

SEQ ID NO: 243986 - DNA, 858 bp, Klebsiella pneumoniae; identical to SEQ ID NO: 210742

SEQ ID NO: 243987 - DNA, 1137 bp, Klebsiella pneumoniae
atgggacagagtcaaaaattgaatatacaaccgcgttcgcgttcgccgctggtgcatctggcgggaattcgcaagagctttgatggtaaaacggtcatcgacaaccttaatctgaccatcaacaatggtgagtttctcactctgcttggcccctctggctgcggtaaaaccaccgttctgcgccttattgccggcctggaaaacgtcgacagcggacggatccatctcgaagatcacgatatcactcatgttccggcggaaaaccgccacgtcaataccgtattccaaagctacgccctgtttccgcatatgacggtgttcgagaacgtcgcctttggcctgcggatgcagaaaacaccggcggcggaaatcaccccacgggtgatggatgccttaaaaatggtgcagctggaggcgtttgcccagcgcaaaccgcaccagctctccggcggccagcagcagcgcgtggccatcgcccgcgcggtggtcaacaaaccgcgtctgctgctgctcgatgagtctctttcggcactggattacaagctgcgcaagcagatgcagaacgaattgaaagcgctgcagcgtaagctcgggatcaccttcgtcttcgtcacccacgatcaggaagaggctctgaccatgtccgatcgcatcgtggtgatgcgtgatggcaaaatcgaacaggacggcaccccgcgagagatctacgaagagccgaagaacctgtttgtcgccagctttatcggcgagatcaatatctttgacgccacggtaattgaacgtctcgacgaacagcgcgtgcgcgcccgcgttgaaggacgagaatgcaacatcaccgtcaattttgccgtggaggccggtcagcgtctgcatgtcctgctgcgcccggaagatctgcgcgtcgacgagatccaccataacagcgacgccgacggcctgatcggctatgtccgcgagcgcaactataaaggcatgactctggagtcggtggtagaactggagaacggcaaaatggtgatggtcagcgagttctttaacgaagacgacccggatttcgaccactctcttgaccagaaaatgtctatcaattgggtggaaagctgggaggtggtgctggccgatgaagaacaccagtaa

SEQ ID NO: 243988 - DNA, 1233 bp, Klebsiella pneumoniae
atggataaattgcttgagcgttttttgcagtacgtttctttggacacgcagtcaaagcctggcgttcgtcaggtccccagcacggaagggcagtggaagctgttacgcctgttgcaggcgcagctggaagaaatgggactggtcaaggtaacgctgagtgaaaaagggacggtaatgggaactttgcccgctaacgttgagggcgatatcccggccatcggttttatctcccacgtcgacacctccccggatttcagtggtaaaaacgttaatccgcagattgttgaaaactatcgcggcggcgatatcgcgctgggtatcggcgatgaggtgctctccccggtgatgttcccggttctgcatcagcttttgggacagacgctgatcaccaccgacgggaaaacgctgctcggggcggacgacaaagccggcattgccgaaattatgaccgcgctggcgactctgcaggcgaaaaatattcctcatggcgatatccgcgtggccttcacccctgatgaagaggtgggtaaaggggcgaagcatttcgacgtcgaggcctttgacgcccgctgggcctataccgtcgacggcggcggggtcggcgaactggagtttgaaaacttcaacgccgcctcggtgacgataaaaattgtcggtaataacgtgcaccccggcaccgcgaaaggggtgatggtcaacgcgctgtcgctggccgcgcgcattcatgccgaagtaccggccgatgaagcgccggagaccactgaaggctatgaaggtttttatcacctcaccagcatgaaaggcagcgtcgatcgggccgagatgcattacatcatccgcgattttgaccgtaagcacttcgaggcgcgcaagcgcaagatgatggagatcgccaaaaaggtcggcaagggactgcacccggactgttatattgagctggtgatcgaggacagttattacaacatgcatgagcaggtgatcgcccatccgcacgtggtcgatattgcccgccaggcgatggtggactgcgatattgaaccgcagatgaagccgatccgcggcggcaccgacggcgcgcagctctcatttatgggactgccgtgcccaaacctgtttaccggtggctacaactatcacggcaaacatgagtttgtcaccctggaaggaatggagaaagcggtgcaggtgatcgtgcgtatcgccgagctgacggcggcacgcaaagggcattaa

SEQ ID NO: 243989 - DNA, 1122 bp, Klebsiella pneumoniae
atggattatcaattaacgcttaactggcccgactttatcgaacgctactggcaaaaacggccggtggtattgaagcgcggcttcgccaattttatcgaccccctaagcccggacgaactggcaggactggccatggagagcgaggtcgatagccgccttgtcagccatcaggatggaaaatggcaggtcagtcacggtcctttcgaaagctacgatcacctgagcgaaaacaactggtccctgctggtgcaggcggttaaccactggcatgaaccgtccgcagcgctgatgcatccgttccgtgccctgccggactggcgtatcgacgacctgatgatctccttctcggtgccgggaggcggcgtcggcccgcatctggatcagtatgatgtgtttatcattcagggcaccggccgtcggcgctggcgcgttggggaaaaggtgccgatgaaacagcactgcccgcatccggacctgctgcaggttgaccccttcgaggcgatcattgatgaagagatggagccgggcgatattctctatattccgccgggattcccgcatgagggttattcgctggaaaactcgcttaactattcggtcggctatcgcgcgccgaatgcccgcgagctgtttagcggctttgccgactatgtcctccagcgcgaactgggcagccagcgctacgccgatccggacgtgccgtcccgcgaccatccggcggatattttaccgaccgaactcgaccgcctgcgcgagatgatgctgggtctgattaaccaaccggagcactttaagcagtggttcggcgagtttatcacccagtcgcgtcatgagctcgacgtcgcgccgccggagccgccgtatcagccagatgagatttacgatgccctgcagcagggcgataccctggagcgcctgggcggcctgcgggtgctgcgcattgacggcgaggtattcgttaacggcgagaagatcaactccccgcaccgtccggcgctggacgccttagccacccatctgacgctgcgcgccgaccattttggcgatgcgctggaagatccttctttcctcgccatgctggcagcgctggtcaacagcggctactggttctttggcgactga

SEQ ID NO: 243990 - DNA, 1467 bp, Klebsiella pneumoniae
atgaagggactgttgcggcatatcttcccgctgtcattacgggttcgcttcctgctggcgaccgccggggtggtgctggtgctctccctggcctacggcatggtggccctggtgggctatagcgttagcttcgataaaaccacctttcgcctgctgcgcggcgagagcaatctcttttatatgctggcgagatgggaaaacggcgctattgacgtcgacatcccggaaaacctgaatatggaaagcccgacggtgacccttatctacgatgagcagggcaaactgctgtgggcgcagcgtgatgttccctggctggcgaaacgcattcaaccggaatggctgaaacgcaatggcttccatgagattgaagccgatgtcgacagcagcagtatgctgttgcgcaataaccatgagattcaggaacagctggacgctatccgcgaacagggcgacgactctgagatgacccactcggtggcgatcaacctctacccggccaccagcaaaatgcctcagctcagcattgtggtggtcgacaccattccggtggagctcaagcgcagttatatggtgtggagctggtttgtctatgtgctggccgccaacctgctgctggtgatccccctgctgtgggtcgccgcctggtggagcctgcggcccattgagtcgctggccaaagaggtgcgcgaactggaggaacatcaccgcgaaaagctcaatcccaacaccactcgcgagctgacccggctggtcagcaacctcaaccgcctggttcgcagcgagcgcgaacgctatgacaaataccgcactaccctcaccgatctcactcacagtctgaaaacgccgctggcggtgatgcagagtacactgcgctcgctgcgcggcgagaagatcagcgtcgacgaggcggagccggtgatgctggagcagataagccgcatctcgcagcagattggttattacctgcatcgcgccagcatgcgcagcggcggcaccctcttgagccgggaattacacccgatcgcccccctgcttgacagcctgacttccgctctcaacaaggtctatcagcgcaaaggggtcaatatctcgctcgacatctcgccggagatcacttttgtcggcgagcagaacgattttatggaagtgatgggtaacgttcttgataacgcctgtaagtattgtctggagttcgtggaagtttccgtgcgccagaccaccgacagccatctgcacatcctggtggaagacgatgggccggggatcccgcagagccagcgccgggccgttttcgaccgcggccagcgggctgatacccttcgtcccggccagggggtagggctctccgttgcgcgtgaaattgtcgaacaatatgatggagagatcatcgctggggaaagcctgctcggcggcgcctgcatggaggtggtgtttggccgccagcagatggaagataaacagagttaa

SEQ ID NO: 243991 - DNA, 672 bp, Klebsiella pneumoniae
atgcgcgtactcgtggttgaggataatgccctgctgcgtcaccacctcaaagttcagctgcaggagctgggccatcaggtcgatgcggcggaagatgccagggaagcggactactatctgggcgaacatctcccggatatcgccatcgtcgatctcggcctgccggatgaagacggtttatcactgatccgccgctggcgcagccacgacgtgttgctgccggtgctggtgctgaccgcccgcgaaggatggcaggataaagtggaagtgctgagcgccggggcggatgattacgtcaccaagcctttccatattgaagaggttgccgcccgcatgcaggcgctgctgcgccgtaacagcggtctggcctcgcaggtgatctccctgccgccgttccaggtcgacctctcccggcgcgagctgtcggtgaatgaccagccgatcaagctgaccgcctttgaatacaccattatggaaaccctgatccgtaaccgcggcaaagtggtcagcaaagattcgctgatgctccagctttacccggatgccgaactgcgagaaagccacaccatcgacgtgctgatgggtcggctgcgcaagaaaattcaggctgaatacccacaggacgtcatcaccacggtgcgcggccagggctatctgttcgaactgcgctga

SEQ ID NO: 243992 - DNA, 807 bp, Klebsiella pneumoniae
atgtttcagcagcagagcgcggactgggtcaggctggcgcaatcgcccagccggacggaacgcatcgaagccttcttcggcggccacggctatgagccgcaccggcatgatacctacgccatcggccagacgatcgccggcgtgcagagctttcactatcgcggcggacgccagcacagcctgcccggcggaacgatggtgcttcatccggacgaaatacacgatggcgaggcgggcaccgaggcggggtttcactaccgcatggtctatatcgaaccggcgctgatccagaagatactcggcggcaggccactgccgtttattcccggcggcctgtcggcggatccgcgcctgcggtgcgccgcgctgccgttattaaaagcggtcacggacaccttcgagccgctggaggaagaggacgccctgtacgacctggcgcagaccctggccgttgtcggcggccaacgttcccgtcgccaggcgtttgattatcaggcggcggagagggcccgggagtatattcatgcctgttttatgcaggatatgaccctcgacaccctgtcgcaggtcagcggccgggaccgctggagcctgagccgggatttcagaacgctgtacggcaccagcccgtggcgttacgtcatgatgcgtcggctcgatttttgccgccagcggatgcgcgccggggaacgtctggtggatattgccgccgacgcgggctttgccgatcagagccacatgacgcgccagtttatcagccgctttggtctctctccgggccgctggctgcgggcgatccgcggctag

SEQ ID NO: 243993 - DNA, 363 bp, Klebsiella pneumoniae; identical to SEQ ID NO: 241093

SEQ ID NO: 243994 - DNA, 1371 bp, Klebsiella pneumoniae
atggaattatcctcactgaccgccgtttcccctgtagacggccgctacggcgataaagtcagcgcgctgcgcggtatcttcagcgaattcggtttgctgaaattccgcgttcaggtggaagtacgttggctgcaaaaactggccgcccacgcagcgatcaaggaagttcctgcttttgctgccgacgcaaacggtttccttgagaaaatcgtcgccgatttcagcgttgaagacgcggagcgcatcaaaaccatcgagcgcaccactaaccacgacgtgaaagcggtagagtatttcctgaaagagaaagtcgctgacgtcgccgagctgcacgcggtatcagagtttattcacttcgcctgtacgtctgaagacatcaataacctctcccacgcgctgatgctgaaaaccgcccgcgacgaagtggttctgccttactggcgcaaactgattgatgcggtaaaagatctggcgacccagtatcgcgatgtgccgctgctctcccgtacccacggccagccggcaacgccgtccaccatgggtaaagagatggcgaacgtcgcctaccgtatggagcgccagtatcgtcagctgaaccaggtggaaatcctcggtaaaatcaacggcgcggtgggtaactacaacgcccacatcgccgcctacccggaagtcgactggcatcagttcagcgaagagttcgttacctcgctgggtattcagtggaacccgtacaccacgcagatcgagccgcatgactatatcgctgagctgtttgactgcatcgcgcgcttcaacaccattctgatcgacttcgatcgcgacgtgtggggctatatcgcgctcaaccacttcaaacagaagaccatcgccggggaaatcggctcctccaccatgccgcacaaggtgaacccaattgacttcgaaaactccgaaggcaatctcggcctggccaatgcggtcatgcagcacctggccagcaaactgccggtttcccgctggcagcgcgacctgaccgactccaccgttctgcgtaacctcggcgtgggcatcggctatgcgctgatcgcctatcagtccaccctcaaagggatcagcaagctggagctgaaccaggatcgcctgctggacgaactggatcacaactgggaagtactggctgagccgatccagaccgtgatgcgtcgttacggtatcgaaaaaccgtacgagaagctgaaagagctgacccgcggcaaacgcgtggacgcggaagggatgaagcagtttattgacagcctcgccctgccggaagaggaaaaagtgcgtctcaaagcgatgaccccggccaactatatcggtcgggcaaccaccatggttgacgagctgaagtaa

SEQ ID NO: 243995 - DNA, 642 bp, Klebsiella pneumoniae
gtggcgaagaattactatgacatcaccctggcgctggctggcgtttgccaggcggcgcgactggttcagcaactggcgcatcagggacattgcgacagcgatgccctgcatgtgtcgctgaacagcatcatcgacctcgatcctgagtcgacgctggcggtgttcggtggcagtgaagccaatcttcgcctcggtcttgaaacgctgctcggggtgctcaataccagcagccgtcagggcctcaatgcggaactcacccgctataccctgagcctgatggtgctggagcgcaagctcgccgccagtaaaggggcgatggacacgctcggcaaccgcatcgccggcctgcaccgtcagctggaacactttgacctgcagtccgaaacgctgctcagcgccatggcgggcatctatgtcgatgtgataagcccgctggggccgcgtattcaggtgaccggctcccctgccgtgctgcaaagcccgcaggtgcaggcgaaagttcgctcagcgctgctggcgggtattcgcgccgcggtgctctggcatcaggtgggcggcggacgtctgcagcttatgttttcccgtaatcgtctggttaaccaggcaaagcaaattcttgctcatttaaccccggagttgtga

SEQ ID NO: 243996 - DNA, 1167 bp, Klebsiella pneumoniae
atgaacggtgagcgcgtgctagaatacgccgcctcgaagttcaatgtagcgagtatttccatgtcagaaagccagaaaaaagtgatcgtcggcatgtccggcggcgtcgactcctcggtctccgcgtacctgctgctgcagcaagggtataaggtggaaggcctgttcatgaagaactgggaggaagacgacggcgaggaatactgcaccgccgccgccgaccttgccgatgcgcaagcggtctgcgataagctgggcattgaactgcacaccgttaactttgccgccgaatattgggataacgtctttgagctcttcctggaagagtacaaagccggccgcacgccgaacccggatattctgtgcaataaagagatcaaatttaaagccttcctcgagtttgctgccgaagacctcggcgccgactacatcgccaccgggcactatgtgcgccgcgcagatgtcgacggtaaaagccagctgctgcgcggactcgacggcaacaaagatcagagctacttcctctacacccttagccacgagcagattgcccagagcctgttcccggtgggtgaactggaaaaaccgcaggtgcgtaagatcgccgaagagctggatctgatcaccgcgaagaaaaaagattccaccggcatctgctttatcggcgagcgtaaattccgcgatttccttggccgctatctgccggcgcagccgggcaaaatcctcaccgtcgacggcgaggagatcggtacccatcaggggctgatgtaccacaccctgggccagcgtaaagggctgggtatcggcggcaccaaagagggtagcgaagatccatggtacgtggtcgataaagacgttgagaataatattcttatcgtcgcccagggccatgaccacccgcgcctgatgtccgtcggtctgattgcccaacagctgcactgggtaaaccgtgaaccgctgcagggcaccctgcgctgcacggtgaaaacccgctatcgccagaccgatatcccctgcaccgttaccgcgctggatgaagaccgtatcgaagtccgcttcgatgagccggtcgcggcggtgaccccgggccagtccgcagtgttctatttaggggaagtgtgcctcggcggcggaattattgaacaacgactgcctctgcagtcctga

SEQ ID NO: 243997 - DNA, 459 bp, Klebsiella pneumoniae
atgtttaaacctcatgtcaccgttgcctgcgtggttcacgcccaggataaatttctcatcgtcgaagaaaccattaacggcaaagcgctgtggaaccagccggccggccatctcgaggccaatgaaacgctgctgcaggccgccgaacgtgaactgtgggaagagaccggcattcgcgccacgccgcagcacttcatccgcatgcatcagtggctggctcccgataacacgccgtttctgcgcttcctgttcgccatcgaacttagcgatctgtgcgccactgaaccacacgacagcgatatcgatcgctgcctgtggctcagtgctgaggaaattcttaacgcgccgaacctgcgctcgccgctggttgccgaaagcattcgctgctacctgcaggacccgcggcagccgctgtcgctgattggcgcatttaactggccgttcacagggggtgaatga

SEQ ID NO: 243998 - DNA, 651 bp, Klebsiella pneumoniae
atgcggcaattgataaagcctgaaaataccatgcagaaaacttcatttagaaaacatcgcgttgagcgattcagcacacaacaagtcaccagacaacgtaaagaacgccagccaaaaactgtgatcttgttcaataaaccctatgatgtgttgccgcaatttaccgatgaagccgggcgcagcacgctaaaagattttattccggtggcgggcgtctacgccgcaggtcggctcgatcgcgacagcgaaggcctgctggtgctgaccaacgacggcgcgctgcaggcgaagctgacccagccgggtaagcgcaccggcaagatctactatgttcaggtggaaggcgaacccacgcccgaggcgctgaccgccttgcgcgacggcgtaacccttaacgacggccccaccctgcctgccggcgtagaacttgtcgaggaacccgtctggctgtggccgcgcaacccgccgattcgtgagcgcaaatcgattcccacccgctggttgaaaatcacgctttacgagggacgcaaccgccaggtgcgccggatgaccgcccacgtcggcttccccaccctgcggctgatccgctacgccatgggcggctataccctcgacggactggccaacggcgactggcgcaaagccgaataa

SEQ ID NO: 243999 - DNA, 1251 bp, Klebsiella pneumoniae
atggaaagcaaagtagtagttccggcggaaggtcaaaaaatcaccctgcaaaacggcaaactgaacgtccctcacaatccgattatcccgttcattgaaggtgacggtatcggcgttgacgttaccccagcgatgctgaaagtggttgatgccgccgttgagaaagcctataagggcgagcgtaaaatttcctggatggaagtttacaccggtgagaaatcaacccacgtctatggccaggacgtctggctgccagctgaaaccctcgatctgattcgtgactaccgcgttgctatcaaaggtcctctgaccaccccagtcggcggcggcattcgttctctgaacgtggcgctgcgccaggagctggatctttacgtctgcctgcgtccggtacgttactaccagggcaccccgagcccggttaaacacccggaactgaccgacatggttatcttccgtgaaaactcagaagatatctatgcgggtatcgagtggaaagccgactctgcggaagcagacaaagtgatcaaattcctgcgcgatgagatgggtgtgaagaaaattcgcttcccggaacattgcggcatcggcatcaagccgtgctctgaagaaggcaccaaacgcctggtgcgcgccgcgattgaatacgcgatcaccaacgatcgtgattccgtcactctggtgcacaaaggcaacatcatgaagttcaccgaaggcgcgttcaaagactggggctaccagctggctcgcgaagagttcggcggcgagctgatcgacggcggtccgtgggtgaaaatcaagaacccgaacaccggcaaagagatcgtggtgaaagacgtgatcgccgatgcgttcctgcagcagatcctgctgcgtccggcggaatacgacgttatcgcctgtatgaacctgaacggcgactatatctctgacgccctggcggcgcaggttggcggtatcggtatcgccccgggcgccaacatcggtgacgagtgcgcgctgttcgaagcgactcacggtactgcgccgaagtatgccggccaggacaaagtgaacccgggctccatcatcctgtccgcagagatgatgctgcgccacatgcagtggttcgaagccgcagacctgatcgtcaaaggcatggaaggcgctatcgccgctaagaccgtgacctatgactttgaacgtctgatggaaggcgctaaactgctgaaatgtagcgagtttggcgacgcaattatcgcgaacatgtaa

SEQ ID NO: 244000 - DNA, 1128 bp, Klebsiella pneumoniae
atggctgccagaccacgtaaaaataatatatctattccaaatttatacccgctcttcagcaggaaggttaataaagtatactggcgttataagcacccgataaccggtaagtttcatagtctaggaacagatgaagcagaggccatggcaatagctattgaagcaaataaaagactggcggaacaacaaacccgccagataatggcaatcactgacagaatttccaccagctcaggaaaatcaatatcaactaacacctggcttgaacgttactggaagattcagcaggaaagattaaagtccggagatattaaagaaaacactatcaaacaaaaagcaaaaccagtatctctgcttaaggaacgagtaggaatgaaattaatatccgctgtcaatgttcgagatgttgcgcaaattcttgatgaatatttagcggagggacaacccagaatggctcaggtcattcgctctgtcctaatagatgtttttaaagaagctcagcatgcgggagaagtacctcctggttataaccctgcactagcaactaaacaacctcgtagaaagatcactcgccagcgcctcactattgaggaatggcaaaagatttttgatatagccgatgaaaatcacaaatacatggggaacgccatgcttttagccatagtaacaggacagcgactaggtgatatatcccgtatgaaattctcggacatctgggacgatcatctacacgttgagcaagagaaaaccggaagcaaaatcgctataccattagctctgcgttgcaacgcaatcaactggagcctacgagatgtaatcagtcgttgccgggattatgcagtaagcccttatttggttcatttctttagaaccacctcacaggctgagcgaggagcacaggtgaaacccagaacactgaccatgaacttcagcaaggcaagggacagtgccaatattgactggggacaaggtacaccggcaactttccatgaacaaagatcgctttccgagcggttatataaagcccagggtataaacacgaaagatttacttggacacaaaactcaacaacaaacggataggtaccatgatgatcgaggtaaggggtggacaaaggtggccttatga

SEQ ID NO: 244001 - DNA, 2097 bp, Klebsiella pneumoniae
atgaacaactacccgtatctcattaaagctaaggcaaaagcaaacgaagcgaaaagcctcttctgctggttctctgctaaatccgattctcgcgccgagcgcaaaatcctggacatcctggaagacgctgaaattaacgttggccgcggcgccagccatcagctgccgatccgcaccaactggctcatcgttgatgacttaccggaagaaggtgtactggatgacacctggtgcgatcgctacgagcttggtggtgaagacgggctgacatggcaaaaaatcgttgtgccggcggctgctgaaccacagccctccagtaaaccagaaaacgatatctctcctgcaaatagtgatgaagaagactattcgaacaatgaagaagcactcttcaacctggcggaaatgtcattccgcacgcagctgcttgcccagtatatggccgacgagcgtcacgtgtatcacattagcattcctcatcgtaaccgcctttcagcgatggaaatggatacggataatcacggtgtgcagaatctgctgctgacggcagaaaatattccggagcttaaaaaatatgatatgcctggcctgtggaaatttaccagtgcatttaagagcgtatttcctgtggggaaacgccatgagctcggcaagcaaattcagttcgccaaattgtggcttgaaacgtcacacattgaccgcgggatccttacaaaggaatgggctgctggaaactatatcatctcaataaacaaaaccgataccggcgccaatgctggtggcggtaacaaaactgaccgcaatccggattatcagcattcgctggatactctggatatagagatcgcccttgcgacgatgcctatggattttgatatctataattttccggcatcagtccaccgccgcgcgaaggaaatagtacagaagaaagaaagtccatttaaagaatggtctgcagcattacggaacacaccaggcatccttgattattcccgtgcagcgatttttgcactgatcagggaagcatccagtggaataactccttttccagatcggttgcgaggctacatcaacgcgaatctgactgaacataagcatgataccccgagcgctgaaatgcttgctaaggcgggacatattccatctgctgcagtcactctggatgcaataaaccaagcaatcgccggagaggataacagcgcaaaactggaaacactctcctccgactttaaagcagttggtaccgaactggtaaaagaggctcaaaagcaacgtccagacgctaatcaggttctggccgccgagcgcggcgaatatgttgaagggattagcgaccctactgatccgaagtggataaccgaagaccttaccaagaccaggaagcctgaagtttcaaaaattggggacggagtattgtccattgaaggtcttgttgacgttacgggcaaggttaaccaaaaagaaaaaacagatgaagttgttcatcaaacggatgctgtagatattgaacccggtcctcataataaggatgaagatcagccaattgattatgttcacgttatggttgatctggaaaccatgggtaaaaaacataacgcccctatcgtcgctattggtgcggttgtttttgacccggcaaccggctctattggagaaagtttctataaagtcgtatgccttgaatcctctgtgaactggggcgccgtaatcgatccatctactgttatctggtggctgaagcagtcctccgaagcacgctctgcgatcgtaaatgatgatgctatcccgttgcaggatgcattactccagttcagagaatttgtttctgataatgtcgctggtgggagcaaaaaggcgcaggtatggggtaacggtgcgtcattcgacaactctattctgcgttcttcttacgattgcattgctgaagattatccgtgggaatactggaacgatcgggacgtacgaacaatggtagagctcggccagccattagcttcgaccccaaaacaacgatcccgtttgaagggtctcgtcacaatgccctcgctgatgctattcatcaggcccgctatgtatcagcgatctggcagcgaataa

SEQ ID NO: 244002 - DNA, 372 bp, Klebsiella pneumoniae
atggccgttacggccggagaagtgattatggaatttggaatgaaacgcgttctggcatctgtccaggccgccgccaccttgaataagctctatgacggctcgcccgtttcactgacggccatcagtaaagagtcaaagctgtctacttcataccttgagcagatcttcaaaaagctgcgggcgggtaacctggtaatttcacagcgtggcccgggtggtggttatagcccccgcggcgatgacatcaccgttacagaagtgatcactgcggtatctaaactgccagcccataaaacttttgagcctatcctgcgagcgcttgacgacgttcgcgtatcacagctgctgcggggcgattcgccagccccataa

SEQ ID NO: 244003 - DNA, 195 bp, Klebsiella pneumoniae
atgaataccctgtttgcccttgtcatcagcgtgtgtgctatcactggtgaatgctctgatgttctgatcggtgtttatccatcagaggccagttgcaacagcaacgccgatgaacaaaaagtacagggccagtgcctcccctaccgaaatgcacaaaacatggctgacgaccaacagcctgcagtgagtttttga

SEQ ID NO: 244004 - DNA, 123 bp, Klebsiella pneumoniae
atgaaggattttgcccgagtacctaccgggaaccaggcgacccgcctgaactggttcgaggtgagactacgccagctgtgttacttgctggcgcagaaaggaaaccctgaggctgaagcatga

SEQ ID NO: 244005 - DNA, 315 bp, Klebsiella pneumoniae; identical to SEQ ID NO: 216289

SEQ ID NO: 244006 - DNA, 390 bp, Klebsiella pneumoniae; identical to SEQ ID NO: 218866

SEQ ID NO: 244007 - DNA, 555 bp, Klebsiella pneumoniae
atgcaaaccacctcttttgaaaatcatactccggtgatgagtatgcaactgaaaacggaaaatcagtatttgccccgtcggcgtgacggcaagaaatgccgagccattttggccgccgttcaggaatgggagtcctcattacctgggcgtgcgcaagaccacgtcgcgcagctggtggccgaacagtgggagaaacaaaacgggcgcggtatcagcgtcaataaacaaaatctgtatcgctacctgaaaaacgagggcggttcagagaagtacaccagttatgtcatccagctttcggcggcgatcgctgatgcaatgccgatagagatcgcgcgcaaacatggcctaaaacatggcttaactgaaactgagctggtggccaatgcgatcaaagaatgcagcgaagcgcaccaggccaagttacttggcgcacctctgcagaaactagagcgtgaaatacgggaagctgcaattgcactttttaacatgctccctgcagatgcggcgggaccactactggcgagcatcagcgccgtagcgccgcagtttttctaa

SEQ ID NO: 244008 - DNA, 984 bp, Klebsiella pneumoniae
atggcccgcatcagaacagttaaacctgaattctggacagatgagaaggtggtggaatgttcaattccagcgcgtctcctgtttatcgggttgttcaacttcgccaacgatatgggatgccttgagcgttcgccaaaacggttgaagatgcaaatcttccctgcggacgtgctcgattgcgaaccactaatacaggaactgattactcatggattactcactgagtattcagtgaatgatgtctgctatttgcagattaaaggtttccttaagcatcaaaaaataaacaggccttcggcctcaaaaatacctcttccgccagaattcactgagtctaaggcaggaaaggaagaaaagagagctcctaatcaaggagggctcagtgaggactcagtgaatcctcatggaggactcactgacggaaaaggaagggaagggaagggaaaaggatcaaaccccactctctatgcgcaggaaagaaattttccccagcaacctcagtatctgcctggagtggatattccgatcgggaaattcgccatgcacgacctttggctgccgtcacaggactggccgcgactggctgctacctggggtatagcgcttcccgaaccggcatacctgccgacagagctggcagagttcaccgcgtactggaaatccgaggggaaagtgttcactcagattcagtgggagcagaaatttgcccgcagcgtgataagtgccagagccaaatctaaaccgcaaccagcaaccggaggtaacggcaatgcaagaattcaatcagttaacaccgcatcccgggcagtccagcaaattcaggaagccagagagctctgggagaagcaacgcggacttgctggcggcggatacggcatggcggctatggacggtcatgggggagatattctcgaaccggtggacccagaagaacggggcggctccctcggatatgtggattgcccagattggatcgatgagtga

SEQ ID NO: 244009 - DNA, 150 bp, Klebsiella pneumoniae; identical to SEQ ID NO: 234423

SEQ ID NO: 244010 - DNA, 1797 bp, Klebsiella pneumoniae; identical to SEQ ID NO: 234422

SEQ ID NO: 244011 - DNA, 1083 bp, Klebsiella pneumoniae; identical to SEQ ID NO: 234421

SEQ ID NO: 244012 - DNA, 234 bp, Klebsiella pneumoniae
atgaaagtggaaatcacaattgatcgccaaaaaaaattgccggatggcgcggtgcctgctctggagaaggagctactgcggcgattggatcaaaactttaataactgcagtcttgtgattcgtcgagccagctctgatgggttaaccgtgcttggtggaatggacggagataaaaaacgtgtagaggaaatcctgcaggacacctgggaaagcgctgatgactggttccgttaa

SEQ ID NO: 244013 - DNA, 258 bp, Klebsiella pneumoniae
gtgagtaaaaaacaagaaatgccgaacaccggctatgcaattatcagatgcgatgatggggtgatcgttgctcgtctgacatcctttcctgtgtgtgagcgcgctctgatgtaccggcgtggcgacactgtttcgtttatgcctttgcagccggatgagatcgtggggactctctctcttttttcacagatgattgaaaaggctaagtctggagttggttaccaagttccccctggttctgttacaatcccgtcatag

SEQ ID NO: 244014 - DNA, 393 bp, Klebsiella pneumoniae
atgacgcaaacaaccgaagtattaaaatcccatcagactggtgctccttcaacgagcgccggttcactctcgtcttcgaaactaacttttcgacagcaggaagttttcgatctgctggtcgcctacatcaatcagcatggctacccacctacgctatctgagctggccgatatgctcggcgttagctcgtctaatgctgtcctgttgcatctgcgtgcgttagagagaaaaaattttataaaactctctcgacgtgtctccagaggaatttccatcgtcgggtgtaaggagcctatgctcgccgtgcagttgctgcaggaaatgatcgctgaagaacccggcgcgcgtgaaagagcgattgagtttttgcgactgttcggtgatcagccatga

SEQ ID NO: 244015 - DNA, 204 bp, Klebsiella pneumoniae
atgaagaaaagttggtttttacacgagcaactttcagaggctgaggctacagagctggtggagcgctaccgtaaaaataactgtgtggttgagaagagcttatccagagactttgcatcgtgggagatccgcgtgttgttgccggaatcgaagaagccgccacggattgacaggacctacatacagaagatgtggagggactga

SEQ ID NO: 244016 - DNA, 1032 bp, Klebsiella pneumoniae
atgcgagctttgcttaacgtggatattgcacgccatcttggaattgtgctgcttaagccgggtagtgaaataatgccgttattcggtgccggccgagttcttgttgaaatgccgccggcaagcatgaaaaagatacccagtggacgtcttcctgatgcccggcagccgttgcgggatgatatggggatcagaccttttttcatgaagaaggcagttatcactgcagctggtgggattagtgccctcgagtcatggttgcgtaggcaggttaaaaactgtcagtggacacattccgattaccatcaccgtgagctcgtcccgtttcgccattcgacgggtgtaataatcgcatgctggcactgtgataatgtgctgaaaaaccaaacggaacaaaccctcgatcaactggtaggtgttaacaacgctgactgggtaatcgacactgcccgcatcgcgcttggtctggacgctcagcgctcattgtcactggcggagctatgctggtgggcggtaggcgccgggattggcgatgaaattacagaagaaatggcgcgccgatccctgcgtattaaagacgatggcattaaatcggtttacagggagagtgagattgttccgtcggtaccggccaccagcattctttctcctcgtatcgaaaaagcaatcaggccaacggcaatagcaacgccggacaaacctctgttacctgtgaacgtcgatcctgttgcaccggcgacactattcgccagacctaagcggattcgatggttatcagctgactttatctcatgggttaaaaaacagccgtgtatttgctgtgggcagcctgcagatgatgcacatcatcttattggttgggggcagggaggtgtaggcaccaaggcccacgatatttttacgatcccattatgccgcaagcaccaccgtgctttgcaccatgatcctgccgcttttgagcgtgaatacggcacccagccggtattgattattaaattgctggaccgggcatactcgctcggcgttctttcctga

SEQ ID NO: 244017 - DNA, 1044 bp, Klebsiella pneumoniae; identical to SEQ ID NO: 236481

SEQ ID NO: 244018 - DNA, 690 bp, Klebsiella pneumoniae; identical to SEQ ID NO: 236482

SEQ ID NO: 244019 - DNA, 930 bp, Klebsiella pneumoniae
atgatgatctcatatcaggaacttgttcgcaccttccctagattcattgagagtatattactcgactttcctattccttacttatacatcgctgatgtattcaatgaagacccagaactggatggaagagtagaaatcatcgatggttctcaacgaattcgtgcaattcattatttttggaacaatgaatttgaactgaaggatcttaaggaacttaagagcttagaaggcttcaagttttcagatcttttagcgagtcgacaaagacgttttctccgggcttcgctaagattcattgagttaaaaggtgatgttgaagaacaacaccgaagagatctttttgaaagaataaattctggtgtgaaaagactcgaggcaatggaagtaagacatggttctgatgctgcagcttccattttctatagggatgtgatctctccatgttcagttaatccattattctcacagttagcaccgttatcagatcgtaaacgttctaatggcgatcatagggagcttgtattacgtttctttgcttatttaaatgacttagataattataaaggtttcgttgctccatttattgatcaatatatgaacacccaagcaaatcaagtaacacagcaaaatgtaagttcatatactgatgaatttgaaaaaatgcttcaatttgtcaacgctcattttcctatggggttcaaaaagacacctacaagtaaaacaacccccagagctaggtatgaagcgattgcagtaggaacagctttagctttaagaagtaacccgcagctcctggaaccagcccagcctatttctgactggttattcgaggcagaatttgaaggaattgtaacagcagatagtgccaacaacactacgcagctcaagaatagaatattctatgttagagataagttattaggggtctga

SEQ ID NO: 244020 - DNA, 507 bp, Klebsiella pneumoniae
atgctgcggcgtttgaatatggcgcagggaaaccagggcaatcacgcccccggtaaggcagaaggccagcgccagccacagggtgcccatttcgccaatgtgcggaatggtaaagctcggaatatagctgccgaagaccccgatgccgatggaatacaccgcccagaaccagccgatggccgagctggcgttgtcgcttttgacgttatggacaatcgccacgataaacgagtagaggaacagcggataggcgaagccgcggatgccgtagaaaagcaggatcagcgcatagttggcgtgaccgaggccgaaaacgaggaacagcacgtggaatacgcaccacagcacgaagccaatcatcatcgttttcagcggggtgataatttccgccaccaccccggaaatccacgccgacagcgcggcggccaggccgtagagggtaaaggcaaaggaggcctccgccggagagaagccgagggctttgatatagtgcgacagaaaggctaa

SEQ ID NO: 244021 - DNA, 576 bp, Klebsiella pneumoniae
atgcaggcgatgctcaggcaatatcagccctcgcaaagcgtggcgttaacctatttctaccagtcgcatcagctgttaatgaagggcgatgtcgattcattaagtaaggccagtagcctgctggatgatgtgattaagcgggcgccggattttatttacgcctatgccgaaaaaacgctggtggatgtattgcgccattcgcaacagcctctggacgataaacagctggccgccctctacagtgaagtcgagcgggtaggggcgatgccgggtataaaagacatggcgatttattatcaaataaaagcggtggattcattggggaagggcaaagtcgacgaagcaaataccgcaattaatagtgcgattgatttagagatgtcatggctaaattatgtgctgttaggcaaagtctatgagatgaaaggtgagaaccgtctggctgccgattcttacatcacggcgtttaatttacgtcctggcgaagataccctgtactggattgaaaatggggttttccagacatcggttaaccgagtagttccatatctcgacaactttctctcttcagaataa

SEQ ID NO: 244022 - DNA, 222 bp, Klebsiella pneumoniae; identical to SEQ ID NO: 239320

SEQ ID NO: 244023 - DNA, 210 bp, Klebsiella pneumoniae
atgacggatggctggccgctgtatgaatcacgcctgaagggaaagctgcacgttatcagcaagcgttacacccagcgcattgagcgacataacctgaatctgagacaacatctggcaaggctgggacggaagtcactgtcgttctcaaaatcggtggagctgtatgacaaggtcatcgggcattatctgaacataaaacactatcagtaa

SEQ ID NO: 244024 - DNA, 741 bp, Klebsiella pneumoniae
atgatcaaaggatatcgctacgtatccgtcataccaacattacgaggaatgccgcttgatagcacagatatgtcttttattttcagccatgaagtcatgatattccgtgttcaacaaaaccttgcaaaatggtcatcaagagttttaaagcgtttatttgatattgccggttcgttagcaatcattattattctatctcccgcattaatctatattagtcacaaagtaaaaaaagacggtggcccagcaatttatgggcatgagcgtattgggaaaggcggtcgttcctttaaatgcctcaaatttcgttccatggtggttaactcaaaagaagttctggctgaactgcttgagaatgaccctgctgcaaaagatgaatggaatgcaacatttaaactaaaaaatgatcctagaataaccaaaattggagggtttcttcgaagaacaagtcttgatgaattaccgcagctatttaatgtactgaaaggtgaaatgagtttagtaggtccgcgcccaatcataaatgctgaacttgagagatataatgaagaagtagattactatcttctgagcaaaccaggaatgacaggtctttggcaagtaagtggacgaagtgatgtggattacgagactcgagtatatttagatgcgtggtatgtgaagaattggtctatgtggaatgatattgcaattttgtttaaaacaattagtgtggtattgaaaaaagatggtgcatattaa

SEQ ID NO: 244025 - DNA, 636 bp, Klebsiella pneumoniae
atgacgctcctcggtagaaatattttggtcagcatggctcttgccctgtctgattttcttagttttatagtttctatatatttagcaaaggggttattatccgtatttctaagtgattacggtaaattaattccagaaagtcaaacggatggatgggttgcattacattggttactaggcttctgttgtgttgcatggtattcaatgagattaagacattatttttatcgtaagacattttggtttgaattgaaagaaattcttcggacattagtcatttttgccattattgaaattgcagttatggcattcgcaacttggtctttctctcgttatctctgggttttaacttgggtatttgttttattgttagttcctacatcccgtatgataacaaaacgcatgttagatgctttaaatctctggagacgtgatgcatggataatcggtagtggtataaatgcacatgaagcgtataaagcaataaatagtgaaagaaacctcgggttaatcattgtcggttttattcacagcgatggaggaacaccacctggtgagaaaattgatggtctgacagtcttaaaaaattgttgcagtagaatcacaccaaagcgaaataagaaatacttggcttag

SEQ ID NO: 244026 - DNA, 147 bp, Klebsiella pneumoniae
atggttctggacgggatcaacaactcagggctgggtaaagtatggtttgccggtagaggaattgccccggaatggccgatgaaacgtgagatgccttcatcggcatataccacccgctggaaggagctgccggttgcccgtttctga

SEQ ID NO: 244027 - DNA, 141 bp, Klebsiella pneumoniae; identical to SEQ ID NO: 102393

SEQ ID NO: 244028 - DNA, 5103 bp, Klebsiella pneumoniae
atgaatgaaaatctaaaaaaacagagcaatccattttcaacaggtggtggtggcgttaatttcgaaactcgtgtgcaagcagcgtttgcattatcgattcttacaggttcaagcgtaccttgtctctctcagagcatgagagcaaaacagataaggtttcagaacaaatatgatggctcaaatacagatgattttgtgatcgttgctgaagacagcgatggtcaggaaggtaagttatttgctcaaattaaacatgaggtaacactgagtgaatccccagattcggtttttgctgaagttatcgccagtgcttggcaggacttcaaaagcgacaatttcaaaatggatcacgatgttattgtgttgattactggtccactccagaaaacagatatccataatacacttccaatattggaatgggcgaaatttgccttatctgcggaagattttatgaagaaggtacaaacaaaagggttctcaagcgaagcaaagttgaagaaaatagaaaatttcagattgcatttaagacacgcaagcaatataagtgaaattgatgatacttttctatggtcatttttgaagtcgtttcatttgatttcttatgacttagattctagtttttctgttgtagctagtttactatgctcacaaatccaaaataactcagatgaggctccccccctagtattatcaaaaatcatcacaacaattcaaaattttaatcagaatgcgggaatactatctgaagaaaatatcccgcatgatttaaaaacattatttaataaagtacacaaaaagaacattaaggatgacatcaggaagcttcaagaacgtggtacttatatttatacaggcatatctaatagaatttgtggcatacatattaaccggaacgaacaacttgctgaaattgaaaaaaaatgtcaggaaagtcgttttgtctttgtcactggtattcgaggtgttggaaaatcaggtattgtaaaagattttatttcaaacaaatataaggacgtcccttttttctacttgagaactgaagatttagacaaaagccatctcaatgatgtatttactgcacttggcatgagttgtagtttagcagaaattgctggtgagttttctttattaaaagaaaagattcttattattgagtcagtggaaaaagtactggaacttacttaccaaaatgcttttattgacttattacatttcatcaaaaatcagaatgggtggacagttattgccacagggcgagattatgctacacagcaactaatttttaattatttacaacccagtggtattgattattgcaacgtagagatcaaagcactggaataccagcaagtaagtgaaatatgtcacaaaataccagaactggaaaaattaattgaaaataaaagactaaccgacttattgaaagtcccattctttattgatgttgcggtaagagcattaaaaaatggtgctcaatttcacaccgaaggaactgagagggacttcagagagattatatggtcatcagttattgcgaaggaaacagatagaagaggcgggatgccagccaaaagaaagcgaacatttattgacatagctaaacaacgcgcaaagaaaatggtcgtgggtattctggatgacgcttttgacccagaaatcattgcaaagcttgaagaagataatttaattcaacgacatgagagactgaatttaatcagtccaagtcatgacgttttagaagactgggctttagatatctttattgataatgaatatgtagaaaatttcttagtacccaataagtttttcgagcagattggtgatgagccttccattaatcgcgcctatagattatggttaagcagaaacataaaagaaaataaggagattaatgattttatctataaagtattaacggatgcttctattgccagctattggaaagatgaaactataactgcgattttacaaagtgatgccgttaacatttttttaaaaatgttcagaacacaacttttatccaataaaaatttactgcttattagagtattgtttatcttaagtatgacatgccaacagccgaaaacactgtataaccaagaactagaaaaagaagaacaagaaatttctaaaacattatatctacagccttatggtatatgctgggatgccttgattaatttcatttttgaaaaccagaatgaacttgtgaacagcacatctattcatattatagaaatgttgaattcatgggtgtcaattttaaatatcagtgataattatcctgatatatccagaaaagtaggtttattggcaatatggttacttgaaccactcaaggattcgtatgctcgcgaagatgaatataaaagagaaaaagttatcagtttattattaaaattatcccctactattgtagatgaatttgatctacttatggataaagaagtctttattcctgatacctcacaccgccgattacattatgttgaatatttaattaatcaatcattaatcggcttgaatgttcctatattatgcaagtatcgaccagattttattgagcgtctagctcgtcacgaatggttacaagataatattgaagatgatgacagcattttttataaacagactacgggtgtagatcagtactttggactaaacagagaatcagatttttttcctgctagtggtgctaaaggtccttttaaatatctattacattttcatcctcgtaaagctttagattttataattgacttgtgcaataaaacggcaaaaaaatattctacttcagaatttgcaacccgctctagtggctttatgtctgatgaaactttagtcaaaaacgttgaacttacactcaatgacggtaccgtcgttacgcaattttcttctccacacttatggaagggttatagaggccattcaacgctaccatatatccttcaatgtgcattaatggctttggagaattggctcattgattcactagatagccttgaaaaaaatgacactattgaatggctttttaattatattttactatctagcaactcagtaatgccaacatctgtattggcatcagttgctactggttttccagacaaaattagtaaagctgcttttcctatcctaagatgccctgagttttacaatttagatatccaacgtcttgtcaatgaacgaggaggaagtgaacaaaactggttctcgaatatgtttcataacgatatcatgaatgacacttatgtagaggaacgacgcattgctgcacttcgtccttggagaaaagaaactctagaaagtttattgactaggttacagcttagcgggaaaaacaaggccgacacactaaaaattgtggatagcctaattgcgttatccttagagagcaacgatgagaacttacgttttctagtacacagagcagatactagaacatggtcatttactgctgataaagagaacagccggattattgcgcaaagcaatccggaattaccggaggatctgcaacaaattcatgatgaacatagtgctacacatactcagaacagtttaattaacaaattattcttatggtcaagaaaatcatttgaagaaaatatcaataatacatactttaattctcatacagaggctcttaccgctgcaaaatatctttttgataaatttcaaaacaatgaagttgataacccggttatggtaattggcacaatcaccaaaaccgcagcagtttgtacacgagatttgtttgagaacctttccgaagatgaaaaaaactggtgtaaaaaaataattattgaatgcatcattatgaatgccgattgtattaacgggttatcacttcatgataagacagatagttatggttctggcgcttgcgcatttgttttacctaaattattccgctacgtaaaaaatgatgaagaactcaatgaattaaaatttacattagcaatagcattaacccatgaaaatattgatatcggtgaatatgctgcaaaaggggtaagagagtttctatggactacccatccgaccttggccttccaatgcatatatggtgctactatgtttgcgaggtttaaaaaagaaaatattaactcacaaagattttatttatattctgatactgaactagctcaagctaaagcgcattggtcttatttgataacctcttttcgtgaagagttctttaacacaaccccaccattaattgaaaatacttcattaaaaacacattcatcttggcacattcaccttccaatattgatgattccattttgcgttgataatcctctgctaattaatttatacaagaaaatagtacattttacgtttgatgaggaatacaagagacataaaagtaatcatgacgatgaaaccatccaacatgacattaggaagcagatcaccaattgcttcgctgagcattttatacacacaagaaaaactggattcgggccatttaagacactgctacttgaaggatgttcaacggcaccacgtattgtgtacatgactaaattactattccacatcgctatggagaaagcagaagacctagagtctttatgggaattctggttaatgttagcgccagaagcacacaaaattgcgctaaaagatgtaaatgaacagtattctggtatacagagtgatctgaaccaattgctgcgcggaatgttgtatgcagacactaggtggcagggacacgagaatgaagcacgcgatatagcatatggttcagtgcatatactagattttgcaaaaatatcaggaaataacagccacgtatttatggcgttatcatcgttgatttatcactttcatcatatatttttcgacgagggtatccatatccttgctgaaaaactcatcatgaatagcaagttaattgataagcaaattaatacagcattttatctagaaatggctataggacgatatttgcaaattgaaaatcggggaatattgagtcgtaaaatgtataattcctgtatgacattattatcgggtattgtcgagacaggttctgcgagagcctattatctccgggaaaatctaataagatcacgcagagtatttacctaa

SEQ ID NO: 244029 - DNA, 663 bp, Klebsiella pneumoniae
atgttacttcctgtaattatggctggtggtaccggcagtcgtctctggccgatgtctcgcgagctttacccgaaacagttcctccgcctgttcgggcagaactccatgctgcaggaaaccatcacccgactctcgggccttgaaatccatgaaccgatggtcatctgtaacgaagagcaccgcttcctggtggccgaacagctgcgccagctcaacaagctgtcgaacaacattattcttgagccggtcgggcgcaacaccgccccggccatcgccctggcggcccttcaggccacccgtcacggcgatgacccgctgatgctggtcctcgccgccgaccatatcatcaataaccagccggtcttccacgacgccatccgcgtcgccgagcagtatgccgatgaaggccatctggtcaccttcggtatcgtgccgaacgccccggaaaccggctacggctacatccagcgcggcgtggccctcaccgacagcgcccacaccccgtaccaggtggcccgtttcgtggagaagccggaccgcgagcgcgccgaggcctacctcgcctccggggagtactactggaacagcggcatgtttatgttccgcgccaaaaaatacctttccgagctggccaaattccgcccggatatcctcgaagcctga

SEQ ID NO: 244030 - DNA, 1407 bp, Klebsiella pneumoniae
atgtcaaagcaacagattggagttgtcggtatggctgtgatggggcgcaaccttgcgctgaacatcgaaagccgtggttataccgtctccgttttcaaccgctcccgtgaaaagaccgaagaagtgattgccgaaaacccaggcaagaagcttgttccttactacacagtacaagagtttgttgaatccctcgaaacaccacgtcgtatcctgttgatggtgaaggcgggggctggcaccgacagcgccatcgattccctgaagccttacctcgataaaggcgacatcatcattgatggcggcaacaccttcttccaggacaccatccgtcgtaaccgtgaactgtctgccgaaggttttaactttatcggtactggggtttctggcggcgaagagggcgctctgaaagggccttccatcatgccaggtggccagaaagaagcctatgaactggtagctccgattctgaagcagatcgcggcggtggctgaagacggcgagccgtgtgtgacctatatcggtgctgacggtgcgggccattatgtgaagatggtgcataacggcattgagtatggtgacatgcagctgattgcggaagcctatgcgctgctgaaaggcggtctggcgctctctaacgaagagctcgcgcaaactttcaccgaatggaacgaaggcgagttaagcagctacctgatcgacattaccaaagatatcttcaccaagaaggatgaagagggtaaatacctcgtcgatgtcatccttgatgaagccgcaaacaaaggtaccggtaagtggaccagccagagctcactggatctcggcgagcctctgtctctgatcaccgagtccgtatttgctcgttatatctcttcgctaaaagaccagcgtgtagccgcgtcgaaagtgctgagtggtccgcaggctcagccggccggtgataaagctgaatttatcgaaaaagtgcgtcgcgcgttgtacctcggtaaaatcgtttcctatgcccagggcttctcccagctgcgtgctgcttctgatgaatacaactgggatctgaactacggtgagatcgctaagattttccgcgctggctgcatcattcgtgcgcagttcctgcaaaagatcaccgatgcttatgcgcaaaacgctggcattgctaacctcctgctggcgccatacttcaagcagatcgctgatgactatcagcaggcgctgcgtgatgtggtggcctatgccgtgcagaatggtatcccggtaccgacgttttccgccgcaattgcctactacgacagctaccgttctgcagttctgccggctaacctgatccaggctcagcgtgattactttggtgcgcatacctataaacgtaccgataaagaaggtgtattccataccgaatggttggattaa

SEQ ID NO: 244031 - DNA, 3111 bp, Klebsiella pneumoniae
ttgatttctaggataaactattcgaatattttttttctattaaatgcaaaaaattctcaacatatagtcacagttgacggtttttatagctcaaatgatggcggccaaggggaatggattcttactggtaatatagataaagaaaaagctggtatgcatttcccaaaaaatgcgacagcatataatgcctttggtgtagaatatcgattacgtctgaaagaccgtactattgtcaatccgaaaataaatggcgccaaagagatctctggcatagaaattagtgctatgtcctctgatggattcgtttgtctaggagaggttattaacggcatttatagtacattaccagtattatatcaaccaaacaataatattgaatcatctacaacctttaaggcattaaaaatcgttttatctgatgggctttaccgtattggaaaagagtcaataaaactaagaagtaacatacagtatgacttcggtaaatcaacgatatatgtaaaaggaagagatgctggtgtctatataaacggattggagcattctgttgaggatattgatgatatctacaaaaaatgcggggaaagactgaactgggaatctgttagtttagggttcactcttgtcagaggcgggcattttattggggaccatgtgccaggtacttatgatgaagaatgttcttctggaattggaattttggctttaaatccatggtattgttcttttgaagatattaggatcgagaattttagagttaatctggttggaatgcaagtacgcacagaaaatgatggcgtttttccaaatgaaataataccttatatttcaaatatacttcctgaaaaaattggtaatttttatggttgtgtgtttaaaaacctatatgtaagtactgcacgatattgttgtgctagactccatattgattggtgccaatggataggcggaactatttctaataatggcctctggggaagctctaaatcaggccagcaatgcgatttctatttaattgaaactggccatggctttcattgttctgcagcttatctcagtattcctgcatacaacccactggagagagctccaaataaatctgttattgctacagcagcacgtggttcggtgtatactgcttgctacatggagaatacgccatcatttattacggttcttaataaatggtggacaaatggaaacgaaaagggatttggtctaaatatagattgcatcgcttcacaatatcggccagagaggaattataaatttctaaccttcgagaagaatgcttttgggtactacggtaaaaataactcatggacccccccaacgggttatgcttcttatccctcaacaaatggtattgatttttttcgttttggtagcccttgtcatgatattggtgcctttaaacatggtgggtttgattttaaatatggtacctatggcatttcatacgaacttaatgatcaattttcaaaccctcctgatgttgatacgattagaggtaatatcgtatcaaaagagatgttttccccttatggcttgattgtcagtaatggtattctcaattttcctattcaattcccagtattacacagtaacatttgtatatggtttaaagacttatctaataactttgacctcaataatatatcattgtggcgacatggtaatcttgaacaaaaaaaaactaaaggcaatgctgaattgttcgtttcgattggtgaatgtgttatagattatggtaatggttataagatggccattcttcaaaatctaaaatggaataataatgatgaatttaatttagaaaatctttactcatcacttaaaatcattgttccagaagagactccaattatattaaaggcaatacaagcatactccggtggtgttccaatatttcctatgaatttgaattatattccagagtctgctgataattgtatctggggtaatattcatcctagctccggtaaaaaacttgggttaatgcaaaatattggtggtggaattttttttattggcgatataattaatccgtggattggcgttacaagccggcatgacttttattcgcctaacatatcttggcagaaggatgctgtttctacaaacatgccacgaatagttgagagtggtagttgtataggaatgtttttttgtaaggtgtttactgttgttgttaacaatgtaaatgaagaactgaacctaacagaaattactgtttctgctaaagatttaccctatatttatgttggtgttccattgtgtatttcatcaacatcaacatcaacatcaacatcaacatgtgaagtgtcaattttatcacgcattatcgaggacggaatattaacaaatcggtacattttgactggtattgtaggggaaatcggtacattattagttgtcaatcaaagaatgctggcggctcgaaaatatgtaggaggttatgcattcggtagtattgagatcaatgaaggacaaatagatatagtgaaatcaaaagatagaggctcaaagcaggggctaaacttctatatgactgacaatcggctgacaccgtcagcttctatgacggccaccgaggatagtattctgtttagtgctggcagtttttggttcaacaataatatttgttttagcccagataagcattgtgacctcgcctcagcagattctccgatagagaatatatttgtaaggaatgcaatttcaactgttgctgataaaaataatatacctattattcgaaatgtccccgacaatatcctcgatatttgggggacaatatccgctaaagcttataaatatgattgggctattcgtcaaaaaggagatgatatggcccggtggcatgtgggatggattgcgcaagatatagttgatgcatttgcaaaagctggggaaaatgctagtgaatgggcgctggttgtctataatgaatcaagttcaattaatactcctttattaacttctcctgagtacacactccagaataaattgaaagaaacatcagaatggcgagtaatattagatgaatgtaatgctatggagttgttatatcaacgtcgtcaattgaaaagactttctgaattgctttga

SEQ ID NO: 244032 - DNA, 132 bp, Klebsiella pneumoniae
atgttgtttggtcattggcttgatagaaaaaacattccagatccctataaaaaaagcgaggaagcatttgaactcgtttataaattaattgaacaggcgggtagcctgtgggcttcgaaattagcttcataa

SEQ ID NO: 244033 - DNA, 129 bp, Klebsiella pneumoniae
atgagcagaaacgtgatgttgaatctttcgtggtggaatctgccgcgcctgttgctggaaaaccagacggcgtacctgttgtggatattcctgtcgatgctgatgtacctgccaatgatgatgcgatga

SEQ ID NO: 244034 - DNA, 447 bp, Klebsiella pneumoniae
atgaataaaccgaaatcccaacgtctcgacctgaccactatgacaggcgagcagatcgctgatctcatcctgaacggcaaatacaccaaatcagccttgtgggccttcatcagtagaaacggcggcgcagacgctgtacatgctcgattcccgcagatcgccgtctgtcttaatattttgaagcaggaacgtaaaaaggcgaaacatgcacgggcagtgaagtcggtgctgaagcctctgagcaatcaacgtgccgcaggaatggaattgaccgatatacttcgtccaatcttggaaggccatcgacagctttatctggataagctaggtctttctctgacaccagagcaggtcattatgctgctcatcgctgtcaacggtgctgaagaactggaatcctacggtttcccactgattggcgagttcccgacagcaaccgcagcttaa

SEQ ID NO: 244035 - DNA, 204 bp, Klebsiella pneumoniae; identical to SEQ ID NO: 151629

SEQ ID NO: 244036 - DNA, 270 bp, Klebsiella pneumoniae
atgagcaaacagaaccgggacagtaaggattttgtaaaacttgaatacagcattctcgaccttaccgagtacaacggcctgaccattaatggcaacatgaaaattttgctatctctggtttacagctatgacaaaacaggcagaacttattacgagtctgttggcatgattggtaaacgttgcggctgcaagcccgaagccgttcgtaatttcaggaacaagcttcgtgaagcgggaatgatcacttttgaggaagagcaggggatgtaa

SEQ ID NO: 244037 - DNA, 165 bp, Klebsiella pneumoniae
atggtgctgaaagcggatgtgatagcaaacccgctcgccaatcccatcggccatcaggggtacatcgagccggagaaggaggttatgcagcaggtggccaccttcctgaccgggaaagtgagcgccttctctttcacgccagcggatgagccggtgctgttgtaa

SEQ ID NO: 244038 - DNA, 285 bp, Klebsiella pneumoniae
atgaccgacaccccctttatccctgattacctgaaaccggcgctggagcgactggccgcagccagagcggcccatcttgaacaggcccgccggatggaggcacccctgacggccatcacccgcgcggaggagcagaaagcggagctggggcaggacaacggcagcggtacccgcacctggcgcgccgttttccgtgccgggggcgtcatgctgaccgatgagctgaaaagcggccatatcgaacgcgtggcccgccgtgagctggctcataatgtgacaacctga

SEQ ID NO: 244039 - DNA, 159 bp, Klebsiella pneumoniae
atgccaccggacaaacaatataagctcgccgatggcaacatcgttgagttaaaactcgcgatttatgagtacccatttaaaccgcagggtggtcttaactctttgaggttggtgctcttcttcaacagcgcactacaaccatcatatgttatgaaatga

SEQ ID NO: 244040 - DNA, 1320 bp, Klebsiella pneumoniae
atggcgaaatataaggcgtatccggagtataaggattctggggttgaatggttgggagaaatcccaatacattgggaaatgttaaggcataaatatgtggcattttttacaaagggtaaaaatccaacaaatttacttgaacaaccgttaaaaaatacacttccttatctttcaatggaatgtttgaggaacaacactactgataagtatgcattaatatcgaatgatgtccgtattgccttggaaggacaacctttaattatatgggatggttcaaatgcaggggaatttgtcaaaggaaaatcagggattttgtcctcgactatggctgccgcgacattaacgtatcctttgcatccacaatattactggtatgtatgtatttctatagagccagaaatgcgtaagaatgctgttggtatgggtatccctcacgtaaatggtgatgaattaaaaagtattagtttcagcatcccatcgttctgtgaacaaaagcaaatagcagtttttctcgatcacgaaactgcaaaaattgataatcttatcgagaagcaacagcaactgattgaactgctgaaagagaaacgccaggcagtggttagccatgccgttaccaaagggctaaatcctgatgtgccgatgaaagactccggcgtagagtggcttggaaatgtaccggaacattgggaagtactgtctttctctcgctttactcgactatcacaagggctacagattcctcaatctgaccgtcttgaacagcagattaatggggctgtcgaatacataacaataaggtcgattaatgcaggggcagaaaatacacaaaaagaatatattcaatctccatctcaaagagtgatatgtaatcgagatgatgttttgttagcaagaactggagcaacaggtgaagtagtaaccggtgtcgaaggagtttttcataacaactttttcaaagttagttatgaccatagtattgataaagattttcttgttcacctgcttcaagttagagaacttaaacaacaccttttgatgctggcaggcacaacaacgatcccagatctcaaccatggagcctttctatcgaccaaagtgcccctgccttctaaatcagagcaaaaaaaaattgtcgccgtgttaagggaaaaaatagcacgctgcgatagcgttctcagaaagaattatgacgcgatccgacttttacgtgaacgccgtacagccctgatctccgccgccgtcaccggaaaaatcgacgtccgcgactgggttgcccccgacacgcaggatgttgaggcatcacaggaggccatcgcatga

SEQ ID NO: 244041 - DNA, 870 bp, Klebsiella pneumoniae
atgccctccagcacgaccctgcaacacgcgatcgagaacatcactatctggcgcaaaggcgaacagcgtgcgccgcataagccactgttgctgctgtacgtcctctcacagtaccagcgcggccatgcgcggatgttcgactacgcctcggagatacgcgatgagctgcatagcctgctggaacgctttggcccgcagcgccgccagtaccggccggatatgcccttctggcgcctgaaaggcgacggcttctgggagctgcacaacagcgaccagtgttcaacccagggcagccgacagccgcccggcaaagagctggagctctgtcacgtcgccggcggcttcgatgagccgcattttgcgttactcaacaaaaataagaggctgatcaataccctcgcccatcagatcctcgaggcgcatttcccggagagtattcaggaagaactggctgaagagatgggatttgatctgcagcagatccgtaaagagcgcgacccgcattttcgccagcaggtgctgcgcgcctataactatgagtgcgcgatctgcggcttcaatatgcgccatgataatacctccgtcgccctggaagcggcccatatcaaatggaagcagcacggcggcccatgtgaaatccctaacggcctggcgctctgcgcgattcaccataaggcctttgataaaggatccattggtctggatgaggatatgcgcatccaggtttcgccggcggtgaacggcgggggcatcgttggcaggctattctgggattttgatggtaagccgattaccttaccgcagggaaaagaatgctatccgcaggaagggtttgtggcgtggcaccggcgggaggtgttcagggggtga

SEQ ID NO: 244042 - DNA, 690 bp, Klebsiella pneumoniae
atgagcgctttttgggaagggattatttcctcaagcgtttctttagccgttgtaggatgcgtttgtaaaatatttttaactcattttgataaaagaggaattgaatcatataaaagcaaattgaagtttgagagcgaaatgaggcagaatgaggaagaacgttattataatttgaggaaacatagggaactggaaataggtcgatggagattgactctgcttagtgctgccaatggtgtcttagggaggcttttatacattaagaaaaatcatccgctgatgatcgactcttattatgaacatagtactaggtattatatcgcccagtatctttgttgggctgagctatttagaaaaaacagagactcatctgtgttttccccgacaagtgatgaaactctgataacagagttgattaaaaatatatcaatggaattaagatataacactcaaggctttcccatcattagatcacttgagcagaaatatataggtgattcattaagtaatggacttaattgcatttcttataaagaatttttagatgggaaggttttggaaaatgatgtttcattaaatgaattcacacaagcgcttattcattatcgaaattcggaatatattgatagattgattgataaatttgaagatttgaaaagaaaattcgaggaggttttaacaaaagaataa

SEQ ID NO: 244043 - DNA, 2877 bp, Klebsiella pneumoniae
atgataacaaaagatgtagttattagtgcatataactgtcttaagtcatatgcatactatgaaaacttaaatttctttttgaaagctgaagttgccagattcgaaaatactaactttgatagaaaaataaataagattgtcagtttttttaataacaaaaatgagaatgactttgaacaatggttgagtaaaatagatgtggatattttacctaaaaaaattgagagtcatttggatattaagcaaaaaagtggtgcgctttttttaagtaataacaaaacgactaacgagtattcagtaagtgcagtcaattatttaattgtagcccctgtagaaatctatctaattgaaacattatggtctatgtttgtggggtccatgattgatgatatgttttcaaattctgtatttgggaacagaatatcaggaactattaagaaatattcaaaagacactgaatcttccgataaagtaactgctaaaaatctctttgaaagatatatagaaaattacaatcgatggagggatggtggtatagataaagcgatagaaattattgaaaaggataaaaatgatgtagctatcctttcattggatcttaagagtttttattataatatcgatattaattttgatgatattgagtctctcatcaaggataaacaacttaatgaaacgaaagagttttcattgtttttgaataaaaaattaagatctatgcatgaaaagtatagagaaaaaatatccccttatattagcgagactcatccacattcagttgataaagggatcccgattggatttacttcttctgctgttttagctaactggtatttgatgcgttttgataatgatataaaatcacaaataaatccatcatactatgggaggtatgtggatgatattctctttgtgttttcctctcctaacattgatattggtagcaaaggtgatgaggtcataaattttatagatgatactcttggtaatttcatagagcccaccactgaggaaagcaacgatttttcgttaacagaagaatatcatgctttaccagttcaaaaagataagcttatttttcattattttaataaagaacatagtttagcagggcttcaactttttaaacaagaaattgaaaacagaagtagtgcttttaggtttttacccaatgaacatatatcaaacgatcttgataaatttgcatatgatattctatttgacggctctgtaaataaatttagaagtatagttgggttggccgagaatgaaacggaattgtcaaagtatatatcatctcatatattggcgcacaggctttgtaatcttccatcaagtgaaaatacattaaaacaaattacgatgttttttaagggggaaaactgccttagatttagtagactctgggagaaagtgctttcatatactttaatcacgagaaaatatggtttttcggtttcattctataagcaaataaatgaaaccatcaacaagatgaaatggaaggactctaagaaccccataacgttaaaactcttaaatggaatgcatgagtatattgatatatctttatgtttaaacgttgctcttcttgatttgaatgtccttttaggtgacgagatctcggataataatgcgcttgagagtattaggttgttattaatacaaaaaccaagaatgtctgatttagtgcggagattcagaaatagtaacatgatccgacataacctagtatcctggccattggctaattacactaactatgacggggatctaactgaggaaggattatacaaaaaaataaatggcattcagctagaggataaaaaaatcaataagtctcctcgttatatccatgctgatgagagacaattgtttgatttgattgatgctctccacagaaaaaaacttaataaattcatcactacaaataaatatcactcaaagcattgtagtgtacggaaaataaaggataataaagctctggaaataagagtggatgtaaatcataagcatagtgaacaggaaattaaagttgctctggcaaacatgaaagttgaagagcattcaatagagagtgcttgtagaagagatcagtcgccaaatttaagctatgagaggcaaagaaatctttatcgaattttaaactcggctacggaagaaaatgtccatgttttacttcttccagaattatcaatccctgtttcatggttaccctttatggcagcgcattctaggcgtaaacagatagctttcatttttggcctagaacattggataataaatgattgtgcaaataacatactggtcgaaatgttaccatacaccaccagttacaaacacaaatcaagtcttctgtcatttagagttaagaaccactatgctcccggtgagattgaaatgttaagctctctaaggttaaaagcaggagagccgaaggttaataaacaacgctatcacttggttaaatggaaaggaatatctttttcaacctataactgttttgaacttgctaatattgagcacagggcgctcttccgatctcaattagatgtattatttgcatgtgtttggaataaagatataaattattatcaacatatcactgagtcagcagctagggatctgcattgctatgttgcccagtcaaatacctctcaatatggcggatcgtgcgtattgcaaccaactagcagtaccatctcaaataaaatatatgttaaaggtggtgaaaatcattgtatattaactactaagttaaatatttccgcattaagggaagctcaatttagatcattcaggttgatatctgatgttattaagcacaaccctccgggttttgattttaatgctctattagaaaggggcgagaaatga

SEQ ID NO: 244044 - DNA, 402 bp, Klebsiella pneumoniae
atgcggatgattgctctggcggatatcgtcaagctttccgatgaggacctcgcgtggtttgccgaacccggcgaagaacacgaggtaatacgccgttggcttgctctgggaccaaagcttatcgtggtcacccgcggggctgacggcgccgatgcctggaccgctaatttccatcttcatgttccagggattcgcgtaacggttgccgataccgtcggcgccggggatacggtcaatgccggtattctcgccagcctttcgcaggccggactccttgagaagcctaaattagtgacactgtcacgagaacaggtgcgccgcgcggtcgatctcggtatgcgcgccgccgcggtgacggtctccaggccgggggctaacccgccgtgggaccatgaactctga

SEQ ID NO: 244045 - DNA, 1947 bp, Klebsiella pneumoniae
atggacgctgtacagaaagccaaatccggccacccgggggccccgatgggtatggctgacattgccgaagtgctgtggcgtgatttcctgaaccataacccgaacaatccggcctgggctgaccgtgaccgttttgtgttgtcaaatggccatggttcgatgctgatttacagcctgctgcacctcactggctacgatctgccgattgaagagctgaaaaacttccgccagctgcactccaaaaccccgggtcacccggaagtcggctacaccgcaggcgtggaaaccaccaccggtccgctgggccagggtatcgctaacgcggtcgggatggctatcgccgagaaaaccctggcggcgcagttcaaccgtccgggacacgatatcgtcgaccactacacctacgccttcatgggcgacggctgcatgatggaaggcatttctcacgaagtgtgctccctggccggtaccctgaaactgggtaaactggtggcgttctatgatgacaacggcatctccatcgacggccacgttgaaggctggttcaccgacgacaccgccaaacgctttgaagcctacggctggcacgtggtgcgcggcgtggacggtcacgacgctgacgccatcaaacgcgcggtagaagaagcacgggcggtcaccgacaaaccgtccctgctgatgtgcaaaaccatcatcggtttcggttcgccgaacaaagccggtacccacgactcccacggcgcgccgctgggcgacgccgaaatcgccctgacccgcgaagcgctgggctggaaacacgcgccgtttgacatcccgtctgacatctatgcccagtgggatgccaaagaagccggccaggcgaaagaagccgcatggaacgagaagtttgcggcttacgccaaagccttcccgcaggaagcagccgaattcacccgccgtatgaaaggcgagatgccgtctgacttcgacgcgaaagctaacgagttcatcgcgaagctgcaggccaacccggcgaaaatcgccagccgtaaagcctcgcagaacgccatcgaagccttcggcccgctgctgccggaattcctcggcggctccgcagatctcgcgccgtccaacctgaccctgtggtctggctctaagccgatcaacgaagacgctgccgggaactacatccactacggcgtgcgcgagttcggtatgaccgctatcgccaacggtatcgcgctgcacggcggcttcctgccgtacacctccaccttcctgatgttcgtggaatacgcgcgtaacgcggtacgtatggccgcgctgatgaaacagcgtcaggtgatggtctacacccacgactccatcggtctgggcgaagacggcccgactcaccagccggtagagcaggtggcttccctgcgcgtgaccccgaacatgtccacctggcgtccgtgtgaccaggtggaatccgcgattgcgtggaaatatggcgtggagcgtcaggacggcccgaccgcgctgatcctctcccgtcagaacctggcgcagcaggagcgtaccgcagagcagctggcgaacgtggcccgcggcggttatgtgctgaaagattgcgcaggccagccggagctgatcttcatcgccaccggttcagaagtggagctggcggttgccgcatgggacaaactgactgccgaaggcgtgaaggcgcgcgtggtttccatgccgtccaccgacgcgttcgacaagcaggatgcggcttatcgcgaatccgtactgccgaaagccgtgagcgcgcgcgttgccgtggaagcgggtatcgctgactactggttcaaatacgttggcctgaacggcgctatcgttggcatgaccaccttcggtgagtctgcgccggctgagcagctgttcgaggagttcggcttcaccgttgataacgtggtcgctaaagcgaaagcgctgctgtaa

SEQ ID NO: 244046 - DNA, 558 bp, Klebsiella pneumoniae; identical to SEQ ID NO: 25161

SEQ ID NO: 244047 - DNA, 369 bp, Klebsiella pneumoniae
atgactgatatcaccgaactggcgcagcgtgtgcgccattgggctgacatgtccgcactgacgagcgagcgcgtgtcttgcttgagcgtagagcaactggaagaaatcgctaatacgctggaatcccgcaccgtcaccattgagccatttcgctcgtttgttaccgatgctgatttagtggcgttacaccgattcgcagaatgttgcgatgaccctgaatctggtggtcacgatttggaaaaagagcaagtgctgcgacttgaggcaattggtgcattgcggcgatctggttgtgtccactggattactggttttggtgacgtcctgatctccattacagctgacttaagggtggaggatgatctatga

SEQ ID NO: 244048 - DNA, 129 bp, Klebsiella pneumoniae; identical to SEQ ID NO: 190352

SEQ ID NO: 244049 - DNA, 126 bp, Klebsiella pneumoniae; identical to SEQ ID NO: 190353

SEQ ID NO: 244050 - DNA, 195 bp, Klebsiella pneumoniae; identical to SEQ ID NO: 196435

SEQ ID NO: 244051 - DNA, 216 bp, Klebsiella pneumoniae; identical to SEQ ID NO: 190355

SEQ ID NO: 244052 - DNA, 273 bp, Klebsiella pneumoniae
gtgaaaacagtcccgaatattaatcaacagctggccaatgtgatgacagccattgccgcactcaacgccatgaatacaccggttgcctgcatcatgatttattcaggaaagccggttattcgcgtctcccgtgacagtccgtgcgtcagtcaattccgggagcaggagtccggttatatgatgaccggcattgaccatcaggggcgatttcggcagggagaaattgagttgtatggttgcagggttatctggtccgaatcgttacttcactga

SEQ ID NO: 244053 - DNA, 480 bp, Klebsiella pneumoniae
atggataaaactaccgctgttattgattcaccagaggcgctgggcgctgccctgtgccgccatgtacccgatatggccaacggtttcaccatcaccactcgcgacagccagctgcagctgaccgtaaccgccgaagataccaaacccttcatggctgcgatggaacgcctgctgaagggcaaaattcgtcagattcagcgtgggcatcaggggcgcgttctggatgaaaagtgggaacagattgaagcgaacaaccggaagtttgccgagcaggtcagacgagcagacaggattgaagcgaacaacctgcaggttgtacagcagatcaaaagtggtgacggaattttgaacgcgcaggtaatccaacagatcatccgggttagttttccctcgctgacatccgaagaacgggaacgtatcgcccagattattcgggcggcggcgttacgcaaaaatactgagtccacgaccagtatctga

SEQ ID NO: 244054 - DNA, 153 bp, Klebsiella pneumoniae
atgccgacagctatgaaagaatcttcgcttactaaacgtcagtcagctctgcttgataactatgagaatactgatgaggcaggtaaaaaaattattgaggctactgccgctgaagtcgcgcaacaaatcggcctattaaaaaagtcgagttag

SEQ ID NO: 244055 - DNA, 339 bp, Klebsiella pneumoniae
atgaaccaaaaggtagatttacaggaagcctttgatgctttaacaaacagagtttgtgctcttgaagctgagctatttgcagtcagagccagagacgaggtgttgcatggctttctgacttgtcaactgatagcccatccatcaccagagaaaatagagcggctgtgggagcactttgtaagtgatgggcttgaaaaacagattcttgcacgttacgaaaaaagtgatgctttcaagcgtgaggatatagtcaaggcatttaaaaaatctctaaagggagccgttgagcagtggagcgaacaagccaaggccgccagagagcttaaagaagaccagtag

SEQ ID NO: 244056 - DNA, 381 bp, Klebsiella pneumoniae
atgtcactgcttcataaagttcgtcaccagcggctgcgcaactggatcatactcgccgttgcgctactggctgctatcgccttcatttcgccggaacagctcggcgtcacgctgtacaagctgtctctggtttctatcgccgccattctcggctaccaccttgatcgggctctgttcccttatgccagccctggtgggtacctggctaacgactggaaaaagcaaaacacacggcaaattagcacgttcagcggtgttgagtattacaacggcccggaacatcccgtcgcaaaaggttatgagctgattttcgctgcagtgctgattcgacgggcgctgattgtcgcggcgatctgcctcggcgtgacgatggggctctga

SEQ ID NO: 244057 - DNA, 204 bp, Klebsiella pneumoniae
atgccagaagtaaaactgctgcagccgcacacccacgcgggaaaacgtcttgcagccggtgaaaccctcaccgtcagcgataccgaggccacctggctccgggagcataacgtcatcgaggttggactgccggtcgtgagcgacgtgcagagcagccgtggcaaaaacaaacaacaggagccggaagacaatggcgcagcttga

SEQ ID NO: 244058 - DNA, 483 bp, Klebsiella pneumoniae; identical to SEQ ID NO: 207166

SEQ ID NO: 244059 - DNA, 816 bp, Klebsiella pneumoniae
atgagctggagtgatgttgaatattccgtggccgatggccagccactgacgctgtatcagtttcagataggtgacagcctgttctggcgctataccaacgcagataaaaatatcgactttgccggtcaccagtgggatacgcaggcgatcagcaacagtggcctcagttccgggagcagcgatggtatggatattaccgttccggcatctaacccggtggcacttctgtttcgagggaccccgccttctcgcgctgtcagagttcgggtaatgcgctggcacgcgaacgatacatccggcgagttccgggtcgtctgggtcggggagatcaccagcgtcaaacgggagcagatcgaactttgcaaactgatcaccatcagtcttgccagcacgttttcccgaatgggtctcaggctcacctttgggcgtcagtgcccgtatgcgttgtacgaccataactgccgagttgatccgctccagttcgccgtcagcggggttgtggtcaccgcactcgatggttcctctattaccgcaaatctgcccgccgggttggccagcgactggttctccggcggttacattgagttcgaacgcaacggctataacgagctgcgcggtctgagggcacagaacggcaacacactacatctttttggcgggacaaccggcctgcaggtcgggcagtccgtcacgctgtatccgggctgcgaccgcacgattgcgacctgtaacaataagttttccaaccatctcaactatggcggtcagccccatattccggggaagtcaccatataccattatcaaacttttttaa

SEQ ID NO: 244060 - DNA, 234 bp, Klebsiella pneumoniae
atgtggtgggctgtcgctaaatgggttgccacgattattgcatcgtatgtcattaaccgggctttgaccccgaaacccaagaacaatactcctgaggccgctacagaaaacgactggaatatgcccatgcctgacgaaggcaccccccagtgcgtcttttttggtgattgctggacggctgactggttcgttttgggctacggcaattatcgctatcaggccatcaaaaaataa

SEQ ID NO: 244061 - DNA, 756 bp, Klebsiella pneumoniae
atgggacttcgacaaattattaagggtattgacggctcgcagcagaatatcggctattccgccgtcgttcctgatggcctcttgtttatcaacttctttggcggtgatgttggtcaggggcgaaatctggctgaaggtggtttgcctgccagcgtagttggggagccagtagtcggcagcatgtctcagggcgtgctgtgtgcctcgcatggatcatatattaggaccggcgttccgcagtcagaaaaaatgaccgtcatgggcgtattttgtcccacatcagacagtcgggcttatgcgatttcgaacgccagcgccacgcgccctatcgggttttcggtctattcggaaccctcagctactgccggagtgcaaaacctgcgtatccagatgggcggcaaacaaagcagtgatggtgcaaatgctgtcgcatccgctgccgttgccggcgcaattaataataatgtaccgatggcttttgccggaacagtggactactcaacccttactgaaacaaaggtagagatcaggcacctgaaggcggggacaaaaaataatgtcacatcgtcatttactgttgctggctcgggattatcctcgctacttattggttcagatatggacgcggtgacgtatgctaatacacgtgttctggcaatagcagtatggaatcgcatcttaactgatgatgaaatcactgctcaatacgcacaaatcaagagctattacctgggtgttcatgggttgaatatttaa

SEQ ID NO: 244062 - DNA, 1053 bp, Klebsiella pneumoniae
atgaacacatctggcgcatctgtcgcacatctcactagcaacaatagcagcaaatcaatatccgaattagttgcggccctcgagcaaacgaatttatattcgtacatttctcaaattgcgacagtgtatggttttcctcctgtcaaaggaggtatggatgcgagcttggctgctattgaggcatcaatccagaatccaactgcggcattccccaatgcaaccgttagttcgcttgaaaaaatgattgacagagtaataatttcaggaagtaattattactctattgatgaaacaattgacccaaatttccagccatttgtccacaaaatttttaaatctagtgttcctgagtctcggtatgaaagtttatatcctaaaagactgtatgacggtaactctcttggaaaaaatatcaaaggattttatttaacaaaattactggatacaggggatggtttagcttttatatattcttatatttatagtgtgaaaattaaaggaagtcgcggcttaggtctgtcatacacgcctcaacagcattttgttacagcatttgtaccaaataataaaaacagagtagaatatcgtattcctaagcttttaggtaagagagaggctgctaaagcacttcttgcattacgtaatgagttttatgatctttttgttaagaataattacaatgttgtctttcaatcattaaacttttataatgcgattactaacattattgctgacaaacaatttggcagggctgtccaaataatttatgtagggtcgaacaccggttctgatgcaaatgttattggccgtaaagatccaacttatgaggctagagatgttgaaattaaaaacacaaagagaaatgatatctattcgccacgttcagtagccgtcaggttttatagaaataatggggattttaccgagttgggtttagatcctaataaaaaatcatggttagatgatagtttttgtggtgaattttatattgactttcctgaagatacattatcattaaatggtttgattgaaaatgtcatatcaagaaaatga

SEQ ID NO: 244063 - DNA, 1278 bp, Klebsiella pneumoniae; identical to SEQ ID NO: 52326

SEQ ID NO: 244064 - DNA, 996 bp, Klebsiella pneumoniae; identical to SEQ ID NO: 52327

SEQ ID NO: 244065 - DNA, 2739 bp, Klebsiella pneumoniae; identical to SEQ ID NO: 52329

SEQ ID NO: 244066 - DNA, 1005 bp, Klebsiella pneumoniae; identical to SEQ ID NO: 52330

SEQ ID NO: 244067 - DNA, 678 bp, Klebsiella pneumoniae; identical to SEQ ID NO: 52331

SEQ ID NO: 244068 - DNA, 348 bp, Klebsiella pneumoniae; identical to SEQ ID NO: 52333

SEQ ID NO: 244069 - DNA, 558 bp, Klebsiella pneumoniae; identical to SEQ ID NO: 101130

SEQ ID NO: 244070 - DNA, 294 bp, Klebsiella pneumoniae; identical to SEQ ID NO: 101131

SEQ ID NO: 244071 - DNA, 435 bp, Klebsiella pneumoniae; identical to SEQ ID NO: 101133

SEQ ID NO: 244072 - DNA, 474 bp, Klebsiella pneumoniae; identical to SEQ ID NO: 196120

SEQ ID NO: 244073 - DNA, 519 bp, Klebsiella pneumoniae; identical to SEQ ID NO: 101134

SEQ ID NO: 244074 - DNA, 405 bp, Klebsiella pneumoniae
atgcgaaacctgcccagggaaacagcaaagcaaatcctgctgagcgattactggaccggaccccggtttgaccaggtggcagctctatctacgttactggcggatgagctttgcgacactggcgtgaacatggggcccagtgtcgccagtaagttcttccagcgctggctgaccgcaatgaatatgcgcggaaagctgtatcccgatctgattccggatggtgccattggtccccgaaccatcaccgcgcttaagggatacctttccgcccgcgggaaagagggtgaacaggttctgttgcgtgcgctgaactgcagccagggtgccagatacctcgaactggcggagggccgcgaagccaacgaggattttctctacggctgggttaaggagcgtgtcctgtga

SEQ ID NO: 244075 - DNA, 249 bp, Klebsiella pneumoniae
gtgcgcggtcggagtggtcacgacaaggcaagggccgtagtcgtggcgtatctccgcgttagcgggccggtagggccgcttacgagcgtgtactctgaactcaccgcgtcacctctcacagcgactaatcccctagttacaacatccatcattaaaagcgacactactcccggccttcggccgggggcggcggcgcttttcagtggtggggaggggcacctggccggcaaaccggcgctggttttatga

SEQ ID NO: 244076 - DNA, 156 bp, Klebsiella pneumoniae; identical to SEQ ID NO: 16824

SEQ ID NO: 244077 - DNA, 207 bp, Klebsiella pneumoniae
atgtacaggaagacgttaagcgtatgggcgatgacgatgttgatcgggagttgcgcgaaaagtttacccgccccggtagtcgttgacacggcctgcagctgggtgcggatcatctacctgactgaccacgatatcgatgtgctggataagcagaccaagcgtgacatcctggcgcacaacaaagcagtgcaggctaactgcccgtaa

SEQ ID NO: 244078 - DNA, 861 bp, Klebsiella pneumoniae; identical to SEQ ID NO: 196080

SEQ ID NO: 244079 - DNA, 273 bp, Klebsiella pneumoniae; identical to SEQ ID NO: 196081

SEQ ID NO: 244080 - DNA, 204 bp, Klebsiella pneumoniae; identical to SEQ ID NO: 196083

SEQ ID NO: 244081 - DNA, 261 bp, Klebsiella pneumoniae; identical to SEQ ID NO: 196085

SEQ ID NO: 244082 - DNA, 351 bp, Klebsiella pneumoniae; identical to SEQ ID NO: 196086

SEQ ID NO: 244083 - DNA, 1338 bp, Klebsiella pneumoniae; identical to SEQ ID NO: 196087

SEQ ID NO: 244084 - DNA, 585 bp, Klebsiella pneumoniae; identical to SEQ ID NO: 196098

SEQ ID NO: 244085 - DNA, 282 bp, Klebsiella pneumoniae; identical to SEQ ID NO: 101144

SEQ ID NO: 244086 - DNA, 417 bp, Klebsiella pneumoniae; identical to SEQ ID NO: 52340

SEQ ID NO: 244087 - DNA, 291 bp, Klebsiella pneumoniae; identical to SEQ ID NO: 52341

SEQ ID NO: 244088 - DNA, 234 bp, Klebsiella pneumoniae; identical to SEQ ID NO: 52342

SEQ ID NO: 244089 - DNA, 252 bp, Klebsiella pneumoniae; identical to SEQ ID NO: 52343

SEQ ID NO: 244090 - DNA, 618 bp, Klebsiella pneumoniae; identical to SEQ ID NO: 52345

SEQ ID NO: 244091 - DNA, 675 bp, Klebsiella pneumoniae; identical to SEQ ID NO: 52348

SEQ ID NO: 244092 - DNA, 450 bp, Klebsiella pneumoniae; identical to SEQ ID NO: 52349

SEQ ID NO: 244093 - DNA, 369 bp, Klebsiella pneumoniae; identical to SEQ ID NO: 52350

SEQ ID NO: 244094 - DNA, 195 bp, Klebsiella pneumoniae; identical to SEQ ID NO: 101154

SEQ ID NO: 244095 - DNA, 237 bp, Klebsiella pneumoniae; identical to SEQ ID NO: 52351

SEQ ID NO: 244096 - DNA, 168 bp, Klebsiella pneumoniae; identical to SEQ ID NO: 101156

SEQ ID NO: 244097 - DNA, 231 bp, Klebsiella pneumoniae; identical to SEQ ID NO: 52352

SEQ ID NO: 244098 - DNA, 393 bp, Klebsiella pneumoniae; identical to SEQ ID NO: 52353

SEQ ID NO: 244099 - DNA, 480 bp, Klebsiella pneumoniae; identical to SEQ ID NO: 52355

SEQ ID NO: 244100 - DNA, 798 bp, Klebsiella pneumoniae
atgtcaaataatatccttagtaatattacacttgccgatttggctgcactggctaacttaaaaccattcgatgaagatctgtttgtagaaaatctttacgctgatattaataaggcaattaagaatattgaaaaaacagcagataagtattattcggatgatgaagataaaattactaatttattagttttatttctcaagggtgttgggtacaacgcttctgaacaaacaaaatcaaacggctccgtagatatcacagttcaagatcgtggacagagttttacttggctcgctgaagcaaaaagagggaattcgtataatggtgtatttgaagggatgttacaacttgtaacaagatatattactgatgaaaaatatgctggtttctttatttatcaccaaaagttagattcttcaggttattttaaaaattggttcagctatcttagctctggtgattatgagaaatataatgcaatttctactagactcgaagaatgccgattccattttaaaaagaatccaataactaaagctttcactgggaatgagtgtttttttgattatgatatagtgtcgaaaaaaggtaaaccagttaaagttaggaatttcattttaagtttgcattataaccctgcagataaaagcgggcgagataataaatctttgaaagtaggacaagcaaaactttatgttaatgaagtttgtgataaatggttacatgaacaagaaactcctaaagatcttgaaaagtttatgaactgcttaaatacagctttccctgatttatttgtataa

SEQ ID NO: 244101 - DNA, 576 bp, Klebsiella pneumoniae
atgccagcgctcttttggttatggcctcgtctattccgaggtgtcacacctgatcgccacgttggtgaaacgtctctggctgtcgtacacaactggcttgcacattccggctacccgctggatctggatactgaaaggaatccccggaccgctgcggcacatgtgccatataccgtactgcaactgctgcctgtcttttcaccacatcaggctcagtggtattcttggagttctcacacaaccaagaaactgaaaaacatgaacaatcctttatccaaccttcagttggatgtttggtacaaggtgctgatcgtcatttgcacgatcgtattcctctctaccgctggtggactgctaccaaaattacctacaaattcagcgcttcttatttctcttggcggcgtatttttttgctgtggtgaatggaaaaatcacccacgctacacaatcgtcgaagaggctatgggccaaagatttcttggtactggcttcaagcgcaaattcagtatcacaggcaccattctctgcttgcttggtgcttatctgatctacaagggaatcatgccacttttgtag

SEQ ID NO: 244102 - DNA, 555 bp, Klebsiella pneumoniae
gtgggtatagaacctgaatggaaagttgagaagcagcccgcctggctagtggccgcaatcaggaagacgattgccgcgttgccaggaggatacgctgaagcggcggaaattctggacgaaacccagaattcactctttaaccgccttcgtgctggtggcgaccagatctttccaatgggctgggcaatggtgctgcaaagcgctgctggagtaagttacatcgctgacgcgttctctcgtgaaactgataacggaattcacgttcccggcgcagtgcctgatgatgaaaacgaagagattggcctgaaactggccgagctggtggggaggcttggtgagctggtcaacgcttaccgtcattacattgaagatggtgtagttgaccggagcgagtggcaaagtcttaacgatatcgcatatcagttcagggtcactctcatgacgttcctgaaccttatttcccgtgtttattgccttccagaaatgggtgaggcccgcgagtgtgcagctccgggccccttggcgtgtcgtgtcagtggagaaactaacgcatga

SEQ ID NO: 244103 - DNA, 180 bp, Klebsiella pneumoniae
atgcgagaacttaaccggcgtttcagagatcactatggcgtcccggtgcgcgtcatcagatgggagcccgagacccgacgcgttatatacctccgcgaagggtacgatcatgagtgcttcagccctcttgagcaattccagcgtaaatttacagagttaaaggacgatcatgagcactaa

SEQ ID NO: 244104 - DNA, 555 bp, Klebsiella pneumoniae; identical to SEQ ID NO: 101160

SEQ ID NO: 244105 - DNA, 429 bp, Klebsiella pneumoniae; identical to SEQ ID NO: 101161

SEQ ID NO: 244106 - DNA, 1185 bp, Klebsiella pneumoniae; identical to SEQ ID NO: 101163

SEQ ID NO: 244107 - DNA, 933 bp, Klebsiella pneumoniae; identical to SEQ ID NO: 101164

SEQ ID NO: 244108 - DNA, 729 bp, Klebsiella pneumoniae; identical to SEQ ID NO: 101165

SEQ ID NO: 244109 - DNA, 342 bp, Klebsiella pneumoniae; identical to SEQ ID NO: 101166

SEQ ID NO: 244110 - DNA, 195 bp, Klebsiella pneumoniae; identical to SEQ ID NO: 101167

SEQ ID NO: 244111 - DNA, 144 bp, Klebsiella pneumoniae; identical to SEQ ID NO: 101168

SEQ ID NO: 244112 - DNA, 324 bp, Klebsiella pneumoniae; identical to SEQ ID NO: 101169

SEQ ID NO: 244113 - DNA, 519 bp, Klebsiella pneumoniae; identical to SEQ ID NO: 101170

SEQ ID NO: 244114 - DNA, 213 bp, Klebsiella pneumoniae; identical to SEQ ID NO: 16872

SEQ ID NO: 244115 - DNA, 372 bp, Klebsiella pneumoniae
atgacaacggctggtggcgtgacaacgttcaccgtcacggagccgctggactggtctttcgaaaacccccgagcgctgatccgctatcaggatggctctgcatccgggctgatggtggcgagcagggtgggtgattttcagctgtcagtcccgcacctgagcgagtttgatgacccgatgaaggttgacctgtcgtcggcaaccatcgagccgatccgcctggtgttctgcggctcaacgcgccatgtctacgacgccattgtagaggagatcgccccgcagtcagacggaacctgtcaggtcaccgctaaagaatacctcgaatcgttctaccagtacgacgacgccacataccccggcgacgctgcttaa

SEQ ID NO: 244116 - DNA, 2763 bp, Klebsiella pneumoniae
atggcctttgatccgccgattggctcttcagcccctgaagtattattgataaacgcaaagaaccttgattttgctatgaatgacattacaacagcgttctggaaagacaggttaggtcaggaaagaaaaacctggtatgggattgaatcatctttagaagtaatgcgagcagcacaactggcggcttttatttcccagttcaatcaacaggcgcaggagtttgacgcgcagataagcagccaggcctcacgatacgaggccgtgctgcaggaggcagggagaacagttttagggcgttatgaggatggcccctggacgctgacgaattacaaccagcttatttcctatggcggaactttctggaaactggcggcgtcggtcgttatcggggacgggtataccacggcaggaaatacacccgtaagctggaacgctactgaccgggttaactttgttgatgtcgggcaggatcagcttcgtagtgaactgggtgcaatatttatgcccgcgccatcgggaaatgctgtgacagataccctacttctccaggctgctctgcgcgttggtggacagattatttataaccaccccggtgagtatctgtacaacacccatagcgtgattaaatccggtacgtcatttcatactgccgctggtgtgaactggaaacaggtagcaggtaaggttaacccgttcctagtcaatgaggcattttcagcgtcgcgttatgctgtgaccagcatgacgaaaaacactactgcgattaacatctaccttgatggttcggatatcaaaagcgccaactacattacggtggtctgcgaaaatcatccgttcgtacgtggggattgggcggcatttcatggtgcgaaagagttcggctacgacgggattatgcgggttatttcagtcgttgacgcgaacacctttattgctgaaagccattcaatgccgaccgcaacaactgccactccggatgatgtgttctggcatgggatgtactgctttaaggccgaccataatattgaggtcgatatacaggggaggattgacggcaactggcgcaataactctacggcgtcgacaaccgattttgatgagcgcgtgaagtttatggggatggcgttctggggggtgcagcacctgaccgttcgcattaatgatgcgttcaacatccgcaaatatacagttctgtttgcaaatatccgtaacgcctacattccgcgtattaatttctataacttctcggatggcatccatttccagccgccctatgttggggtaagcatcggcacactggccggggcgaccggtgatgatatgctggcgctcacgaacggcgactatgaaacctatcagttgagccgcggacacggctacagtctttacgctgatcacctgatgccgcagaacgcacttacggccatgaaggtggtgggggcgacaaactatcgttactgggatattggcatcggttctatttccgggtcaacgcggcttcatgttatcgctgcaattcgcgatctgcctctaacctggacagatatcggccgcttttatatcggctcatgtacctgcgcttcgcagacaaaagatgacttttatctcaatactgaccggatggatttgttcgccattgataattataccgtgtgttcgcccgaaagcgggacacacagcattacgatgggtaaccgctacggtgttacaaccaatatcggcacaattaagctgcgtaatgtgcagtacaaggaaggcgtgcaccttaaatcgttctacatcgggactaactgtaatatcgggttgctggatatcgagttcgcaaacgccaccccactgaacggcgcactggctggcgttttgaccgcaccggctatgacctatgacggcgacgccggtgagtccgcaggcgggtttatcgatacgatcaggctttcagggaagtatgttttcccacaggctaacatcggccgcctggcatggctgcgttataaatggaatcgtatcttcctggataatctgtacgtcgaaaacggtgagcgtgttatccatgaaaacgagattacaggtaatgacggaaaaattttctgcaataacgttcacgtcagaaacacgcatgacttctgcaacacgtataacaaggtgcaggcatatcactcgtccacgctgctggaaacaaccgatatgccatactggttgcgtgatgcgtctgccgagcttcgcatttatggcgcagttaagaccctgaatgacaccggcgtctgtcgtgtcgaggcaggaaaatattacgcaaaaggactggacgtgcccgttaacctgactgatttcccgccagccggtaatcacggcgacgtggtattcaataccaacgctgcgggtaatgcagtgggccgttatcagtacaacagcgcaaacagtacatgggagcttcagaaccgcgagaacatcagccagtcgccttctgacacctcagcgacgatttataaccctgactggaatcgtggatttaactgggtccagacgctgacaaaggatgtgcaatttacaggcggcgctgcaaatcttgcgaagctcaatcgcggggataaagttcgtctgtacctgacacaggacgctacgggcggtcgggcagtgtcgttcagcaccgcctacaaattcccggttgcctgggtgagcggtggcaccgcaggccagcacaccatcggtgagtttgtctacgacggtcagttcctggtgctggagcgggctaacgtctggtactga

SEQ ID NO: 244117 - DNA, 249 bp, Klebsiella pneumoniae; identical to SEQ ID NO: 125654

SEQ ID NO: 244118 - DNA, 192 bp, Klebsiella pneumoniae; identical to SEQ ID NO: 194004

SEQ ID NO: 244119 - DNA, 372 bp, Klebsiella pneumoniae
atgacaacggctggtggcgtgacaaccttcaccgttacggagctgcttgactggtctttcgaaaacccccgtgcgctgatccgctatcaggatggctctgcatccggtctgatggtggcgagcagagtgggggattatcagttgtccgttccccatctgagtgattttgatgacccattgaagattgaccagacttcaccagccattgagccagtccgcctggtgttctgcggctcaacgcgtcatgtctatgacgccattgttgaggagattgcccctcaatcagacgggacgtgtcaggttaccgccaaagagtaccgcgcgtccttctacgactacgacaacgccagttatcccggcgacattgcataa

SEQ ID NO: 244120 - DNA, 771 bp, Klebsiella pneumoniae
gtgattcacacgtcatacgttgaaaagacatgtctcgttgacaccacaacgacaaccattgccggtaatcagttctataccgactatcaggacccgtggaatgcgacactgacaaaagcgcccgcgatggtttgtgagggtggtatcactgtcgacagaactgtcgtttcggctggcgtggctacacacccgttcagccagaaaccaccaaccatcaacggcccgctcatcatcaatccgttccgtgatgacacagaggactactcgaccgcgcagattgcagagtggaacagcgccgaagggaaaacggtatacctctatgactggcgccgtcagtatagcgtccagcgcccgatacggttttttgataacacacaggaagcattccagtactacaagggcgtctggacgccggttgtcaaatgcggctcagaagtcgtgacgctgaataccaccgcgggaacctatcgccgctcggggcggttagtgcatgcgacattcagaatcgaaaccacgtcaatggcgctgacgacaggtggcgcggtagtgatatcagggcttccgttcacagtagccgcactgagcgacgggggattaacagtttccccgataatttgcagtcgtgccggctcggcaatcattattgcgcaaacgaacccgaccacaaaagagattctactgttaaccaatagctcaccggctgttttctcaattacaggcggaacaggtttgacgatttacggctcagttcagtacgttctgacagaataa

SEQ ID NO: 244121 - DNA, 1752 bp, Klebsiella pneumoniae
atggcctttaacccggagctggggagcacgtctcccgctgtgctgctcgataatgccgagcgtctggataagctggtcaatgggcccgagctgactgagccggatcgcgctggcgttgagctggatacctggcgcggaatgatggcgaaaaatgatcaggttactgaagacgcccgcaaaagtattactgcgctgggattaccctattcgacactatcggaagcacaggcagccgtgaacaatggtcagataccggtgaactcagtttgctatgtccgcagcactgacgacgcagtagcaattgagtatttaaatgaagccggaacactggtacccaccgggaatgtgttgccctcagaagaaaccatcgacaaaaagctcaatcagcgactcgtcccgggtcaatacctgtcgacatggtttcctgtttttttcgatcgaaacagaaatgtttacgcgtggtttgatggtggacgttgggacgttgctgattttggcgctaatgcgcgaacaatcattgaatcagtacctaacgcctgggcacaaaagtttctcccccagggagactactctccaaattactttccgtttgttcacgacagaaatggaaatgtttatgcatggttccataacggtatgtatgacggttatggatttgggccaaatattgaaaaatatatcttaaatcttgtcggtgaggcttctgcacaatcagacagttcatttattgaaggagaccagtataagttcaactttaaaaaaggtcgtgttttcagtgggcaggcagcgagtgttaacactgcattttttggtgactcatggaacgaaaaaaacacgattccacaatcattaattaatgttctgggaggaatatttaaagacccagcctggataagttgctctaaccgcgctgatggtgtcatggctggcatatcgcctgtcgttgcaacaaactttacgaaatatgatggagggagtaataacacgaacccgccaccgtatggatgcggacctgatgggaatgggtattacaataacaatactgttgggtctctggcctggaccggtattacagcaaccgatctttcagttttctattatgatggttccggttcgtttaccatcacaattgatggcggcacacctgtaacagtcaatggtgcgaacaccggagcagctaaaaagcacgatatcagtgggctatccgcaacagcccatagcgtaacgattcagagcgtgggaagtggggttgtatccattttggggatgtatggaaagaacagcgctgtgcgttccggcgtaacggtttcaaggatggggaatggcggggctataggaagtgatttctttaatttttctgagtggatcaaacctgttgcacagtatctcgatattgatttgttgtttgtcatccttggtacaaacgatttcaggttaagcaaggggacaacgcaatatagaaatggactggtggaaataattacaaagtttcgggaagctacgcccggtatctgtatttgcctggtgtcaccgggtcactgtaatgcaactggtactccagctctgtcagagtacgatgctgtcatgcgtgaactggctgttgagtataacgtcaacttcattagtggatatcagctattcccgaaaacgtacgataacagcaatggagcctgggaggatggtttgcacctgagctctcttggcgcatatatattgacaaataaaatcaaaaaagaattttttcaggagtaa

SEQ ID NO: 244122 - DNA, 291 bp, Klebsiella pneumoniae; identical to SEQ ID NO: 101468

SEQ ID NO: 244123 - DNA, 327 bp, Klebsiella pneumoniae; identical to SEQ ID NO: 101462

SEQ ID NO: 244124 - DNA, 1071 bp, Klebsiella pneumoniae
atggaaccaatcaaatggacaggaagaaaacgcctccccgtcatccgtcagacagagtccgctgaatgcggactggcgtgtctggccatgatcgcttgctggcatggactgctgacggacgtacccgcgctccgtgaacgattcagtatcagtacacagggaatgaccttgcagcggctgatggagtgcgcgtcaggtatccggctggcctcacgtgcagtacggttagagccggaagacctgaaatcgctttctctcccgtgcattctgcactggaacataaatcatttcgttgttctccataaggtacaagggagcaaactggtcatccatgatccggataaaggaaaggtaactctctctctacaggatgccggaaaacacttcaccggcgttgcgctggagctgacaccagccggcgatttcacggtcagagatgaaagaaagaaaattcgactacgccagttgacaggtaagacacccggccttcaggcagctatgttgcgcattgtcattttcgccctggctctggaggttctgacgctggggagccctcttatcaatcagatggtgatcgatgaggttctggtcgcggcagaccggagtctgttgaccgtcattatcattgcactgctgctgctgtcactgacccagatgctgctgtctctggcccgccagtgggccagtattaccttgtccgtcaattttaatatgcagtggacggcccgggtgttccatcatcttgtacgtctccctctggcctggtttgacgcacgaagtaaagggagtatcaatgcccgctttgaggcagttgataccatccagcatgcgctgaccgcacagatactggaaggtattctggatgtgctgcttgtggtgaccacactatgcatgatgctgttgtacagtcctgaaatgacgctgatagccttgctggcagctattatctacggggtgctgagagcactgtggtatccctccctgcggcagtcagcagaagatgcctgggatgccggggccagggagtcagggagtcagggtattttcttgaaaccctcaacgggatcctga

SEQ ID NO: 244125 - DNA, 522 bp, Klebsiella pneumoniae
atgcaaggtaaggggctatttaaatatactttaatatcattatcattaggaatagcccccataatattaattttttttatttatttcaggaatgaagactcatatataatttcatatctttttgatatcgccaatggatatcaaagggacttttcagaacaatatttaacagtgagcactatagcttccgcatatactaaaaccgcaccacttttcgtcatgttaatgtatatgatttgctggaacaagtttgatataaaaaccatcaaactagatttgaagcaatggtttaaacttctgcctggtctgctccttttaacgacaggggcatattatttaacttatgtaggtgtggaaaatatgtcggatagtatttatcgcaccaaaagagttattgctggcaatgagtactttctatttatttattacatccttttatttctgacaaattattttttcatatggttgttttttatttacctctatatgttaaaaggtctaccttactttcaaaagcggtga

SEQ ID NO: 244126 - DNA, 141 bp, Klebsiella pneumoniae; identical to SEQ ID NO: 36145

SEQ ID NO: 244127 - DNA, 1155 bp, Klebsiella pneumoniae; identical to SEQ ID NO: 239239

SEQ ID NO: 244128 - DNA, 630 bp, Klebsiella pneumoniae
atgaataaatttaaactcaaaactgttgatgtatgggatacaattctgcgtcgtgattgccatccagacttcataaagcggtcaactgcatattattttttccttaaatttcattcgctacacaatgttgattccgtcgaccagctatttactaagcgagttgaaacagagcgcttaattggtaagaaaaacaaagatcttggttatgatgatgagtatctcattcaggatgtaatgcttcaatgggtagaaaactatatctctgcagagcaatatgatacgccagcgatagcacatgagctatattcctgggaaattgagcaagagaagaagcacatctatctggatccaggtattgaggactttcttgcgcaatatccctctgataagacaatctttctgtccgatttttatacttcatccactgatttaacagagttactcgttagcgctggattggatcagtctgtcatatcagatggcgtttcttcaattgacgagcgactgaacaagagaagtggacgtctcttcgattttattcaacaaaaatatcagttagccggcgttgactggatacatattggcgataatgaatggtccgatgtgcaaatgccgacatcaaaggtataa

SEQ ID NO: 244129 - DNA, 270 bp, Klebsiella pneumoniae
atgttttcgctgaacgctgcgtataagcgcgcgtaccccgaatattattgtgaaattaatggtgttgatattctccagaactttatcaatcacgccaacccgaactatgcagatgatgtggccgacgttgcagccggaacaaccccccggagtctgcgatatgacgacctgcatccgtctcaggttctgcaggaaaatgcattacatatcggcgcggatgttaacgccgaatttatctatcaatatctgacaaaaaaaggctggttataa

SEQ ID NO: 244130 - DNA, 615 bp, Klebsiella pneumoniae
atgaatgcgataatcattgacgatcatccattggcacgtatcgccattcgcaaccttctcgacagcaacggcattaccgtcgcagcggaactcgacagcggcgcccatgcggtacagaccgccgaaaccatgcagcctgacctgctgatcgttgacgtcgatattccggagctcagcggcatcgacgttcttgagcagctgcgcaaacgccgctaccagggaaaaattatcgtcatttccgccaaaaatgaacggttctacggcaaacgcagcgccgactgcggggccaatggttttgtgagtaaaaaagagggaatgaataatatcctcgccgcgatcgacgcggccaataatggctacagctatttccctttttcactggagcgcttctgcacccacggcatcaccgatcaggaccgactggatacgctgtcaacgcaggagatgaaggtcttccgctatattctcagcggcatcgactacaccaccatcggcagcaaaatgaatatcagcaataagacggtaagcacctataaggtccgtctgatggataaattaggctgcagctccctgcttgagctttatgactttgcgcaacgcaataaaatagggtga

SEQ ID NO: 244131 - DNA, 321 bp, Klebsiella pneumoniae
atggcaacctttgacgccgtatttgtcggcctgactattctggatatcgccgggcgcccggtggtggcgatcccgccgcgcggtggcgtcgcttttattgagcaaattcgcctcaaccccgccggcaccgccgcgggggctaatattaacgccgcgaagctcgggatccgcaccgcggcggtggcctgcctgggcgaagatgaaaaggccgactttatcctcgccagctatgcccggctgggcattgactgctcgcttatccagcgcaccgcgctgaaggagacctcggcgacgatcctgccgattcgccccaacggctaa

SEQ ID NO: 244132 - DNA, 354 bp, Klebsiella pneumoniae
atgcgcggcaaggaactggacacactgatcgagcacgaattacaactgatgctggctgaaggctttgacaagtcccctatttccgccaaggccctgcatattcggctcaaggcaaaaggtatcgttaacggtggtttaagtacgctgagcagccttgagcgaaaacgcctaattgctgcctatgttgatcagcaacttggcccgttgaatctacgcccaaaagaaaaacagcaatacgtcaaccgcaaaacccgtcaggccttgttggccagaaaccagcagttgcaggcggaagtcagtgaattgcgagaccaattagcgcagaataccctttcgttgatagaaattgtctaa

SEQ ID NO: 244133 - DNA, 264 bp, Klebsiella pneumoniae
atggctttcgccactcacgtactggcgcgggacgatatgtgtttgttgctccctgaagtcgcgcagttgctggtatatccaacgccctcgttttttcagcgcagacagcacatcctgctccggcgttccggatggtacagatgcgactacccggcagtccggatgaaccttgataagtatcctgcctttgacgacctgccgcagagcacactgcaccacgatggtttcatcaccataaacaaaccgtacagcatttatggatag

SEQ ID NO: 244134 - DNA, 255 bp, Klebsiella pneumoniae
atgaaaaaatccattatcgccgccggacttctggccctcttctccaccacagcaatggctaacgagacgctgatcgtcggcgccacgccggtaccgcatgcggaaatcctggagtttgtgaagcccgtgttggcaaaggaaggcgtcgatttacagatcaaagtatttaacgattttatacagcccaatcagcagctggcggagaaacacctcgacgctaactactaccagtaccgtccgtttctcgataactaa

SEQ ID NO: 244135 - DNA, 225 bp, Klebsiella pneumoniae
atgttatccagagttaaatttcaccgttacgttatcgttgatatttttatctttttgattgcccgcttttcgccaaaacggcgatatattctgctgatcgcgcaattaggtagtgatatggtccattatcctaaaaattcatgggctattatcctggcaatccttgctcagccgttgtattacctgactttaatttccattttcataacattcgttcaacattga

SEQ ID NO: 244136 - DNA, 537 bp, Klebsiella pneumoniae
atgaacaaagtctatatcgtcgcggcctgccgtacgccggtggggcgctttcttggtgccctgaaaacggtctccgcggtggagctggcagcgctcaccgtcaggcacaacctgcagcaggccggcattgacccggcgtggatcgatgaggtgatctgcggctgcgtcctcgccgccgggcagggaatgggaccggcgcgtcaggttgcgctgcgggcagggatcccggtgcaaacgccggcttacaccctgaatatgatctgcggtagcggcatgaaaagcatgaccgaaggggcgatccatatccagagcggttatgccgacctggtggtcgccggcggaatggaaaatatgagtcaggcgccgtttttgctgcagggagagataaggggcgggatgaaattcggcgcattcagcagtgaggatgtgatccagcgcgacgggttaaccgatccgctgctgcagatcccgatgggggaaacggcggaggccatcgccgcgcaggagcagatctcgcgcgcggcgcaggaccggtag

SEQ ID NO: 244137 - DNA, 909 bp, Klebsiella pneumoniae
gtgggcggcgccgaccgcggtttcggtttccagatgttcaccctggtgttgatcgccttcttcgtggtttccaccctcgtcacgctgcgcaacgtccacgaggtttactcctcggatagcggcgtgagcgaggatgccagccatctctcactgcgccagatggtggcgctgatctataaaaacgatcagctggcctgcctgttgggcatggcgctggcctataacacggcggcgaatattatcgctggctttgcgatttactactttacctacgtgattggcagcgcggagatgttcccgtattacatgtcctacgccggcgcggcgaacctgctgacgttagtgctgtttccgcggctggtgaaagggctgtcgcggcgcattctgtgggcgggcgcttcgatcatgccggtgctgggctgcggcgtgctgttgctgatggcgctgagcggggtctacaacgtcgcgctgatttcgctggccggcgtgctgttgaatatcggcaccgcgctgttctgggtgctgcaggttattatggtggccgataccgtcgactacggcgaatatacgatgaacatccgctgcgaaagtatcgcctattcggtgcagacgctggtggtgaaagcgggctcggcgttcgcggcctggtttatcgccatcgtgctcggtatcatcggttatgtgccgaatgtggcccagtcgtcccagacgctgctggggatgcaagcgattatgatagcgctgccgacgctcttttttgccctgacgctgtttctctatttccgctattacaagctcaacggcgatatgctgcgtcgcattcagattcacctgctggataaatatcgccgggtaccggaaaatgtggctgagccggaacggcccattgtggtacccaaccaggtgtaa

SEQ ID NO: 244138 - DNA, 1089 bp, Klebsiella pneumoniae
atggcgctgaagctattagccaataataacgcaaagagtgtactcgctgcgggtattagcgcgtccgctaccgttattaccgtgggtactggagcgggggcgttatttcccgtgccggtatccggtcaaagttattttaaattaacgataacagacgcggccaccaaaacaatttctgaaattatgcacgtcacttctgtaactggtgacgtgatgacggtaattcgtgggcaggaggggaccacacccagagtttggtctacaaatgatattgtagctaacctgataactgcagggacctttggtgtgctcgcacaaaaaacagaagctcttttgatagaaaataatctgtcagaaattagcgacggaggaaaccagaaaattgcagttggtaaccttggtctttctggagggcttggtactgatatcgttggccgcctgataggcgttcaaaaaataacttcatcaggggcgtacactaaaacaccgggtgcaaattttggcattgttgaagttgtcggtggcgggggatctggagccagcccagctcaaaatggagcagggaatacatccggagcaggtggcggaaatagcggatgctatgcaaaagtaatggttaacctgagttcggtttccaccgtagcatgcactatcggttctggcggcgtaccgctggctcaacaggacggtagccccggaggtgatacatcatttggtggcttcgttaccgctaaaggtggtagcggcgggttgagactggcttcttcaacactcttaaaccggatttatggcatggctccattgaattcaacatttggaaccgtgtctggcgccacgctgctggattttgattgtgggcacctgggaggggatgcttttatcctgacatcaggagcaagggcgggctatggcggcgcatcaaggctaggcggacaggtgtttggccccggatatgataccgccggaattgatgcaaatacctatggtggcggcggttccggggttgtcgcctctgaggcttcttttggcactaaccttcttggtggcaaggggtatcagggattgatcatagtgtatgagtttgcgtaa

SEQ ID NO: 244139 - DNA, 579 bp, Klebsiella pneumoniae
atgagtgcaatagacactttaagggaatacgccgaagtatggcatttatttggtggtatgccagatgatgcaacccttagtgctgaagtttcggctctttatcttggtgttagtgtcaaaaccctcgctcgctatcgccagaatggtaatggccctgcttatatccagtaccaagcagaagacagcaaagcacggaatcaacgagtaaattatctactgggtgatttaagagcttggcgggatagtcataaggtaagcagtacaatggaggccgcacaggtccgaggattggcttttacttgtttgactgattttactaagccagaaccgttttgggctattgataataaaatttactctcatgccctcaccatccctgacgatagatttaaagagttactaactacaccccatgcggaagttatttggatctctgtcgaggatgttttatttaaggattggcacaatgtaggtgtccgacagaaatggcatgaactgcttattgattttttaaatggtcttattcaagcttcgggttcagaaaatgaacggtattatcttaaagatattttaccttaa

SEQ ID NO: 244140 - DNA, 171 bp, Klebsiella pneumoniae
gtggtaaccctgagtcttgaagcacccggcggcgtgggatcccgggaggtgttttatctgagcctggccccggaggatggctggatgatccgcaaggcgcaccagtccccggaggcgcgccttttgcttaccgaagatcgtttttttatggcgatcgacagcctggcctga

SEQ ID NO: 244141 - DNA, 549 bp, Klebsiella pneumoniae
atgattactaacaaacagatacttactgaagtcgaacaactgtcgcgtttgttcaaaggtggtgaagctgaaattccttcaatgtggacttgcttctggccagggcttgcggcaatgttttggttattattatggcctatcgccctatttagttataagttcttttgtgtagaattaccaaatgcagctcagattgggatagcagcttctgtgttagtggcttttgttgcaggattgttcatgatgttgtacatagtaaactccagggcattgtacctatccattcctgaagcataccgtaaaaaatcagaattatgtctgtttatagtaggaaaggctaagttttactgtcgcatatacttgctgacttatgctattttaattatcgcgtttacctatccagattatgggtctatatactcgactgttttatttgtttttttctcttttggtttgatgcaatatgttaatgtcgatttaagtcgatatcagcttacagccttaacatcactccttgaaaccattaagacaagtaagagtgaaaaataa

SEQ ID NO: 244142 - DNA, 858 bp, Klebsiella pneumoniae
atgacagacctgtttgcagccggaatgaaagctggtttatacctgtgggacactgctcctgtgtacgggatggggagttcagaagccgcactcggcaaagcgatgcgtcgttttcctcgcgaggatattcttgtgtcaacaaagtttacgcctcagatagctaacgaaggcacagaacacccggtggaaaatatgattaaaggaagtctggcgcgtctgggtgtgaacagtattgatatttactggatccataacccacacgatgtggagaaatggacgcaaggtctgattccgcttttacaggacgggcgggtgaagcgcgttggtgtatctaatcataatctggcgcagatccgacgggctgacgaaatcttaggacaggcaggctttggcgtgagcgccgtgcaaaaccattacagtctgttgtatcgatcgtctgaatatgctggcatccttgattactgtgatgaaaaagcgatcactttcttttcctacatggtgcttgaacagggggccctgagcggtcggtacgatgtcagtcacccgatgcctgcgggcagcagccgggctgaaacctataacaagtcacttgctcaactggaaaaactgactttggctatgagctcgatagccgcccgacgggcggcaagcgtggcacagattgctattgcgtgggcgatcagcaaaggcacagtacccattattggtgctactcgggttaagcacatcagcgaagcggtcggctcattgaatattacgcttagcacagatgaaaatgccactctggaaagactggctgctgaaacgggcgtggatacacgcggtgcctgggaggaacggatggacacaaccgcctga

SEQ ID NO: 244143 - DNA, 687 bp, Klebsiella pneumoniae
atgaaaattggcataattggtagcggcatggttggcagggcattcgcgctccgcctgacagagctgggacacgatgtggtggtagggacgcgcaacatcagcgccaccatgagccgcacagagccagacggcaagggcatacctgcatggcagttctgggcaaaggaacaccctgagatcagactggtgacgttttcagaagccgggcagttcgccgatgtggttatcaatgccactgagggtgctgtcagcctgcatgcgttgaaggagacaggggaagagaatctgaaagggaaaatcattctcgatctggcgctgcccctgagttatgcctccggcaggccaccccggctgatttttgcaaatgatgacagcctcggcgagcagatccagcgtgcctttccgactgcccgggtggtgaaaacactcaacaccatgagtcacaccgtcatgcttaacccgtcgattctgctgggttctcacaatgcatttgtatccggagaaagcactgaagccaaggaaaccattaccagtctgctgacacagtttggctggcctgtcggtgacatcgtggatctgggagggattgaaacctcccgggcaacggaaatgtatgccactctgctgttccagctctcaaaagtgagaggtaactacgattttaatattgcagtcgtaacgaaatag

SEQ ID NO: 244144 - DNA, 735 bp, Klebsiella pneumoniae
atgaacacacacgtaaaaacagccctgataacaggggcgaataagggtataggttttcagacggcgaaagagctggggcgtctgggtattaaggttcttatcggggcacgggacaccgctaaagggaaagctgccgttgaaaaactgaagctggagggcattaatgcggattacctggcgcttgatgtaaatgattcgtccagcgttgagggcgcggcgcaaataatcggaagcctgccggatggtctggatatactggttaataatgccgggattatgagtacgctcgatggtgtaccgtctgcgacagatatgagcgtggttcgtgaaacctttgaaaccaacttttttggggctctgcttgttacacagaaaatgctgccagccgttaaaaaagcacaggcggggcggatagtaaatgtttcaagcggtctgggctcgctggcgctgaaccaggacccggaatgggagtatccggataccaagctgataggatacaacgcttccaaggcggcccttaatatgctgacggttcagcttgcctgggagttacaggagtcaaacatcaaagtcaacgcagtaaaccctaacttcaccaatactgaactgctgcctgacacgtccggaggaaggcctgtggaagaagcggtacgtgagattgttcgtcttgccttgttgccagagtccgggccaaccggaggcttttttgaggacggcgagcctcttccatggtaa

SEQ ID NO: 244145 - DNA, 948 bp, Klebsiella pneumoniae
atggaaaacctgaccctggacaggctggcaggcatcattgcgtttgcacgcgtggcatctctgggaagttacaccgaggcctcacgagccctgtcagtatcaccttcagcggttagtaagagcataaagagactggaggagcgtcttggcatcaggctttttacccgcaccacacgctctattaccctgacaccggagggggcagagctttatgagaaagccctgagacttatcagggaggcagaaagtattgagcaaacagcttttgcagcccgtaacgagcccgcaggcctgctcagagtgacggcgacggttccggtcggaacccgactgattgcacctcgcctgccggagttcaggggaaaatacccggggttaaatgtggagctcaggcttactgacacaatgactgacctgattgaggaaggtatcgacgtggctgttcgtattggtcctgtcgctgactcaaggctgattgcctttccactcgcacccaatatcgtcagcgcatatgcttcgcctgactacattaaaaggcgcggtatgccccggctcccttcagagctggactcacatgatttggtcaggatccgttatcagagttcaggccagattatgaagtggcattttcgtgatgaagacgaggtcattgaactgatgcctgaggcggccattaccgttaacagccccgaggctgtgctggctattctcagtgaaggtggcgggataggaatgctgccgtcctttctggctattacgccagtcagtcatgggcttctcgtgccggtgatgcccgaacgctgggtagtgcgtcataatatcatggcattctggccggaaagtcggcgtggaaatcctggcgtcagagcctttaattcgtttctgagggagatcattcctgatccggccccctggaacgtttcctttaccagtaaaaaaaagggctga

SEQ ID NO: 244146 - DNA, 312 bp, Klebsiella pneumoniae
atgagccgattggcagccattatcagcgccgttgtgatctgcctggttgtttgccttggttggctggcaatgcattaccacaacgctgctgctgagcagaaaacccgagccgatggcgccgagcagcaggtaaacgcagctcaggcgatcacctccaacgttctgaccaccatggccatcttcaacaccatcgccgaggccaatcagcatgcaaaagagcagatcgcactggacgcatcgggagcctcggctgatatccgggttgctgttgcgaatgatgattgcactaatcgccctgtgcgtaagcgttaa

SEQ ID NO: 244147 - DNA, 492 bp, Klebsiella pneumoniae
atgactatcacactacaggcagtaaacgagctcatcgcctccctggagagcgcaggcgagctgtcaatcagagagcagaagttcctgaagctggcgaaagagtttcgcatttgcagcgcttcactggatgccgccataaaaaccgggaatatgctggcagaccaaaatgctcagctggctgcggagaatgtggcgctgaagaatgcttttggccccggcgattcagtgctgaattttctcactatcgcattacgccacacaacgtatgacaggattgaccttgatgacgtcacgctggctttcaaaatgtcactgccggaaaccccctcaaccgctcgtatcgtagccgaagccgaggcgcgcggagttgagaagtttgcggcaaaacttcgaattcctggtgatgaccagttttttgacgctttggcgaaaggggtttcacttgctgctgacgacttcgccaagcagctgcgagagggggccgaaaaatga

SEQ ID NO: 244148 - DNA, 705 bp, Klebsiella pneumoniae
atgaaagaacgcggaatgatttttaacggggagatggtgcgggccatcctcgacggtcggaagacgcagacacgtagggttattgccaatgtaggacatgataattgtctgcctttgcaaaaaagaaccaaaacaaaggacggtatttatacccatgtcatggatgcccatatctatgggctttgcccatttggaaagattggcgatcgcatttgggtgcgtgagacgtggtctgatgtaaaccttgatggggcccctgctgtggcgtatcgcgcagatgatgaagtttatgatctgatggaagataaatcgctcttggatgaagacggagctttcaactatcaggacccgcgagtacgtaaatatcaatttgctgcatggcgttccgacttaattagtggaattgagggtaactggcgtccatcaatccacatgcctcgctgggcaagccgcatcacactggaaattaccggagtgcgagtggagcggttgaatagcatcagccaagaagatgctcaggctgaaggcttggagcttaccggatggcggccaacatactctgacccggatagcggcggcgaggttatgacgccatacgacaactttgctgagttgtggtcatccatctacggcgacgaaagctggcaagccaacccctgggtttgggttatcgagttcaagcgcgttgaaggcggtgcagcatga

SEQ ID NO: 244149 - DNA, 879 bp, Klebsiella pneumoniae
atggagacggtgtattttaccagaaccactggtggcttaactgctcaaagctatttctatggctctgagtatatggtttatattgaaggtaaggataaggaatcaaagggtactacatacgatgaaaagtattacaatgctattctgagctatctccttccagggaaaaaggtaacaattaaagtagttggctcctgccatgatgtgttgcacatatacagacaaatattaaattctaatatttcgaatactatttgttttattgatcgggattatagcggggttacatttaatcatatttctgattacaggttaattagaacttatggttatagttgggagaatgatttttggtctactgaactatgttatttcatgataaatagcttgactaatcacaatcctaatgcgcttaacgagtttgctactaagcttaagtttggtgtttcacggttagcgttcctacataaaataaatgtcgcatgcactttccttaatttcaatatcttggctttaggatgtaaggggcaagatgggataatatatgattctgaatctctttttttagttagtaattctgagataaaacgaatagttcttccattgaaaaaacatccggaaataaaagagttgcgttttttttataagcaaatcgaagcgttgccagaaagattgattcaaggtcactattttgaatacatcatgttacgtgcaataaaagatgtttccaaaaaatactctcctgaaaaaattgcagcgtctgagaaaataattaaaattatttctttttctcaatttatgataaggccatcgaattttttacctccggcagttttggattactatcaagagaaattaaatttatttttagagagatag

SEQ ID NO: 244150 - DNA, 1221 bp, Klebsiella pneumoniae
atgattgatttcataactactaatacagggattgtattgaaatatgatccagaaacagcaggtacatcttgggtttggaatgaattaaaaactcattcaactgtaacaatttctaaagttttttattttaatattagcgatctgctcaaccctccgtcaccaaatcaagattttgatagttatttttatgagtttcagtttggaacttttagtggtgattatattgttataccaagttatattttaaatattcaaaatgatttatatataagtaaagatatcaatcttagtaggagcgtctttgctgcagagcgtaatatttctatttttggtcgactctcgcgaatattgaatcacagcaatccaatttatattggcggggattctgcggaggcaataccttctaatatttttagtgagttattaagcaaatttcctaactcgtacgaagtagatagatatgccgatgctagagtacatacgattcttgagcaatatttggaaggcatgaaagatgccagaggcctctacgaaacatatctcaataaaatagaaccaattagaaaaagtaatctcgacttaacaactatcaatgaattagaaatagaaaaatacactttaattagagataccattgagaatgctttaagtacgaaacagcactggtccgaaaaagattggcaaaaattgatggtgcaattccttcttcttttatttccaaagtatattcatgttattgaaaatattaccatccatgattactacagcatcccaggcaagaaaaaagatcgatacatagatataggcttggttgattctaatggtaatttagatattatcgaagttaaaaagccatttgacgacaagatcttgcgcaggacaaagtatagaggaaatagcataccaacgtctgagctaagcggtggtatcatgcaagctgaaaaatatctcttccatttatcaaaatggggaacaaaaggtgaagacaaccttacaaaaaaatatgcaagtgaactaccctctgggatgagcattcatatttctaaccccaaggctatcatcatagttggacgtgaccaaattggtaatggaaatatgacagaaaatcaaaaacttgatttcgaaattatcaagcggaagtataccaatatgatggacatcattacctacgatgacctattgagacggcttaaccgtacaatttcagcacttaaaaagtaa

SEQ ID NO: 244151 - DNA, 375 bp, Klebsiella pneumoniae
atgaggccagctaagcaagcaatagtgaaacaggggaaatcgacaactgcccacaaacgcgtgcagcagatgctcaaaacagaaattgtccgctctgattatcaggacgtgctgaattttgctgtacgatttaatactcgcagatgtcgtaacaacggacaaatcctcacagatagtttactgaaaacgatagagaaagcatccagagactatgttcttgcaggtcaagcgaagaacatgtccccaagagaaattaagcgtaaaattgttgcttctggccgcaggagtcgcaattacactgcatggacatctgatgtagatttagaaggaaagcatagtttgatggcgggagtgaaaggcagagtaaaagcctga

SEQ ID NO: 244152 - DNA, 579 bp, Klebsiella pneumoniae
atgtcaaagaaaagcaaagaaaagaaaaaaacagcagttaaggccgtcaccgcaaggaaatgcggacaatgttcggtatgttgcacttcactccttattgatgatcctgagttggcaaagccagcaggaacatcctgcaaacatcttgctacaacctcgggatgttcgatttatgaagagagaccaaaggtctgtaagagttggtattgcggatggcttaaatttgagacgttgccacatcaacttaggccagataagtcaaaagttctaatcaagattaacccgcagcctggcgtaacctatcaggtgcagcccataaatgacgagtcagttacatcattgttagatgactatgtgctgctattcattaggaacgccattttaacgggctcaccggtagccatctcaataccgacaaagcccggatactgttcacgtattcagctgatacatgatcttgtaagggatgtgcttgaagacagagtcgccttccgcaataagatgtgcgagttaattagaatcacatccaccctggtcaccgataaaaatccagagataattcacattgaggcactttaa

SEQ ID NO: 244153 - DNA, 222 bp, Klebsiella pneumoniae
atgcaaaaaacggttttagtgacaggctgttccagcggaattggtctggaaagcgcactggatttaacccgccagggctttcgcgtgctggcggcctgccgcaaggcagaggacgtggcgcggatgcaggagctggggctaaccggtattttgctcgatctggacgacccgcagagcgtggagcgcgcggcggcggaggtgcttgcgggctttgttgaataa

SEQ ID NO: 244154 - DNA, 795 bp, Klebsiella pneumoniae
gtggatgatgatggcctcaccgatcagcaacgtttatttgtcgcggaatacctgaaggacaacaacgccacgcaggccgctatccgtgccgggtacagcaagaagacagcgaatgagcagggagcaaggctgttagcaaaagttagtattgcgcaggccattgcgcagcagcagaaagcatccattgtgcgcacgcttggcagcgctgatgaagtgcttgagcagatgtggcggctggcaacattcgacgccaaccaaatttctcagtatcgccgcgggagctgccgttactgctggggcttcggtcaccagtatcaatggcgcgatgctgttgagttcgaagagaagctggctgaggctttagcgaagaaagggaaagaaccaaacgacagaggcggctacggttacgaccataccagctcgcctaacccgaaatgtcctcgctgtaatggtgatggcatcggccagcctttcttcgccgatacgcgcaagctggcgccggatgctgcgcttgcctattccggtgtgaagcttggtaagaatggcgttgagataaccgccatcagccgtgagcgcatgtacgaggcggtgatgaaacgtctcggcctggctgacagtgagttcgcccagcgtctacagcagatagaaattgagcgccggcagctggagatcgacaaacttcgcaaagaactggccactgacccggaggatgacgaacctacgccagttgcaatcaatatcaacgtagtcgatgcgcgagtgagggaagaggatggcgatagctccgacgcttaa

SEQ ID NO: 244155 - DNA, 1401 bp, Klebsiella pneumoniae
atggccaataacgatattacttatgttcgccctgaggtcagggcggcgatgcccgtgtggaaaaaaattcgtgacgtgtgcaaaggggctgatgctgtaaaggccgccgggaatgaatacctcccttttctggatccgtccgataagtctgctcgcaataaaaagcgcaatgccgattacattcagcgcgccgttttctacgcgataacgggcaatacaaaagtgggtttgctggggctggcattccgaaaagaccctaccatgaccgcgccggataagctgaattatcttcgtgataacgccgatggtgctggtgccagtatctatcagcagtcccagcaggttacagaaaatattctggaagccgcgcgcgaggggctgtatacggattatgcagctgggactgatgaggcgattatccttcgctatcaggcggagaacatcattaactggcgtaccaaacgtatcaatggacgtgatcaactggtgctggtggttttacgcgaatgcatggaaaaggaagatggttttgcgtacaaggatgaaatccagtatcgggaacttgccctggaggatggcaagtttatctgcagggtgtggcgaaagtcggccgatgcagggtctttttctgtcgattctgagtatcacccgaagcctaaaggtgaggatttttgggatgagatcccctttaccttcgttggcgcacaaaataacgatcccagcatcgacgagtcgcctttagccgccctcgttgaaattaaccttggtcattatcgaaattcggcggattacgaagacagcgtatttttctgcggtcaggttcagccggtgatttccgggcttgataccgcctggcgtgactggctgcaggataagggaattcgtgtcggttctcgttctccattcctgctgccgaaggaggggagttttacctatgctcaggcgcaaccaaacaccctggctaaagaggcgatggacagtaagcgtgattattctgttcagcttggcgcccggcttatcgagcagaacggcgcggttaaaaccgccacgcaatccagcggcgagcaaaccgcatccacatcggtgctcggcatttgcgtttccaatgtctcggaagcctatacgctggcgctcggctggtgcgccagatatctcggcataaaaggcgaggaataccgttacagcatcaatcaggagtttatcgccaaagtcgctgaatccggcatggtaacggcaatcgtcaatgcctggcagtccggtgcgattcgcgacacggatatggtcagagctctgcagaggcttgacttgatagatcctgctgacgaccctgaaactgtcattgacgctattcgtaacggcgcgcctaacctgattggtggcaataatggcaacggcgaatga

SEQ ID NO: 244156 - DNA, 1254 bp, Klebsiella pneumoniae
atggccctgacagacgttgtagcccgcaccgctaagcctcgcgagcaagcttacaaactcgctgatgcacatggactatacctgctgataagccctggcggctctaagcgctggtatctcaagtatcgtttcgaaggcaaggaaagccgcatcgcttttggcgcttatcctctaatctcgttagcaaaggcccgtgagaagcgtgatgaggtacggctgttattggctgaaggtatcaacccggcagaaaaacgggggaaagaaaaggaagaagcacaggccgcattgattacctttgagaaagtcgcgagagactggcatcggtacattagtcagaatcgctggtcagaaacgcatgccggacgggtatggcgcgatatggaacgtaatattttgccggcgataggccatcgccacatagcggacctgaagactaaagacttgcttgagccgttgaaagccgtggagcaaaacggccatctcgatttggcgtcacggctacgtcagcgggtgaccgatattatgcgctatgcggtgcagaacgatctgatagagcgcaatcctgctcaggatctctccggggcgatagcgccgccgaaggcgacccatcgcccggcgttgaagctggataagcttcctgattttctggcaaggattgaaagctataaagggagaacgttaaccacactggctttaaagttcacgctgtgcgtttttatccgctccagcgaactgcgttttgcccgctggactgaaatcgactttaaacgtgctatgtggacgatacccgctgaacgtgaagcgatccccggtgtaaaacattctcagcgcggggcgaaaatgcgcactgagcacttagtaccgttatcctgccaggctttggcgctgttgaaagagattaaggctatcagcggtgcttatgaacttatcttccccggcgatcgtcgcccgactaaaccgatgagtgaaaacaccgtcaataatgcgctgcgggttatgggatatgacaccactactgaattgtgcgggcatggtttccgcacaatggcctgtagcgctttggttgaatccgggcagtggtcgcgggatgctgtcgagcggcaaatgagtcaccaggagcgtaatagcgtgcgggcggcctatattcataaggccgaacatatcgaagaacggcggctgatgctgcaatggtgggcggattatctggatgcgaatcgggaagagtatgtggtgccgtatgagtttaaaatatga

SEQ ID NO: 244157 - DNA, 1242 bp, Klebsiella pneumoniae
atggatcacaagagggtaaaaccgaaggacaaacgcgatcgttatctgattctcgatccgtgtggtgtgtacatggtacgcatagctattccggcatacatggctgcacacttcgattataaaacatacttcatgaggtcaacagcaactcgcgacattcgtcaggcacgtctattccgggatgccatagcgttagaatggtacaagctgcgcgatcagcttaaacctgtacgttcaggttcacgggttgaacagatccttgatgaacttcggggcatcagcaaacaggcaaaggatgcaccgcccacacaattgaacttccccgcccaagtgcaggcttgcccttctcttctggttatgcgggatcagtacattctgcaattcagtgagaagcgcaaactcaccacgctatcgaagacaaacaaagctgtagaggtgctattagaacatctgaaaaaacgcgatgttcagcttcgtgacattaaccgaacaaccgttactggttggttggataaactgaaaagcgagaaagccccccagactattcaaaactatatcagcgctctggctcaaatctgggatttagcccgtaaccgatatcacgacgcaccacaggataacccctggcgtggtcatgggttggaggcgaaaagcagcaaagtaagctatgaggtttttactcatgcagagttggcgaaaatctttaccgcgctagatggtgacacagaaatgcaggcggtgactcggatagggatgtatagcggcatgaggctgaatgagatttgctccttgcgtgtagaaaacatccgtaggattgagggcatcctttgcttcgaggtcacagaaggtaaaaccaaatcagcagcgcgaattattccgattcacagcctcattatcgatctagttgaatcccttctccagaagccccacagaggctttcttttctatcgggcgtcaatcactgaccgtgcagatggaaaacgctcaacgtggcatacacagcgttttacacgggctaaacgcaaggcattgggagagcaggggaccgaaagaaaggtctatcattcactgcgtcacgaatttgcccagcaacttgatcgaaatcaggttcctgaagatcgcatagctttactaatggggcatgagcgaggtataactgaatcattcaagacatattccaaaaattcagcatcaccaattgaactattgcaatatatagagatgatacaatatcatttatag

SEQ ID NO: 244158 - DNA, 366 bp, Klebsiella pneumoniae
atgtcaaccaccgttttttcattgggcccttttcgtgagcttcacgacctgaatatttatacatctaaaaaaaggttttttatcgcaaatatattcaaagattcaaataaatataaaggcgatttgcttgttttggacaatatatctaaaaacagtattcatcataatttaagcagaatgagtcctctgcctgaggatatttttttagaacaacttgacttaattagaagttatctacgtactcaaggcgataatgattttatagccaaaatacacaacccttgtaatacacctttcatatctctaagtgatcaacagcttattgtaaataatcaagggattaatgtaactgtcaccgttaattaa

SEQ ID NO: 244159 - DNA, 1629 bp, Klebsiella pneumoniae
atggagttgaaatcatcattacttcaggatacaaatctaagcgagtgttccagtatattttctagttgtctcaactgccgaggtctttaccatcctatgcagtttgtattacggctaaggtatgatttacatactattttagaaaaaattagtggcgaaaagggaaatgttgaggattttgactcagattcaatacaagcaatgtcaactttttttcatgaaacgatccactggtggcaacatgttggttctgtatccgggattattttaagtttgtgctatcctgcacaaattcatattaatcatgttcatttaaaagacctgttaaaaaaaatggggccgatgaaaccattaaaaagcttactcattaatacggatctttcaaccgaggaaattaattcaattaacattgttataaataatttttatgacatagagtatttcaaggatcgagtaatcagaccgcagtactttacttcaagggtcaatgagccattgtttgaatcggttggtcactcatttaatatagcatatgcatattttattaatttattgtcttcatgtgttgaccctgatttgcaatttttacctaacgccaaaaaatgggtcgcatcgtttgatgagttaaataaaaataagagcattggttactattacaaatctccggttggcattccatgtattgggctattagaaatatatgaaggccaagctaggtttctgcaaatgctatatttatattttgcctcgaaaaaaacgttgtcatgggaggattttgataagcaaggaatgttaaatgacgtgtactacgcagcattttctcaatttctacaactaactaattctgaaaggcccaaatcaattgatagcccactaatatctttgttcttgcttgtgctcgatatatcaatgaacccagggacaggatttccttttgatatagttgactatccaggttttatagaaaatgttgatcctggagttagatttatgaaactctgtgatgctgttgctaacaagcaccctgaaaccaaagaacttattaaaaataactccacatctgaatactattatgtgtcagacattttgtgtaaagaaataaaaacgccaactccactagagatagcaacagtcatatcggaatggcctgcaaagcacattaaagtaaatgaattaatgaatgagtcaggtacgttctcttttagtgaggaaaacctcccagttagattgctgttgtcacgatttattcaatatcaaatagacaaatctgcttatccaagttttttttgttggcccagtatgtatatgtttggtgaaaagctcgattcgaaaatatacaatatgtatattgagcatcaagcaatattcaaagacggctcagatggtgatatatatccatcaattctacccggaagagatccggaaaatatacagaacacttttggtgcattctatcaatggatatccgtgtatgaaatgtgccggcagtggatcattgaagatgataactttaattatgattttttttggcttacatcaaaatattctaaagaagaacttgaaaattgggctagagggaattttttgaaaacatttggtgcagatcctgatatcttcaaaaagatttga

SEQ ID NO: 244160 - DNA, 1743 bp, Klebsiella pneumoniae
atgacgagtcccttttcccgtcgccccgctaccctgccttatgctcttcgtctggcgctagggggtgcgtttatcgccctggcgacgctgaccgcagaggctgaagaaacccggccaatcccgcaatcacccgatatcctgctcggtccgctgtttaatgatgtgcaaagcgcgaaactgttttctgatcagaaaacgttcgctgacgccattccgaacagcgatccgctgatgatccttgccgattaccggatgcaaaaaaaccaggccagcttcgatctgcgtcacttcgttgagctgaacttcacgctgccgaaagagaacgacgcctatgtgccgcccaaagggcaaaccctgcgtcagcatatcgacggcctgtggccggtcctgacccgcagcaccgtcgaggtggaaaagtgggactcgcttctgccgctgcctaagccctacgtggtccccggaggacgctttcgcgaagtctattactgggacagctatttcaccatgctgggtcttgccgaaagcggtcactgggataaagtcgaagatatggtcgccaacttcgctgcggaaattgacacctggggccatatccccaacggtaaccgcacctattacctcagccgttcgcagccccccttcttctcctttatggtaagcctgctggcgacgcacgatggcgaccaggtgctgaaaacctaccagccgcagctggagaaagagtatcgctactggatggccggggcggacgcgctggcacccggcagcgccgacaaacgggcggtgcggatggcggatggcgcgctgctcaaccgctactgggacgataacgacaccccacgccccgagtcctggcttgacgacgtcaaaaccgccaaaagcaacccgaatcgtccggccaccgagatctatcgcgacctgcgctccgccgccgcttccggctgggatttcagctcccgctggatggacaatccgcagcagctcgccaccattcgcaccacctcgattatcccggtcgatctcaatgccctgatgttccatctggagaaaaccctcgcccgcgccagtaaagcagcgggggacagcgccggcgctacccggtacgacgcgctggccaacgcccgccagcaggctatcgagaaatacctgtggaatgaaaaagaggggtggtacaccgattacgatctgaaaacccacaaggtgcgcaatcagctgaccgccgcggcgctgttcccgctgtacgtcaatgccgcgtcgcgcgagcgagcgacgaaagtggcggccgccgccgagtcgcggctgctcaaacccggcgggctgaccaccaccaccgtcaacagcggccagcagtgggacgcccccaacggctgggcgccgctgcagtgggtggccgtcgaggggctgcaaaactatggtcagcagaagatcgccatggaggtcacctggcgcttcctgaccaacgtgcagcatacctatgacagcaagcaaaagctggtggagaagtatgatgtaagctcaaccggcaccgggggcggcggtggggaatatccactgcaggacggctttggctggaccaacggcgtcacccttaagatgctggatctgatctgcccgcaggagaaaccctgcgatgcgctgcctgctacccgtccggcgccaacgccttcaccgcaggacaaacctgttgcggcgcccgcggctaacgaccccgcccctgcggaaccgcaaaagaccggctcctga

SEQ ID NO: 244161 - DNA, 684 bp, Klebsiella pneumoniae; identical to SEQ ID NO: 141516

SEQ ID NO: 244162 - DNA, 321 bp, Klebsiella pneumoniae
atgaaaacatatgcaattactacactcattgcctcaatttttttactgagtggctgtaataatgagccctccgagcaagaactttataatgcaatgaataaggtcgtggaacagacgaatgccatcgtcacatccattgccggtaaagatgtcccaaaagacgcactgcgggaattaaaatcagtcaaaaagcatgactgtgtgaaagtatcggataaaagctataaatgtaatgtgacggttgttgtcaataacgacaaggccaccgcagctgtcacaatggtcaaaacggatgatggctggcaggtcgtagataagtaa

SEQ ID NO: 244163 - DNA, 387 bp, Klebsiella pneumoniae
atgaacagacttattgcttctgtattttttatttccgtttcctttacttctggttgctcaacatcaggcaatcaacatctcaaaaacgaaacatcacaaagtctgcagtcgcaaattactaaaaataagacaacgaaatcagaaatcaccgccctcctgggcgagccagatacaagaaccactcttgataacggtaatgaagaatgggcttactttatgaataacaatcagtttgacgccaccacattcatcccgatcgttggattactgacgggtggttcacagacacaggcaaaaagactcgaaatcgaatttaaagacgaaacggtcagaaagtggacgttctcagaaaataacagcaagatgaaaaccggtcttattcaataa

SEQ ID NO: 244164 - DNA, 279 bp, Klebsiella pneumoniae
atgagtaagcaaactgttcagtgccccttttgttttaaagaaagtccccacggcgtaaaaatatgcaccggatgccatgcaaaagtggcctatggtgaaagtccgctcagtgtggccttcctgtttcaattcgtggccttcggtctcgcatggttagtattttcattgaccgatagcacttctgtctcagtcattacgttttttgccagcatcattattcttatctgtataattaaaaagacatatgcaaacagagttgtttttattcaacgaaattaa

SEQ ID NO: 244165 - DNA, 1200 bp, Klebsiella pneumoniae
atgaaaggcatgcagaaaatcaagagaggtaagcaatttactggagtagttgtctatgcacttgaaccggcttcacaccataaaactgatcccagggttattggtggtaatatggctggcaaccatatcgttgaccttatccgcgagtttgggcaaacaaaaattttacgacaagatatcaaaaaaccggtatggcacaactctcttcgcttaccgcatggagaaaaattgtcagaagcacagtggtcaaccgtagccgacgattatatgtctcgtatgggttttgctgatacccatcttcgttgctatattcttcataatgatgaggcgggacagcatattcacattattgccagtcgtatcgatattactgatggaaagttgtatcttggaaaaaatgagaaccttatcagcactcgtattatcagtgagcttgaaagagtatatggtctcacagaaacagcgactacttcaaaccgacgatctcagagcataaagaggctttcgcgcaacgaaaagatgctctctgaacgaacggcaactccctgcccaaaagccgctttgcaaacttgcatcgataatgtgttagccaatcgcccagatttgttatcgttcattcagcaactggaacaagtgggtgtaacctgccagcccaacattgcttcgacgggcaaaatgaatggtttttcatttgaatttaaggggattgccttcaaggcttcacagcttgggaaaaggtatgcctggtcaaatattcagacacttattgattactcgcctggacatgtaaaactacttaatacaggatctaagtttgctcctgctccttgtaaacagccagaagcacaacatcccagcagagaaactattcttgataaactactgcaactcgacgagcaagtcagaaatgaaagggagaatgaacttgcccataccatccaattgaaccaaaaactacgctttacggcccatcagatatccagacaacaccaatcccacttccaggtgtggcttccatttcttagcaggctcatacaactgctaagacagttgggtagttctgtgttgtatgcgacctctcgtccctttagacaaatctatcatcttcacttacttacctcctctcctgaacctggcaatgaaatacattcagaacaattggttagcaaaggatccaactacaaaccacatttcaattag

SEQ ID NO: 244166 - DNA, 438 bp, Klebsiella pneumoniae
atgaaaaaacaaaactactcaaccttcacaagttatctttctaaaacgcacaaaaatgtagatctttatagattgtacaacccacatttttcaagcttctgcaaaagctacacttatgaccatgatttctatcttacctatttctctcgtcatatgattacggagagaaacattctaactatattctcaatttacactcacttctcttatggcatgactaagaaagaaacgatcaaagatttcatattgtttcttaaaaagattaactcagttgttttctggaaatcattctccttccgtggttgcaatgttatttatttggacaaaaagcgagaacaaaaagaaatatcatggtttaccttttcacgaatctatgacgaagtatcagggataaaagaatatcaatttaataacaatatttatagaaatatagcataa

SEQ ID NO: 244167 - DNA, 600 bp, Klebsiella pneumoniae; identical to SEQ ID NO: 38779

SEQ ID NO: 244168 - DNA, 660 bp, Klebsiella pneumoniae
gtgaatatcgtctatcccgacgtctattcgtcccgggtatataacaccaccgactattccctcgaagggtcgcgctttacgctggagattatcaaaaccgcggcaaccaccggcagcggcaccctggcggcgggtaagtacacctcctacgactgggagagcggcagtaacccgatcctcgaaacctatctgagcgccagcgccatcaccgtggtctcgccctcctgttcagtgctgagcgggaaaaatatgaatgtcgatgtgggttccatccggcgcaccgacctgaaaggggtcggcaccaccgccggcgggaaggattttaatatcgacctgcagtgcagcggcggcctgagtgaaacgggatatgccaacattagcacctcgttctccggtaccctggccaccagcactaccgctaccatgggcgccttgctgaatgaaaaagccggcagcgggatggcgaaaggcattggcatccaggtgctgaaggatggctccccgctgcagtttaataagaaatacaccgtcgtccgcttgaataatcaggagacccgctacatcaccataccgctgcacgcgcgtttttatcagtatggcccgacgaccagcaccggcgaggtggagtcgcatatgatctttaacctgacgtacgattaa

SEQ ID NO: 244169 - DNA, 717 bp, Klebsiella pneumoniae; identical to SEQ ID NO: 182289

SEQ ID NO: 244170 - DNA, 162 bp, Klebsiella pneumoniae
atgttgtatatgccctctgccaggtacgggcttctgctgacgggtctgatatcagcaggtctcccggcagcaccactgagtccagctgaccagaatattgttgagcagaaacagaaggcattgctggaacagacgcaacagcagcgcgacatgctccgctag

SEQ ID NO: 244171 - DNA, 654 bp, Klebsiella pneumoniae
gtgaatttctttaaacgagatgatggtattttagacgtaattacaaaagcaattactgttgttagttttatttttggtatctggatctattttcacacaatacaccctgtatttcaaaaagagtcggagttgcaagatttaaggaaagagaaagtaaatattcaaactgacaatgaaagactgagcaaggaaactgcaaaaataaaaaatgatttgcacattcaaacagaaaaaatcaaagatctaaatgagagggcgggtaatttatcattagaaattgaatctaaaaactctgagttggcatctataaatgagaagttagaaatagcacataatgaggctgttttgagtaagttgaatttgataatggataaaataatttctgcatatttaatttctattgcacaaggtaaaaataaagagttcgatgttattgaatattctcatggcttaatagaaattcatgatcgagctagggaattaaatatatacgacaaagaggcatactcttattttgttaagtatctggatgaaaataaaagcagaaagtttataacggatgaggaaatattttcttatgctatcatgattccatatggttataagatgagtaagcatctagttaatactaaaggaatcgaaaaacataaataa

SEQ ID NO: 244172 - DNA, 705 bp, Klebsiella pneumoniae
atgccgccatccggcactaccgcgggtgcggcggcagaccgcccggcggcgctgcgcttgccgggcctacgaggggatcccgcaggcctcctcaggaacgtaggccggataaggcatgtatgccgccatccggcacaaccgcgggtgcggcggcagaccgcccggcggcgctgcgcctgccgggcctgggggtatcccgcaggcctcctcaggaacgtaggccggataaggcatttatgccgccatccggcactaccgcgggtacggcgactgaccgcccggcggcgctgcgcctgccgggcctggggggtatcccgcaggcctcctcaggaacgtaggccggataaggcattgatgcggccatccggcactaccgcgggtgcggcgcctgaccgcccggcggcgctgcgcttgcgcgggcctacgggggtatcccgcacgcctcctcaggaacgtaggccggataaggcattgatgcggccatccggcactaccgcgggtgcggcgcctgaccgcccggcggcgctgcgcttgcgcgggcctacgggggtatcccgcacgcctcctcaggaacgtaggccggataaggcattgatgcggccatccggcacaaccacaggtatggagcttgaagtgtcctgcccggcggcggtgcgcttgcgcgggcctggggggggtatcccgcacgcctcctcagaaacgtag

SEQ ID NO: 244173 - DNA, 2220 bp, Klebsiella pneumoniae
atgcggactcggacagcgattcggactctgacagtgattcggattctgacagcgactctgattccgactcggattctgacagcgattcggattcggactctgactccgacagcgactccgactctgacagcgactcggattctgacagcgatgcggactcggacagcgactcggattcggacagtgactcggattccgacagtgattcggactctgacagtgactccgattcagacagtgactctgactccgacagcgactcggattcggacagcgactcggattcagacagcgattcggattctgacagcgattccgactctgacagtgactcggattcagacagcgactccgactccgactctgacagcgactcggattccgacagcgatgcggattctgacagtgactcggattcggacagcgactcggattccgacagcgatgcggattctgacagtgactccgactctgacagtgactctgattctgacagcgactccgactcagacagcgattcggattcggacagcgattctgactccgacagcgactcggactctgacagtgactccgactctgacagcgactcggactctgacagcgactccgattcagacagtgactcggactccgacagcgatgcggattctgacagcgacgctgactctgactccgactccgacagcgattctgactccgacagcgactctgactccgacagtgactcggactctgacagtgactccgactccgacagcgactcggactctgatagcgatgcggactctgacagcgactcggattcagacagtgactctgattcagacagtgactcggattctgacagtgactcggactctgacagcgactcggattccgacagcgattcggattcggacagtgactccgattcggacagcgactccgactcggattcggattctgactctgatagtgattctgactctgacagcgactcggattctgacagcgactcggattctgacagcgatgcggattctgacagtgattccgactctgacagtgactcggattctgacagtgactcggattcggacagcgactccgactccgactcagacagcgattcggactccgactccgactctgacagcgactccgactctgacagtgactccgattcagacagcgactcggattctgacagcgatgcggattctgacagtgattcggactcggacagcgattcggattccgacagcgactcggattctgactccgactcggactctgacagcgactcggactccgacagcgatgcggactccgacagtgactcggattctgacagtgactccgactcagacagcgattcggattcggactctgacagtgactcggattccgacagcgactcggattcggattctgactcggattctgacagcgactcggattctgactccgattctgacagcgactccgactctgacagtgactccgattctgacagcgactcggattctgactccgactccgattctgacagtgactccgactcggacagtgattcggactcggacagcgattcggattcggacagtgactcggactccgactcggattccgattctgacagcgattccgactctgacagcgattctgactccgacagcgactcggactctgacagcgatgcggactctgacagcgactcggactctgacagtgactccgattcagacagcgactccgattccgacagtgactcggattcggattctgactccgattctgactccgactcggactctgacagcgattccgactctgactccgacagcgactcggactctgacagtgactctgactccgacagcgactccgattccgacagcgactcggattctgacagcgactcggactccgacagcgactctgactctgacagcgactctgactctgacagcgattcggattccgacagcgactctgattccgactcggattctgacagcgattcggattcagactcggactccgacagcgactctgactctgatagcgactctgactccgactcggactctgacagcgatgcggactccgacagcgactccgactctgacagcgactcggattccgacagtgactccgattcagacagcgattccgattcggataccgaaccgcaggcaaatgatgatacccataccgcggctatcgataccgtag

SEQ ID NO: 244174 - DNA, 963 bp, Klebsiella pneumoniae
gtgaaactgactataaggcttttagttgtgttaacaacggttgtttcttttctctggatataccaggggcttgagagtccttggtatttacttagtgaagaacaacatctatatatatactccacacaagctcaagtaattgctgccatttatggcctgacagttacaggttatatatttcttaggaacaaccaagacaaacagaaagaaaatgattcaactaaaatagatgcaattaatctaactcaaagcaatgaaagggttttgctatttgcgctaacttttttttcattatcaacaattctactggctgtttttactttggtatcatttgatgataaagtgaacattgttagagttgtatctaaaaatttgtgtacggcatttttcataataactatttctcttttttgttacttcatcctgtatgtcctgcggttggataaaattgaaaaagcaagtgaggaaataaagaaaactatagacgagtatgaaaaaaacaaaaatcctgcaactcagtcctcgtcggatatgaatggggatgagaacaaactcaatgatagtgatatgattgaagaaagaaatggaaatcaaagatatgatgacactactgactctctcgctctatttctatacaaattcaatcagttagaatcatttgttaatatactacttaataaattatactctaataaaatccaacctgttgatgcttatttggccccggttcacaattatacaacttctagaaaaggatggaggcatcgctctatttcaattgcgttaaatgagttggttaaatttgggcgtattgatagtcgtttgaataatgatttgagggaaataataaagtatcgcaatgctttggtccatggtcaggatttaattccatcaaaaattatgcttcaaaagattgatatgatttcaaaggaagttgaaagtttattagaaaataaagattaa

SEQ ID NO: 244175 - DNA, 1893 bp, Klebsiella pneumoniae
atgaacaatatgcacaccaaagaatatataaattattaccttagtcttacgactgaacctcaatacgccattatgcttaaaggggcttggggatcaggtaaaacttggttcgttgagcgagttcttgaagaatataagcaagcacatacggagttcaaattcctaaaagtgagcttgtatggcatcaactccattgagcagattgaagatgagttctaccgtcaattacaccctgtcctgtcaaacaaagccctgatttttggtgcaaacgtactaaaaaatacactcaaagcatctatcaagattgatctcgatggcgatggaaaatctgacttagatgttaaaaccagtgtccccaccattaaccttagcaactttagcagaaaacctgatggctttgtgctggtctttgatgatatcgagagaactggcatagatttaccactcctttttggatatataaaccactttgtagaagtaaacggatacaaagcgatcttggttgcaaatgaagatgaaataattaacagaaaatcgctggcaaataataacaacgaaaaattcatcagtgattacctgagaacaaaagaaaagcttgtaggtaaaacatttgaagtgacatcagatttacacagcgcttgtaaagttttcctaagcgtaattagcagttcacacgttgccaatattttcaaagaagatatggagtcaatagaacaactctatatatcggcgaattataataatctaaggcatttgagacagttctttctggatgtacaacgcatcacttttcttatgggagaaaaatatgtcaaaaacgacgatttcatgaggatattttgcaaacaattgttaattttctcgatggagtaccggggaggaaaccttagttacgaagagtttaactcaatcggtaaggttaattatggaatgatcttaggtcaaaaaaatatcgcaagcaagtatgacataatcgccaagaaatattcatctcctgtattaaccgagaaactactagatggagagttctggagggagctaatttatgatggaaaggtaacggatgttttgctcacccaactggatattacgcgattttttagaagcgccgatgcccaagcatgggagtatttatggagctatcaagaactaagtgaaaatattcttaatgaacagtactccattgcaagggataatctgttttcaggtaagatctcttgtttaggtgaactcctgatgaccgcgagtattttgctggaaatggcaaaggtaggtctaacctcggatgttgttcatcacatcatagatgagacaaaacttcaaatagatagttattacaataagttgagccctaaagatatacataaggagtatacgcaatggcattatagcgagttaacgtcatggcgtagtatgggttttcttgacagggatagtgatgattttaaaaatattattgaacatgttaaggtggcaaaaaataaaagatttgacgcatcacttccggaatttgcggctcagttcagcgatgagttgcaaaggggaaacctcacgtttctatctgaactgagtcagtctaataaaagagagcttaatcttcatgacctgccttttttacactttgtcgatcctggcattttcattgaaagctacagaaaacttgacccaataatcatgaggaaattggcttttagcctgcgtgagcgttatgctgatgagcatgtccgatacaggcttaccgaagaatataactggttgatcagactaaaagcctcagctgtagatttcaccaaaaacgcaaccagtagcgccttccaggttttccacgtcaatttttttatttgctatgcactgactggtgcaatcaattcatttaataaaggaacagattaa

SEQ ID NO: 244176 - DNA, 675 bp, Klebsiella pneumoniae
atgaacaggattgtaaacgatccacatagtagaaccgttgagcacatgatacctcaagtgtctgtttctataaaacgaactaatggtgagggggactttcacgtttgtaagaagtgtaatagcgaaaagagtagaatagatgaagttttaggtgtcatttgtcgtatggtcggcgaacataaagatggaagttttgatgcaatcaagagatttcataaagcactggcaagaaatgattcaaagtttattagagcttttgaaagcgttgaatctggaattaaaggaacatctatacgtttaccattaacggcagaagaaatttatcgttatggtatatggttaggtaaaggagtttattttattcagcaaggggaattgttgccagagaggtttctggtatgggttgagcttattagtcacgaagaagttaattatatcaaggaacaatataaacgccagcatgcttcagaagcatttgatgatttatccaaaaatagccgaatacaaaacattaataaagaatcgtttttaatagctggtagtaattcccgtgttatgttcatatgtttgaaccgagttataatgttccatatccagtttctggatagaacatttgtaaaccaaaaaaaatgcaagaaagcattgcgtagccttgaaaaaagaataaaaacgtag

SEQ ID NO: 244177 - DNA, 987 bp, Klebsiella pneumoniae
atgttggaagctgattttaaaataacccttgaagggtttgcaactgaagaagaagcaaataatatcggcaacttcacactagaagccatcaggattttatctaacaacctcaaccttgaaatctcaaaattaaaatgcgcagttatttcctataattttagcgaagccctcaaaaaggttacatccatttaccaacaccaatcccctagctcatttaccaatagcaaacagggcacagccatcgcacagctagtatcaaaaactggcagcaatggacaatgtgaagaatacacccttgtgctatccattgatttttttgttgagctttttaatgacggtagtttcttaaagttgaacgaagacggttatcccgctgtgatccatcgcattcaccatgagttagtacatgtacatgaaaaaaacttactaacatgcttagatcagaaatttatggtcaacgagtatggagacgcgctacttatctctgctacacgcgcatggtctgagtacctcgctaattatatgtcttcacgctcagcccctttagagactatcaatttatttttagagagtcttgacactgtcataagtgaagtgtctgacgagattgaaaatctcatatggagctataaaaccaataatatttctttggatacgatgtatctcgaagccaaaaaacgtatcaagctaatcatcaactcttatgcatatgctataggttatgtccactctctggacatcaacattgatgaatacaacccaaaactagctcttacactatccacctcaaaaataaataatcaattatcagagttaggcgttgcatttgagaatctttatgacaaatttaatgaccagcacattaatggttttgatgattaccgggatattacagtagccattgatggaatattcaagcagtttgggcttgttttagagtgcccagactggtccagtaactctggactctacatacatgtaaattag

SEQ ID NO: 244178 - DNA, 456 bp, Klebsiella pneumoniae
atgaatgacttcaaaccctttgaggacaagctctccgggttgatagcggcgctttcccctgccgggcggcgtcggatgaccgccgacattgcgaagaaactgcgccagcggcaacagcagcgcattaaatcgcagaaagcgccggacggttcgccctttgccccgcgtaagcgccagcccgtcagggcaaagaaaggccggattaagcgcgagatgttcgtgaaactgcgtaccaaccgctatatgaaagcgagcggcaacgacagcgctgcggttgtggaatttaccgggaaagtgcagcgtatcgcccgtgtgcatcagctcgggctgaaggatgcaccgactaggaatagtaattttgtggattatccatcacgtagattatttggtatctcggtttatgatagagaatttattgaggccagagtggttggttatataaattttcatagctaa

SEQ ID NO: 244179 - DNA, 1071 bp, Klebsiella pneumoniae
atggatactaatttttttagtcatgagcaaaccactagcgcaattaataaatttttaaatgaattagaaaaatatggtagtgagactaaatttcagaaagatagaaacaatcttacagaatcaattttaaaaaacttcattggcaacccaacattttggcttgaaagctcaacctataacacaaaaaatagcgggggctatcttttggaagccttgggcgaccgccccatcaatgatgagaatatcaacctagtgttttccatatgttacggattcattcttgaagcttatattttatcaaatcaaatagaagaaactttcagtctatcaaagagagttaaagactttggaatatatagacacagtgaatttgacgaaaaaagcaaaatgcttatagacttcacccttagggaaatgcctataaggatgctgaaaaccttcattaacagcaacgagattcaaccctataaaaacataacaaccaatctaaaggacgcaaaagaatttaataatagctggcagagtgactttaactcaaaaaaagatgcggtagatagaattaaaggtgagctagacaaatattacaccagtgccaatttcacattactacacgaaggatttaacaatcttagcaataaaaaaaatagagatatattctggaccagaaccttgctgtttatactatcactactaattctcacacctcttatttacgagatttactatactcatacttcagccgagcccattaacttaacagcagcattaccatctttaattccagtcatgtcgatcacaataatatttatttattttttcagggtggccttatcaaactacaattcacttcgcgcacaaatcatacaacttgaattaagaaagagtttaatccaattcattcaggactatcccaaacatgcaaaagaaattagcaacggaaaccctgacacattaaagaaatttgaagacattatcttttcaaatattatgactagcgatgacagaataccaccaacctttgatggagtagaacaaatagcgaacctcatcaaaaccataaaagcatcctaa

SEQ ID NO: 244180 - DNA, 537 bp, Klebsiella pneumoniae
atgaaaaacggctgggcagttgactgggcgcggacagaaccgcggcttgccgatgaagacttaagaccttatgtgtttgtgacgagagataaacaaagccttttcgagggggcactgacctctagccatcttgaaccgttgattgagaaactcatggggccgcggatggctgtagcaggcctcaaggtcccccttgagaaactctctgcaccggaagccgatgaagtgtttgaagctctctgtgtacgcattctccaggaagacagctttgtcaaagcgccagcagggattgatggtttgctgttcctcgtgaagtgcctgcccaggacacaaaataagctaattgattttattcgccgcatccagattccaaaaaaagggggtagttggatgaccgggttttcacaatctttcgttgacgccagttatgaaatggagttccgctctattcttcaagagtgggtagatcagcctcacaacgcagcgttaagccgttctgcaaaagcgatcctcgaactggaagggaaacaaaagtaa

SEQ ID NO: 244181 - DNA, 843 bp, Klebsiella pneumoniae
atgggaacatcaaaatcttacggtggaccgatcaacggtttagttcccgacttcgtggataacccgccggcaccaacgctaacgcctccaaatgacatacccacggatagccagactcagaacggaaacaccgctccaggcaatttaccttctgattccagtggcgcggggccgctgagcacacctaagggaaatttcactcgttatgcacgctctcgtagcccgagcgcgctaggcagagcagtcgctggatatgtcagaaacggtacgggtggtcccagcagggccagccgtcgcatgggatcgtcacgagttgttgctggtggtttactgaacattatcggcaatttcgaacaagggggcgcaactcaggctcttcagcgtttcgatcttggttcgcttgccggagagccagcctcatcggtattcctttcactggtggaattcttgtgtcctcccggtgggtctgttgatgaagggattgccaggcaggcaatgctcgataccattagggacctggcagaaacaggtgaggggagtttcgatgccttgacgcctgaacagctccaggaagtatttcttggttttgtcgtgcactccattgaaggcaagataatgtcagatatcggtaaaaatgcgatcaaactacccgatgatgttgaagcaatcgcggacatacaagaaacactgcatagtttcatcgatagcgcgacacgttcccagctcagaaacgatttatctgatgtttcaggtctttcaggaaatgaaattgacagaaaagttcatgagatttacgagaaggcatttgagctgattgccagcgaaggggagagcatggaatga

SEQ ID NO: 244182 - DNA, 1374 bp, Klebsiella pneumoniae; identical to SEQ ID NO: 183240

SEQ ID NO: 244183 - DNA, 771 bp, Klebsiella pneumoniae; identical to SEQ ID NO: 183241

SEQ ID NO: 244184 - DNA, 1287 bp, Klebsiella pneumoniae
gtgttcagaaatagttttggcatagaagaaaagatagagatgattgaatcaagctctacaaaaaattacttcaaagaagtttacagtagttacttgaatggtaattatagagctgcagtagttacattgtggtcagtgttagtttgtgacgcagtttataaaacccgcagattaattgacttaacggatgataagtgggcaaaaaaggaaattagtaaaattgaagaattacaacgtacaaatagcacttcttctgaatgggagttggctatatttgaagggttttatgaacaaaaaaaattcataggtgccggtgaaatatcaaacatcagagacatacagaaaaagagacacctatgtgctcatcctatactttccgaggacgacgccctatacacaccaaataaagaattagttaaaagcatgataattaatgcgctcgatgatttcataaccagaaaaaattactacggaaaagatctatttcaggtcatccttgaaacattggttaataatagcgaattttatgcctcttcaggtaatataaagccactcattgaaaaatatctttcacgagtaacgccaggttcagcttataaaatatttaaagatttttggaagtttagtttcagactggacgacgcggaggcaatcaagcatagattgattctacgtaatgcatgttaccatgtttataccgaggtcaaaaaagatccaagtacggcaaataagattaaagatgatttagattatttcgaaaatataacttttaaatggtcaaacttaagccatttctttacatttttatgcagacaccccgatttgtataaaaaattctcacccgaactccaagggcgtcttcgagaatatatcaaccgaaaagatgaagatgatattgattcacatgtttacttagttgctacaacctttctattcagctcatctagcgattactttaaacacattcaaagcaagattgaaagttatgaactaaataaccttacaatctcacatataaaattaatgcttgatatctatgacgaatataactgcgagaaagaggtttatgatatagtcatattatatgcatcaaaggcaattgatttcgatgatgcagataatagatttaatctcatattcaaagatgaaatatttgataacttatctaaagatcatattacaaagttaattgattcttttgatgagaacggccaaattggtagtagaagaagaaagagcattgacttggctaagttaataaaaaaactcgatgagtttgaaagttag

SEQ ID NO: 244185 - DNA, 228 bp, Klebsiella pneumoniae; identical to SEQ ID NO: 183243

SEQ ID NO: 244186 - DNA, 1029 bp, Klebsiella pneumoniae; identical to SEQ ID NO: 183244

SEQ ID NO: 244187 - DNA, 288 bp, Klebsiella pneumoniae
atgaacagagaaactgaccaactttcggacgtaatgactgaaatgagcgcaaaagcgctggtgacatggatgacgcattccgcattgcaggacataccgcgcgaagcattactggttcgcggccacgattttgtgtacgccctgcacgcaaattttgtgctgctacgtgacgttctgtcagaaacgctggaagatattgagcagcagagccatgacctcgaagaaagactggatagcctggaacagcggctgcagacgctccagaaagatactgataaattgtattag

SEQ ID NO: 244188 - DNA, 1875 bp, Klebsiella pneumoniae
gtgattttaaataagctggccgtttcactgtcgccgatagtgaatggcgcgctgagcttcatggcttttatgcaacagcatcagctgatgctggcgctattatcggggctgacgatgccgtttttcgcgtcgatgaaaagcgatgaacggcaaaaagccccgttgtggcaaaagctgattatggctttctccatgctttgttttctttccggtacgatggggccgctacttatctggattttccagtggctttatcaagggcgggtagtcgccagcattcctgttctggcatggccggtgctgattacctttaccgtaacgggttttattttgcatattctgctgcgcagggtattaacccctgaattagacaaaataaagaaacacctcgtcagaaagacaacgcttgaacgggaattgcgcaccgatgtccgcacggtaaaatcactgctgccggaaacgctgcattatgacccgctggattatatcgacctgaacaaagggttatttatcggcatggaccgcgatgttcagccgatgtatttgccgttaaaagactggcaaaaacaacacgcggatattatcggcaccaccggagctggtaagggcgttgccaccgggatattactttatcaaagtattctggccggtgaaggcgtatttgtgatggaccccaaggatgatgaatgggcaccccacctttaccgcaaggcctgtgaggatgcaggcaaaccttttgccttaattgacctgcgaaaaccccaataccagttaaacctgattgaaggtattaccgccgatgaactggaagagctttttgttgccgggttcagcctggcggaaaaaggtcaggagtcagacttttatcgcattgacgaccggaaagcggcccggatagccgcacagtttgtcatccgaaatactgcctcaaccattcgggatgtgtataacggcgactacgttcagggtattgccgataagataaaagccttcttcgggaaaattgaggagctggccttactccatgccatcaatgcgcccaccggattttcgcttaatacgatatttaaggaaggcggttgctgttatgtgattggctcaatgcgcaacagcaaaatcattaccgcgcagcgcatgctgctggttcgcctgtaccagctggcagaaaggcgcgagagagtgaaagacgtgccgcgccccattgctatttatctttccgaactgaaataccatttatccaggccagcgctggaaggcttaggcgcggcgcgggataaaggcgtgcatattattatggaccatcagtcgattgccgatttaaaagactgcccggcagatttgaaaggtgacgccgttgtcggcgcggtcgttgagaacgccaaattcaaactggtttatcgtgtcatggatccggacactgctgaatgggtggcaaggatgtcaggcactatattagtcgacgatgaggtccgcaaagccaaaaccgatgccgtgctgacagagactatcgacagtgaacgcaccatcaggcaggcagagcgtttctttaccgacagcaatatgatcctgaacctacccgattttgtcagcttcatcttcacgacaaaaacactcccggctgcttcgctgatttcgcccatcagggtgaaaaaacgcgaactggagatctgcgccgtgtcgcccgcgattgccgccaccgccgcaacggtaaatatcaccctgaattttaacgaggaggaaacttcccccggacccgcatcaaagacggatatcaccacaacgcgacccgatcttttttttgataatacggacgaagaagacacaacaacaccgaacgccgataaagaggaaaacccatcattgctggatttttaa

SEQ ID NO: 244189 - DNA, 210 bp, Klebsiella pneumoniae
atgccggatgagatcgaccgcgatcaggaatttaatgagcagcgactggaagaaatgattgagcagaatcgctttaaaccagggccagcgccatcattatttcactgtcgtgtatgcggcaaccccattcctgaaaaacgacggcagacactgccgggtatatcaacctgtaccggatgtcaggaaaaacttgaacgttgcagacgctaa

SEQ ID NO: 244190 - DNA, 588 bp, Klebsiella pneumoniae
atgatcccgtcaattaattacgccatcatagccaatgcattgcatgcactaaaggaaggaaatattaaccactgcgaagctctgggatttactgtcgacgaaataaattctctcgatcagttatcccttgatgaactgtttattgtcagccgtgcggcggccccctttgtttcgatcactgtccgccatgatgtgctgcatcatttactggcgcaggcccgccaggaataccagcatcaacaggagattaaccgggctatccgcctgggtggctctatcgcgttgctcaaccactattttggcctgacatcaaatgaagtctgccttcgccgtaggttgttgggtgtcagcgtgccgtatggccggacacctgaaccggatgaaaagacggatgcggctatctggctgcaatggcaacagtgccgggtggaaaaccttgaatcgcccgccgcactgatcgccatgatgcaggtgacggaatccctgatgccaaagcccgaaggactatcactcaccacggtctggaagcgtatcgcgctgtgcgaaaaggacgtcatcgccaacaggaggacgccatatgccggatga

SEQ ID NO: 244191 - DNA, 927 bp, Klebsiella pneumoniae
atgaaaagagaagataaaaagatcaataagtctttaccgaaaccggcatgggttactattcgagaggctgtaagaataataaacaaacagagaagaataaaaatttcagaaggtgacatttatcgccacgctttatatggaaatatttgtctctctgtctactttcaatcccttcccacattaagattgaggaagataaaatcatccttgaataaaataaagctacgccctcctatagaaaactcgctacgatacagactttgcatgcttaatattaaaaactttatgaatggtaataatttaatactgagtacatatggaaactttatcagacctgaccggctagtcataagcactaatttacaaggatatgaatttattctaattcaaagattactggcatactccttgaatatgcgcttgcctattataggtgcatgcgatgagaactatggcatcactgttaatttatcaggtcagccctatcaagtttttgagaaaattccatgtcaggaaagaatctatcagcagatcatgaaactccccgaacatatcgctccggaaatatattcgctgaattctaaatatgacttcaaagaagattcagtgaaagattattttcctatttatgaccttcccgaagatgcatgctttgtcattgagcaggaagaacttgatacatttctcagtctctctgcagaaaaatttactaacccttcatccaatcgaatctcaacccccctttctcgtttattctggctgtcatgtaaacataatgattctatcagtcctctgctcagtcatccttacaagcttctgcccatatttgagcaatgggcatctatcgagggaattactgaccacctgagtggcgatactctgaaaagagcactcgaacgtggttccccaacttcggtatcgaaataa

SEQ ID NO: 244192 - DNA, 2295 bp, Klebsiella pneumoniae
atgcataagaaacggcgttcggttcccgggatccgctattacgatggccccgctggcggttggggcgcgttaaaagcgacggccattgccgtgcgcacccagatggatgcggttgacgcccccgtcaccctgctgcgtactaaccagccggatggttttgactgccccggctgcgcatggccggacaaagaacataaatcaacctttcagttttgtgaaaacggcgccaaggcggtgacgtgggaagccacccataaacgcgtaacgcccgaatttcttcgccacaacagcgtcaccgcgctgctggaacaaactgatttcgagctggaaggatacggtcgcctgacgcacccgctgcggtatcaccgggagagcgatactttccagcccgtagactgggaacaggcctttgcccgaatcggcgaaattttacgcgggctgtcggcggaacaggtggagttttatacgtcgggtcgcgcatccaatgaggccgcttacctgtttcagctctttgcccgcgaatacggcaccaacaattttcccgactgctccaatatgtgccatgaagccaccagcgtgggattgccacgctcaattggtatcggtaaaggcaccgtttcgctggacgattttgacaaaacggagctggttatctccattggtcacaacccgggaaccaaccatccaagaatgatgggcacgctccatgaacttgcccggcgcggcgtgcctattatggtgcttaatccgctgcgcgagcgcgcccttgagcgttttgccgatccgcaaagcgttatcgagatggccacctacagttcaaccgacatcgcctcgacctattttcaggtgaaagccggcggcgatgctgccgcattaaaaggggtagctaagcatctgctgcagcttgaggatcagcaaggcaacgttctcgaccaggcctttattgccgcccataccagcggttttgctgattttgccgccgatatcgccgccacgccctgggcagcgattgaagaggagtcaggtttaactcgccagcagttggcaagcgtggcggaagcgtacgcacaatccaaagccacgattattacctatgggatgggcatcacccagcacaacagaggaaccgcaaacgttcgcctgatcgccgatctgttgctaatgaggggcaacatcggtaagccaggcgccggtatttgcccgcttcgcggccattccaacgttcaggggaaccggacggtcgggatcactgaaaaacccccggtcgcgtttctcaaccggcttgaacaggtttttggctttactcccccgctcaaacacgggcatgacgcggtccaggccacgcaggccatcatcgacgggcaggcgaaagcgctcatttgccttggggggaactttgtcgtcgccatgccggaccacgagcagagctttccggcaatgcagaacctggcgctgggcgtccacattggcaccaaactaaaccggacgcatctgctggtcgccgaagaaacctttattctcccctgcctgggccgtaccgaactggacatccagcgcagcggcaaacagtccatcaccgtggaagattccatgtcgatggtccacgcgtcttccgggaagctgaaaccggcatcgcccctgctacgctcggagccggcgattattgccggtatggcgcaggccgccttgccggacacccgggtcgcctggtcagaactgattgccgattacgatcgcatccgcgaatgcattgaacaaacgatcccaggattcgataactacaacgcgcggatccgcgtgcccggcggattccgcatgcccctgccgccgacggaacggatatggccaaccccaaccggcaaagcgatgttctccgtttttcatggagtaaatgaaaacctggcaggggaaggcgagcatattctacggctcattacgctgcgcagccacgatcaatacaacaccacgatttatgcgatggacgacagatatcgcggcgtttttggccgccgcgatattctttttatgaacgaaagcgatatggcgcgcctcggactggagcatggtgaccgcgtcgatattaaaaccgcgctgcccggctgcgcgctttgcctctgcgatattaccgtggtggcatatagcatcgcgcaaggatcggttggcgcctattaccccgaagccaacgttttggtccctctggattacgtggataaagacagcggcaccccttcctataagtcggtgccggtccagctgactttacgttcgaaagatatacgcccgctgcggcattga

SEQ ID NO: 244193 - DNA, 1404 bp, Klebsiella pneumoniae
atgttcggaatagatgcgtttcatctggcgaggatacaattcgcttttaccgtatcctttcatattcttttcccggcaatcactatcggtctggccagttttctcgccgttctcgaagggttatggctcaggacccgcaacgtgacgtatcgggagctttaccatttctggtcaaaaatctttgcggttaactttggtatgggggtagtttccgggctggtgatggcgtatcagttcggcaccaactggagcggtttttcacaatttgctggcagtattaccggaccgctgctgacctatgaagtcctgacggcgttcttcctggaagccggttttctcggcgtcatgctcttcggctggaaacgcgtagggccggggctgcattttttcgccacctgcatggtcgccctcgggacgctgttctcaacgttctggatcctcgcctcaaacagctggatgcagacgccgcaggggtatgccatcgccaacggtatcgtcgttccggtggactggctaaaaatcatctttaacccctcgttcccctaccgcctgctgcatatgtcgattgccgcttttctggccagcgcctttttcgtcggggcttcggcggcatggcatctgattaaaggccgcgatacgcccgcgatcaggaaaatgttttcgatggcgctgtggatggctctgttcgttgccccgctgcaggcggtaattggcgacgcgcacgggctgaataccctcaaatttcagccggcgaaaatagccgccattgaggggcactgggaaaacgttcccggggaggcgacgccgctggtgctgttcggcctgccggacatgcaggcggaagagacaaagtacaaattacagatcccttacctcggcagcatcatcctgacgcacagcctcacccaacaggtaccggcgctcaaatcctttgccaaagaggatcgccctgactcaaccgttatcttctggtcgtttcgcgtgatggccggcctgggcatgctgatggtgttgacgggtctgctgggggccggattacgctggcgtgggcgattctatcagtgccggccctttctctggctggtgttattgatggggccgtccgggcttatcgcgatcctcgcgggctggtttaccacggagatcggccgccagccgtgggtggtatatggactgctgcgtacccgcgatgcggtctcggcccacggcgatatccatatgtccctcagtctgctggcatttatcgcggtctatgcctccgtatttggtatcggctatctctatctggtacgtctgattaaaacggggccggtcagcggtgatacgcctgaactcgccgcgggcacgcccgctcgtccgctatcggcggttagcgagccgatacatacgcgcaaaggagaataa

SEQ ID NO: 244194 - DNA, 1011 bp, Klebsiella pneumoniae
atgggcatcgacctgtcagttatctggtttgtcatcatcgtcttcgcaaccctgatgtacatcgtgatggatggctttgatctcgggatcggcatcctttttccgttcattaacagcgggcgcgaccgcgacacgatgatgaatacggtcgcgccggtctgggacggtaacgaaacctggatggtgctcggcggggcggcgctgtatggcgctttcccgctggcttactccgtcattctcgacgggctaagcgtgccgttaacggcgatgctgctggggctgattttccgcggcgtcgcctttgaatttcgttttaaggccacgccggcgcaccgtccgctctgggataaggcgtttatcggtggctcgatcctcacggccctgagtcagggagtagccgtcggcgccctggtgaacggtttgccggtggccggacgggcattcagcggttcatcgctggcgtggctggcgccgtttccgctattttgcggcgcagggctggttgtggcatatgcgctactggggtgtacgtggctgatcatgaaaacgcagggggcgttacaccgcaggatgtcggatctggcgatccctctggcgctggcgctgctggcgacgatcgtcgtcatcagtctctggacgccgctgacgcatccggagatcgcgcaccgctggttcagtctgccgaatgctttctggtttgctccggtccccctcctggtgatggtgttctgctgggggattgtgcgtggcgcatatagtcgtaaggccagctacgggccgtttatgctcgcgctcggcctggtgttcctcggattcagcggcctgggcatcagcctgtggccgaatattattccgccatcggttaccctctggcaggccgcgtcgccgcccaaaagtcagggatttatgctggtcggcggcctgctgattattccggtgattctgatgtatacctgctggagctactacgtctttcgcggcaaaatcaatcctgatgaggggtatcactga

SEQ ID NO: 244195 - DNA, 174 bp, Klebsiella pneumoniae
atgcgtttctcctataaatcccaccggggcaaaacggcggccgccgcgccgcgcccgtggtggaaacgcatcgggtggatggtggttatctgggcggccagcgtgatggcattagctatcgtggcatcgatctttaggctgctgatgctggccgccggaatgaaaacgcactaa

SEQ ID NO: 244196 - DNA, 942 bp, Klebsiella pneumoniae
atgaccgattcaattatggaacgtcataatattctttcggcagatgtcaccgccgatgccgtcttttatgaatactcaaaagccgctaatcctatcggtgcaaagattatttcacgtgtgccgtatcatacttttccggcttcgttgtatgaaagcggcgagtcccgcgtgattcccctggatctctccgatatattgaactgcgtaggcccggcaacggggccgggagtgctggctaactttgttcgcatcaacggcggggaccgcattgtgctgaatccgctggcgacgtcgcaaattgtgtatgtcattgatggttttggcgtcgcggaacaggatggaaaaaatatcccgctggataagggcgctttcctcgccttcccgggggggatcccgaccacgttgaaagccgtgacgaccttaaagctctattacgtcaatgacgctccgctgcttgcttatcttggcgtgggtcaggtgacgccgcgcttctccgcgacgctgtatggcgccgaacgtgcagaagaggagctgcgtaaagccgcggcggataaagacgcggctaaccgcagccggatttcggtgctgctggggaataagcacttcccgcagacccgcacggtgacccatgtcctgtgggctatgtttggtacgttgcctggtaattcagtacaaaaaccgcatcgtcaccagtcgattgcgctggactttatcgttgactgcccgcagggatgctactcgctggtgggtacgaaactcgatgagcagggaaatattgccgatgccacccgggtggattgggaaccagggatgtcttttgtgacccctccgggctactggcatgcgcatatcaatgaatccagcgaggccgcgaagcttattccaatccaggacgctggcctgcagacctggctgcgttcgttggatattcgcttcagctaa

SEQ ID NO: 244197 - DNA, 585 bp, Klebsiella pneumoniae
atgcgtgacgcaataacgcctgatccagtgcaagataaaccgaccgcgttgtcattaaatatcggcaataaaataaggcgcctgcggcagtcgcgaggcatctcgttaaacgacctgtctaaattgtcaggggtttcaaagggggccttatcgaaactggagtcaggatactccaatccgcgcgtcgatacgctggacgcgatcgcagccgctttacgtttgccggttggcgatttgctgagcggcggcagcaggatatacccctatcttgaaaaatatcgtcctgcgacgggcgactattcgcaaatgatgaaattccgtatcggccccggtaatacctccgagatgtggctcctgcaaatgaatccgcaaatcactatccatagtcccgggcattccgttgggacgcatgagcatattctggttcatagcgggaccttgctcctgcgttttagccagaatgaggtcatcacattacaacctggggatttttatgctttctccgcggaggttgcgcacgcgtatatttcaacggaaacggcgattagcgcgacggtggtgatgtctcacctcgacccgggttaa

SEQ ID NO: 244198 - DNA, 363 bp, Klebsiella pneumoniae
atgcgtaaagttaatttaaaagaaagttttgatctattcagcgattactggagtccgaaaattgtcggcgatattaatgacgcgtatgtcaaactggccaaattctccggaaagtttgactggcatcatcatgaacatgaggacgagctttttcttgttatcagcggccgtttgcggatggggctaagaacgggagatatcgatcttgacgccggcgagttcattattgtgccgaaaggaaccgagcattgtcctgaagcgttaacccacgagtgctgcgttgttttactggagccaaaatcgacgttaaatacgggcaatattgtcaatgaacgtaccgtacgcgacctggatgaattataa

SEQ ID NO: 244199 - DNA, 987 bp, Klebsiella pneumoniae
atgccatcgtatctcatcataaataatgtcggggtgtctatgaactacttttccgctttgcagtcctttatccacgtggccgaactgcagagttttaatcgtgccgccagcgagctctcgataaagcgctcgaccgtatcccggcacatctcgggcctggaagaacatctgcatattacgctattcaaccggacctcccgcggattaagtttgaccgaagcgggcacgctattttttccgaaagccaaagagttattgcataatctggcagaggccaaagccgccaccatggcgttaaatcagcatccttccgggcaattaaaactgaccgttcccggcgccttttgtcgtcaccatgtgctgaaactgatagataaattctttctgcgctatccggatatcgatatttatctgcgctacggcacgggtcaggagagcctgataggcacgaaaaccgacctcgcaatttgttttggcactttaaacccgtcaactgtacacgcacgtaaactggcgacgcaaagctacgcggcttatgccagccccgcctgcctgcagcgtcccggattcccgttgcatgtacagcagctgatcgcaagcgcatttttcatccccagcgaagccggctggttctggcgggcaggcaaaggtgaatggcaggaaaccggaatgcaccgcctgccgcgtctcatttcacgggaagaagaagtgctgctggagcgagccaaaaataaccaaggtattgtggttctcccggagtggctggcgtttaatgccgtacaggcaggggaactggtcaaagttttcccgcacattgcttttcagccggggcgcgaagcgacgaatctctggttagcctatccgcataaaaagaccgtatcatcaaaagtcagagcctttatcgactttatgattgccgagatcggtgaaaaaccttactggctcgctcctgccctgaatgaaaatgcactgcccggtcatcactag

SEQ ID NO: 244200 - DNA, 915 bp, Klebsiella pneumoniae
atgaattattttgctgcgatcagaacgtttgttagcgctgcagaattgaaaagtttcagtgccgcggcgaaggaactgaatatcgaaacttccaccatctcccggcatgtcgcggacctggaagcggatctgcatattgcgctgtttaatcgttcgacccgaggtctgacgttaaccgaggcgggaaggctgttctattcgcatgccacccaattactggcgcagtgggaagaggcgaaaaattcgacgtcggcgctgaacaagcggcccgccggggtgttgcgcatcagcgtgccgagcgcgtttggccgcatgcacgttatgcctttcgtagaggagttccttgcgctccacccggaaatctccctggacatgaccttcaacgacgatgtccaggacctgatcgagtcccgcatcgatctgagtatccgcatcggcatcctgccggaatcaaccatgcatgcgcggaagctggcgccgcagaagcgctacgcctgggcgagcccggaatggatcgcgcgtcattcgccgggagagctgctgccgggtcagcaaatgctgatgttttctcgtctccacggcgaaggctggtatgcccgtaaagaggagagcggggaggcgtgggcccgcatatccaccaacgcccgactgattgccaacgacagcgaagctctgctttatgcctgccgtcatgggtcaggcatcgcggtgctgcctgactggctggtccgtaaggatgtacaggaacagcgtctgcagcgcgtttttcccgaatgggagttcagcatgctgcgcgcggaaacggctatctggatggtttatccgcgtaaaaggatcgtttccagcaaagtgcgttcgtttattgattttctggtggagaaaataggcactctgccgctccaggagcagccatag

SEQ ID NO: 244201 - DNA, 687 bp, Klebsiella pneumoniae
atggcattaagccctttactatggctgacgctgacgctgttatgctttatcgccgggaaaaagatccagcggctggcgggaaattcgccgttattcaacccggtgctggtcgcgattattttgatggccatcgtgcttcatatcaccagaacgccctatgcggtctatttccagggcgcccggtttatcaatttcctgcttgggccggcgaccgtctccctggcggtaccgctggcgctgaacatgtcgcatatcaaaagcagctttcggccgattggcctggcgctcctcgcgggttcattgacctcgacgatcgccggcgcgctgctggtatggctgtttggcggcgcgcgtaccgtggccctgtcgatggcctccaagtcagtgaccaccccgatcgctatcgcgctggcgcaggaggttggcggcgtgccctccctgactgccgccctagcgattgctggcggcatcgtcgcggccgtggtcggccgaacgattctcggctggtttaaaattaacgactggcgagcgcacggttttgccgccggcgtggccggtagcggcgtcgccgccgcgcagatcgcgccgctgaacggactggccgcggcattcgccgccattggtatcggtctgaacgggctgctcacggcgttgattgtgccactgctggcggggttgtggcattaa

SEQ ID NO: 244202 - DNA, 396 bp, Klebsiella pneumoniae
atggtaaatgcgtttgcgttattggtggtcgcccaattaaccggtgaactactaaggaatttactccatcttccgctaccggggccggttattggcatgtttattctggcgctgatcatcattctgcgcggcgcaagcaagatagccaatgccccggatagcgcattaaaacagctcgccgaggggctgataaataatatgggattgctgtttgtccctgcgggggtcgggattattaccgaaggcgggatcctgcgtgagtactggttaccgattctcattggtctgatcttttcgaccatccttgggctgctcgtcaccggcctggtgatgcaccacttttcacaaaaaaataaacagcagagtgaatccacggcactgcgggggcaacaataa

SEQ ID NO: 244203 - DNA, 444 bp, Klebsiella pneumoniae
atgcgtaccaatacgatccggcgccgatgctcagctgcggccgtcatttatgaactccttaatcccataccttatggttttttctgcgcggcgttaatttttgatgttatttatctctatagcaccaatgtgatgtgggaaaagagtgcggcctggttaattgcgctggggcttattttggccattattccccggctgattaatctttttcaggtgtgggtcgggcagtcatcgccgactctctcagcggtgaagatcaatttctggttaaacgttgttgccatcatttcagcaattctcaacgcctttgttcatagccgcgatgcctacgccgtggcgccgcagaacgtggtttattctgcgatcacggtggcctgcttactgatcgcctcgttggttttgtcatgcagcagggaagaaaaaagaggtgaacgccatgtataa

SEQ ID NO: 244204 - DNA, 1305 bp, Klebsiella pneumoniae
atgtataaacatttcctgattatgccactggccttcgcgcttgccgccgttctcagcggctgcgatgaaaaagcaaaactgacgccggaccagcaaatcggccccgacccgcttttaccgaaagcgcaggatttcctcgtgccgccgatgcaggtgccttccggggtgggctggaaatcagggatggcccccaaagtggcggccgggctgaaaattgagaacatcgccagtggtctgatgcatccgcgccaggtgtatgtcttaccgaacgacgacgttctggtggtcgaaagcaacagtccgggaagcgaaccgctgaccacgccgaaacagcttattgccggcatcgtaaaaaatcagtcaggcaaaggcggaaagggcgggaactcgattaccctgctgcgtaaaggccccgacggctggcagaagcatctgttcctgcaacatctgcattcgccgtttggcgtgcaactgatcggcgataacctgtacgtcgccaataccgacagcattatgcgtttcccctatcggacaggggaaacgtcgattagcgcgccgggaactgagcttgccgatcttccggataagatcaaccaccactggaccaaggcgctgctggccagtccggacggtaaaaagctgtacgtcggggtcggttcgaacagcaacatcaccgaaaatggtatcgatgtcgagtatcgacgcgccaacgtgctggaagtggatgtcgccaccggcgccagccgtattttcgccagcgggatccgtaacccgacgggcctgcagtgggagcctcacagcggcaaactctgggcggtggtcaatgagcgcgatgagatcggcgcggatctcgtgccggactatatgacgtcggtgcaggacgggggattctacggctggccgtggagctattttggccaacatgtcgatcgccgcgcccaaccgctgcgtccggatatggtggcgaaggcgattaaacctgactatgcgctgagctcgcacgtggcgccgctgggcctgtggttctacaccggtacgctgctaccgcagaaatatcagggcggcgcgtttatcagcgagcacgggagctgggaccgttcgccgctgaacggctatcaggtctctttcgtcgcctttaaagatggcaaaccgacaggcaaacccgagtcggtagtgagcggctttgtctccgatgatgagaaagagctgtatggcgcgccggttggcctggctcaggacaatgaaggcgccctgatcatcgctgacgatgtcggcaacgccgtctggcgcgtcactgcccgctaa

SEQ ID NO: 244205 - DNA, 516 bp, Klebsiella pneumoniae
atgcctgaatatatctatctgttctcacagaaacgcagttgctggttaatcattgccggcagcgcgttattaatgggcgcgctgatgttattttttgccgcccgcggcctgattgccgctgaccgcatcggctatgaggaatatgcgctatgcggcatcgtggctgccggcatggtcggcgcttatgcccccgaaagccgcctgcgctacggcgcgctggcgctgtggtttatcagcaccttcgaggggttacgcctctctctggagcagtttctgagtccggtttctgccgtggaagagctgagtgacggtatgccaaaactgctgccggtctggcttatatcgctgaatgaatttatgcacgccaatatcctaaatcctattgccagcaattccgacaggtattttctaccggaagagatagccaaatggctgctgttattttttaccttccatttggtgatcgccattctgaccacgttttcccaactctcttctttcaaatccgcgcgttga

SEQ ID NO: 244206 - DNA, 276 bp, Klebsiella pneumoniae
atgcatatccaaaccagtattctgatttcaattttgtctaaactcgccaaaatatatccatgctgtgcggacgaacagcgctatcagcagtatgttgctgaggaagccagcgagacgatatttattggtcacttgctgtatctggcagaaaagggcctgattgagaccgatctgcactgggacctggaacgtcggcaatatcagctgaatccgggcctgttgcggattaactgttacggcctcgacctgctgaaagagcaggcgagggggctatag

SEQ ID NO: 244207 - DNA, 774 bp, Klebsiella pneumoniae
atgaaagatgaacatagctcgagccgtcgccctatttgtgaagttgttgcggaaagtatcgaacgattgatcgtggatggcgtgttaaaagttggccaaccgcttccgtcagagcgtcgcctgtgtgagaagctcgggttctcccgttcggctctgcgtgaagggcttaccgtgctgcgcggccgcgggattatcgaaacggcccagggccgcgattcccgcgtcgcccgtctgaacaaaatgcaggacaccacgccgctgatccacctgtttaactcgcagccccgcaccctgtacgatctgcttgacgtgcgtgcgctgctggaaggggaatcagccaggcttgccgcccagctagggactcaggctgattttgtgctgatcacccgttgttatgagaagatgatggccgccagtgaaggcgataaagaaattaccctcattgaacacgcccgcctcgatcacgcctttcatctggcaatttgccaggcatcgcataaccaggtgctggtgtttaccctacagtcgctgaccgatttgatgctcaattccgtctttgcctgcgtgaataacctgtatcaccgtccggcgcataaaaaacagatcgacagacagcacgcgcgggtttaccacgccgtgctgcagcggctgcccaaagtcgcccagcgcgccgcccgcgaccacgtcatgaatgtgaaaaaaaatctccatgacattgagctggaagagcagcgtcttattcgttccgctatgcgtctggagggctggagctag

SEQ ID NO: 244208 - DNA, 1500 bp, Klebsiella pneumoniae
atgaacatcttatacgacgagcgccttgacggcgttttacccgatgtcgagcggacatcggtgctgatggcactgcgtgagcacgtccccgacctggatatactccatagcgatgaggagatgattccctatgaatgcgacgggttaagcgcctaccgtacgcggccgatgctggtggtcctgccaaaacgtctcgaccaggtgagcgctattctgagcgtttgccaccggctgaaggtcccgctggttacccgcggcgcgggaaccggtctttccggcggcgccctgccgctcgaaaagggggtcctgctggtgatggcgcgctttaatgagatcctcgctatccacaccgccgggcgccgggcgcgggtacagccgggcgtgcgcaatctggcgatttctcaggcggtcgcgccttacgatctctattacgctcccgatccctcttcccagattgcctgctctatcggcggtaacgttgcggaaaacgccgggggagtacactgcctgaaatatggcctgaccgtgcataatctgctccaactggaagtgttaaccctcgagggcgaggcgctgacgctcggctccgacgcgctggattcccccggctttgatttactggcgctgtttaccggttctgaaggcatgctgggggtggtgacggaggtgacggtcaagctgctgcccaagccgccggttgcccgggtgctgatggccagcttcgactcaatcgaaaaggcgggcctggccgtcggcgatattatcgccaatggcatcattcccggcggcctggagatgatggataacctctctatccgcgccgtggaggattttatccatgccggctatcctgtcgaggcggaggccatcctgttgtgcgagctcgacggcgtggaatccgacgtgcaggaggactgcgagcgggtcaacgagatcctgctgcgggccggggcaaccgatgtccgcctggcgcaggatgaagccgagcgtatccgcttctgggccgggcgcaagaacgccttcccggcggtggggcgcatctcgcccgattactactgcatggacggaaccatcccacgtcgcgcgctaccgggggtgctggaaggcatcgccaacctgtcgcgtcgctacgatctgcgggtggcgaacgtcttccacgctggcgatggcaatatgcatcctctgattctgtttgatgccaacaaacccggcgagtttgaccgcgccgaagtcctcggcggcaaaatccttgagctttgcgtgcaggtgggcggcagcatcaccggcgaacatggcgtcggccgtgaaaagatcaatcaaatgtgctcgcagttcaacagcgatgaaattaccactttccatgcggtaaaagcggcttttgatcccgatggcctcctgaaccccggcaagaatattcccacgctgcaccgctgtgcagaatttggcgccatgcatgtccatcatggccacctgccttttcctgaactggagcgcttctga

SEQ ID NO: 244209 - DNA, 1053 bp, Klebsiella pneumoniae
atgaccggcgaatgtaattacagccaagagctgctggaacaggtgaacgatgccatcggcaataaaacgccgttagcgattcagggcagcaacagcaagacctttctggggcgtgagacctgcggtcagctgttggatgtgcgttatcaccgcggcattgttaactacgatcctaaagagctggtgattaccgcccgcgccggcacgccgctggcggaaattgaacaggcgctgggcgatgcggggcaaatgctgccctgcgagccgccgcactttggcgcaggcgcgacatggggcgggatggtggcctgcggcctggccggcccgcggcggccgtggagcggggcggtgcgcgattttgtgctggggacccgcgtcattaccggtcgcggcaggcatctgcgttttggcggcgaggtgatgaaaaacgtcgccggctacgatctctcgcggctgatggcgggaagctacggctgcctcggcgtgttaaccgaagtttccatgaaggtgctgcctaagccgcgggcgacgatgagcttacgtctcgattataacctgcatgtggcgatgggcgagatcgccaagtggcagcagcagccgctgccgatcagcgcgctgtgttattacgataatgcgctgtggatccgtctggaagggggcgaaggttcggtgaaagcggcgcgcgagcggctcggcggcgagacggtcgccaatcagttctggtggcagctccgcgagcatcagctgccctttttccgcctgccggcgacgctgtggcgaatctcgctgccgatcgatgcgccgatcgtcggtttcccgggcgagcagttgatcgactggggcggcgccctacgctggctgaaatccgacgccgatgccgggctgatccgcctgatggccgcggaggccggcggctacgccacccgttttagcgccggcgatgacggcttctcgccgcttgccgcgccgctactgcactatcaccaacggctaaaaatgcagctcgaccctcacggcgtgtttaatccggggcggatgtacgcggaaatataa

SEQ ID NO: 244210 - DNA, 1239 bp, Klebsiella pneumoniae
atgcaaaccaatcttaatgaagaaatgcggcacaacgcgcgcgcggaagaagccgaaagcatcctgcgctcctgcgttcactgcggcttctgcacggcgacctgcccgacctatcagctattgggcgatgagctggacgggccgcgcgggcgaatttatctgatcaaacaggttctggaaggcaacgaggtcacgctaaaaacccaggagcatctggatcgttgcctgacctgccgcaattgtgaaacaacctgcccgtcgggcgtgcgctatcacaatctgctggatatcggccgcgaaatcgtcgaagagaaggtgaagcggcccctgccggagcgcatgctgcgggagggattgcggcagatcgtcccgcggccatcggttttccgcgcgctcacccaggtgggccaggtgttccgcccggtgctgcccgcggtgctgagggccaagctgcccgcggcggcgacggtggcgaaagcgcgcccgccgcagcgccatgcgcgccgggtactgatgctggaaggctgcgcgcagcccacgctgtcgcccaataccaacgcggcgacggcccgggtgctggaccagcttggcatcagcgtgcagccgattgcccaggccggctgctgcggcgcggtggattatcacctgaatgcgcagcagaaggggctggcgcgcgcaaagcagaacattgatgcctggtggccggggattgaagcgggggctgaggccattttacaaacggccagcggctgcggcgcttttgttaaagagtatggccatctgctgaaagacgatgcgcggtacgcggaaaaagcacgccgggtgagcgagctggcgattgatttagttgagctgctgcgcaacgagcctttggaaaacctgcgcattcgcggagacaaaaagctggcattccactgcccctgcacgctgcagcatgcgcagaaactcaatggtgaggtcgaaaaggtgctgacccggctgggattcagtttaacggcggtcccggatagccacctgtgctgcggttcggcaggcacctattccattacgcatcccgagctgtcgcgtcggttacgggataacaagatgaacgcgctggaaagcgggaaacccgacctgatcgtcaccgcgaatatcggctgtcaaacgcatctggccagcgccgggcggacgcccgtgcgccactggattgaaattgtagaagaagcccttgaacaggaacagcacaatgaagactaa

SEQ ID NO: 244211 - DNA, 420 bp, Klebsiella pneumoniae
atgaagactaaagcgatcctcagccagcagctggctgccccgataattgccgcgggccatgaagaagcattgaaacacaactggtcggttgcccttgcggtggtggacgacggaggccatccgctggcgttaacccgcatggatagctgcgctccgatcgccgcctatatcgcacaggagaaagcgcggaccgccgcgctgggccgccgtgaaacgcagggatatgaagagatggtgaataacggtcgcaccgcgtttgtgaccgcgccgctattaaccccgcttgaaggcggcgtgccgattatcgttgatggccaggtcatcggcgcagtaggcgtgtccggcttaaccggcgcgcaggatgcccaggtggcgaaagcggcggtcgcgggtctggtaacggcaacgaacgagtcataa

SEQ ID NO: 244212 - DNA, 2178 bp, Klebsiella pneumoniae
atgagtgagatgataacccagggcactttacgcgttgacgccgattttaagcgctttgttgatgaggaggtcctgcccggcaccgccgtgcagcccgtggcgttctggcgcgatatcgaggcgttaatccacgacctgaccccggaaaaccgcaaactgctggcggagcgcgatcgtattcaggcggcgctggataactggcaccgcacgtttcccggtccggtgagcgataaggccgcctataaatctttcctccgcgagctggggtatctggtgctgccgccgccgcgcgtcgaggtggcgacgaccggtattgacgaggagattagcgggcaggccgggccgcagctggtggtgccggtgatgaacgcccgctatgcgctgaatgcggcgaacgcccgctggggctctctgtacgatgcgctgtacggcagcgatattattccccaggagacggtgtccggcagcggttacgatccggttcgcggcgcgcaggtgatcgcatgggtacgccgctttcttgacgaggcgctgccgctggagaggggcagctaccacgatgcgctgggctttaccgtggcgcaggggcaattgcgtattcagctgcgtacgcaaggcgaaacgacgttacgcaccccggcgcagtttgtcggctatcgcggcgaagcgacggcccctgaggtgattttgctcaagaatcacggtttgcatatcgaactgcagattgatgccggagggcgaatcggtcagggcgatccggcgcatattaatgatgtgattatcgagtcggcgatcagcaccattcttgactgcgaggattcggtcgccgccgtcgatgcgcaggataaaatagtggtgtatcgcaacctgttggggctgatgaccggaacgctgcaggagacgctcgccaaaaatggccagcaaatcgtgcgtcggctcaatgacgatcgccgctacaccgccgccgacggctcggccctgacgctgccgggccgcgctttgctgtttattcgcaacgtcggccatttaatgaccactcccgttatccaggatcgcgccggccgcgatattccggaagggatcctcgatggcgtcatgacgggcgccatcgccttacatgacctgcagcgcaggaaaaattcgcgcgccggcagcgtatatatcgtcaaacctaagatgcatggcccgcgcgaggtggcgttcgccaacctgctgtttacgcgtatcgaggcgatgctgggaatggcggaaaatacgctgaaaatggggattatggacgaggagcggcggacttcggtcaacctgcgcagctgtattgccgaggcccgtcaccgggtggcgtttattaacaccggctttctcgatcgcaccggggatgagatccattcggcgatggaggcgggggcggtgctgcgtaaaaatcagatgaaatcgaccccgtggattaaagcctatgagcgtaataacgttctctccggcctgttctgcggcttacgcggccaggcgcagattggcaaagggatgtgggccatgcccgatatgatggccgcgatgctggaacaaaagggcgaacagctgcgcgccggggccaataccgcgtgggtgccttcgccgacggcggcaacgctgcacgcgctgcattaccaccagatcgatgtccgcaaggtgcaggccgggatcgccgcgaccgatttcagcaccgagtttgagccgctgctggacgatctgctgacggtaccggtgagcgaaggggacgtctggtcagcggaagagattcagcaagagctggataataacgtgcagagtatccttggctacgtcgtgcgttgggttgagcagggcatcgggtgttctaaggtgccggatatccacaacgtggcgctgatggaggaccgtgcgacgctgcgcatctccagccagcatatcgccaactggctacggcacggcgtgctgagccgggagcaggtgcaggtctcgctggagaatatggcgcaagtcgtggataggcagaatgcgggagacgccgcctatcgaccgatggcgacggatttttccgcctccagcgcgtttcaggcggccagcgatctgatttttctcggcgcggaacaaccgaatggctataccgaaccgctgctgcatgcctggcgtttacgcgataagcagcacgcatcgcgctga

SEQ ID NO: 244213 - DNA, 1683 bp, Klebsiella pneumoniae
atgcttacctggaatcaaatgtatacaccgtcaggcagtctgggggtatcagcactgatcgccttaatacccattatatttttctttattgctctggccgtattaagattaaaaggtcacgtcgccgggacgattaccttaatattgtcgatggtaattgcgatttatgcctttcatatgccggccgaaatggcgtttgcggccgctggctatggttttttgtacggtctgtggcctatcgcctggattattatcgccgccgttttcctgtataaactgacggtgatgagcggccagtttgatattattcgcagttcggtgctgtcgatcaccgatgaccagcgtctgcaggttttgctaatcggtttctcgttcggcgcgctgctggagggggccgccggttttggcgcgccggtggctattaccggcgctttgctggtcgggttggggtttagacctttatacgccgccggattatgcctgattgccaatacggcgccggtagcgtttggcgccctcggcgtgccgattttggtcgccggacaggtgacggggattgatccgtttcatatcggcgcgatggccgggcgccagcttccgctgctatcggtgatggtgcctttctggctgattgcgatgatggacggctggaaaggcattaaggagacatggcccgcggcgctggtggccggcggcagctttgccgttacgcagttttttacctctaactatattggcccggagctgccggatattacctcggcgctggtcagcattgtttcactctcgctgttcctcaaggtctggcggccgaaaaataccgaaacgtcgctgagtatggggcagtccgccggggcgatggcgctacagaagccgatttctaccggcccggtcccttctgagtaccattttgggcaaattcttcgcgcctggtcgccgtttttgattctcacgctgctggtgacgatctggacgatgaaatcctttaaagcgctgtttattcccggaggggcgctgtactccctggtctttaatttccagatcccgcatctgcatcagctggtcatgaaaaccgcgccgatcgtcgcgcagcctacgccaatggacgcggtattcaagttcgatccgctctcggccgggggaaccgccatttttattgccgcgattatctcaatgtttattttaaaggttgaggtaaaaaaagccgtctgggtatttggcgagacgctggtcagcttaaaatggcccatatggtcgattggcatggtgctggcctttgcctttgtgaccaactactccgggatgtcgaccacgctggcgctggtgctggcgggaacgggggcgatgtttccctttttctcgccgttccttggctggctgggcgtgtttcttaccgggtccgatacctcttctaacgcgctgttctgttcgctgcagtcaacgacggcacagcagatccacgtttccaatacgctgctggtggcggcgaataccagcggcggcgtaaccggaaaaatgatctctccacaatctatcgccgtcgcctgcgccgccacgggaatggtggggaaagagtcggaactgttccgttttaccgttaaacatagcctgatcttcgcctgcattattggcgtcattaccttgcttcaggcatacgtctttacgggaatgctggttcattaa

SEQ ID NO: 244214 - DNA, 1245 bp, Klebsiella pneumoniae
atgtcttacgataagcaacgttcggcgctggattatcatcaatatccgcaaccggggaaaataagcattgccctgagtaaaccggccgataatgccgagcatttagcgctggcgtatagtccgggcgtcgctgaaccggtgcgggaaattgcgcgggatccggaaaatgcctggcgttataccggcaagggcaatcaggtggcggtgatttccaacggtacggcgattctcggattaggcgatttaggttctttggccagtaaaccggtaatggaaggtaaagcgctgctgtttaaacgctttgccaatattgatgcgattgatattgaaattaataccaaagacccggcgctgtttattcagaccgtgacacagatcgccgatacgtttggcggtattaatttagaagatattaaagcgccggaatgttttgaaattgaacggctgctaaagcaatcctgcgccattcccgtgtttcacgacgatcagcacggtaccgccattgtcaccgccgccgggatgctgaacgcgctggagattcaggggaaaaccctcgccagcgctaaaattgtctgcctgggtgccggcgcggcggccatcgcctgcatgcggctcctgcgtcagcttggcgcgcaggcggagaatttgtatatggtcgatcgcgccggggtgatctacgccgggcgcgccggcgttaaccgttttaaggaagagtttattaacaacagtggcccgcgcaccctgcgggaagcgatggagggcgccgatgtctttttggggctctccggggcggatctgcttggcgccgatgatttacgcgcgatggcggaaaaaccggtggtatttgcctgttccaacccggacccggagattgcgccggcgctggcgcacgctacgcgcagcgatatgattctggcgaccgggcgttccgactaccctaaccaggtgaataacgtcctcgggtttccgtttattttccgcggcgcgctggatgtccgcgccagggatattaaccagccgatgatgatcgccgcggtgcatgctctggcggcgctggcaaaagagccggttccggaagccgtgctgcgcagcagccaaagcggggcgctgacgtttgggccggagtatatcctaccgaaaccgatggatgagcggctgttgggacgaatcgccgacgcggtggcccaggccgcggtagccagcggcgtcgcgcagttggattatccggcgcattatccgttatag

SEQ ID NO: 244215 - DNA, 1272 bp, Klebsiella pneumoniae
atgtccttcaatgcccaatcgtttctcacgggattatttaccaccgccattgccgccgctcatccgcgtcagaccctgaagccctacctgcccgcccccaccggcggcagaacgctggtgatcggcgccggtaaagccgccgccgcgatggcggccgtcgtggaggaagcgtggccaggagagctcaccggcctggtcgtgaccccctacaaacatggcgtcagctgccagcgaattgaagtggttgaagcggcgcacccggtcccggacgatgccggcgaacgcgtcgcccgtcgcgtattagagatggtcagcggcctcagcgcagaagaccgggttattttcctcctctccggaggcggttcatcgctgttagcccttccctgcgcggccatcactatcgaagataagaaacagatcaataaagcgttgttacgctccggcgccagcatcagtgaaataaactgcgtgcgtaagcatctctccgccatcaaaggaggacgcctggcggcggcctgctggccggccagcgtctacacctacgccatttccgacgtccccggcgatgaccctgcggttatcgcctccggcccgacgtggggagacgccaccacctctgctgacgcgctggagatcgtcaaacgctatgccattcagatccccgctcacgttcatcagtggctgtcagatccgcaatctgaaaccgttaagcccggcgatccgcgtctggcgcgcagccactatcagcttatcgcgacgccgcaaatggccctcgacgcggccgccagctatgccagagctgcaggcatcacgccaatcattctcggtgacctggagggggaatcccgcgaagttgcccgcgtacacgcggggattgcgcggcaaattcagcgatatggccagccgattgccgcgccggcggtgattatctccggcggtgaaaccagcgtcaccgtgcgcggcagcgggcgcggcgggcgcaacgccgagtttctgttaagcctgaccaatgaactcaaagggcatccggggatctgggccctggctggcgacaccgacggcatcgacggttcagaaaacaacgcgggggcgatcatgacgccacaaagctggcaacgggcggcatcgatcggcctcagcgcacgccatgagctggataacaataacggctacggctacttttccgcgctgggcgacctgattgtcaccgaaccgacgcgcaccaatgtcaacgacttccgggcgattcttattactcagcccgattgctga

SEQ ID NO: 244216 - DNA, 894 bp, Klebsiella pneumoniae
atggcacgtattggatttatcggaaccggcatcatgggcaaacccatggcgcagaatctgcaaaaagccggccacaccctgctgttctctgaacattaccggccggctcccgccgagctgctgggcgaatacggtatcgccctgccgacgccgcaagcggtggccgaggatgccgaattcatcattattatggtgccggatacgccgcaggttgcagaggtgctttttgccgatggcggcgtcgccgaggggctgggcagcggcaaggtggtgattgatatgagctcaatttcacccggcgcgacgaaagggttcgcggcgcgggtgaacgcgctgggcgccacctacctcgacgctccggtatccggcggcgaagtcggcgcgaaggcggcaaccctgtcaatcatggtgggcggcgatgaggtcaccttcgcgcgcgcgctgccgctgctgcaggcgatgggcaaaaacatcacccacgtcggcggcaacggcgacgggcaaactgccaaagtcgccaaccagattatcgtcgcgctcaatattcaggcggtagcggaagcgttagtttttgcagcgaaaaatggcgccgatccggccaaagtgcgcgaggcgttgatgggcggattcgcctcatcaaaaattctcgaagtccacggggagcggatgatcaaacgcacctttaaccccggatttcgtatcgcgctgcaccagaaggatctcaatctggcgctggctggcgcaaaagaactgggcctgaatttgcccaacacggccaatgcacagcaggtctttagcacctgcgtcgcgctgggaggcgccgagtgggatcactcggcgctggtaaaaggactcgaacatatggcgaatttcgccattgacggtcagaaatag

SEQ ID NO: 244217 - DNA, 783 bp, Klebsiella pneumoniae
atgccacgttttgctgcaaacctgtccatgttgtttacagaagtggattttatcgaacgcttttccctcgccgccagcgctggcttcaagggggtggaatatctcttcccctacgattacagcgcggcgcagctcagggcgctgctcgatgagcatcagctcacccaggtgttatttaacctgccggccggcgactggaacgccggcgaacgcggcatcgcctgcctgccggagcgggtggcggagttccgcgatggcgtcgaacaggcgattctgtacgcccacattctggggaatagccaggttaactgcctggccggcattaagccgcaaggctatgacgatggggtcatcgcgacaacctttatcaacaacctgcgttatgccgccgacaaactggcgcaggcgggtatcaggctggttatagagccggtgaatacccgcgacatccccggtttttacctcaaccacacccgccaggcgctggagatcgtcgaccgggttaaccacccgaatctgtttatccagtatgacatttatcacatgcagattatggaaggcgacttagccagaacgctgcaggagaacctggcgatcatccatcatgtccagctggcggataatccggggcggcatgagccgggcaccggcgaaattaactatccgtttctcttcgcccatctggaggcgattggctatcaggggtggatcggctgcgagtacaaaccggccacgacgacccaggcgggcctgagctggatgaacgcgcacactatttcttaa

SEQ ID NO: 244218 - DNA, 1776 bp, Klebsiella pneumoniae
atggcaaaaatgagagcaatcgaggcagccgtccaggtaatgcggcgcgaaggggtggatacggcattcggcgtccccggcgcggcgattaatcccctgtacgccgcgatgcagaaaatcggtggtatcgatcacgttctggcccgtcacgtggaaggcgcctcacacatggcggagggctatacccgcaccaacgccggcaatatcggggtctgcattggcacatccggtccggcaggtaccgacatggtcaccggactctactcggcctccgccgattcgattcctctgctgtgcatcaccggccaggcgccgcgcgccagaatgcataaagaagatttccaggcggtcgatatcaccagcatcgtcaaaccggtgaccaagtggacgacgacggtcatggagccgggccaggttccttacgctttccagaaagcattctacgaaatgcgcagcggacgcccggggccggtgctgatcgatctgccgttcgatgtgcaaatggcggaaattgagttcgatatcgatacctatcagccattaccggtacatcgcccggaagcgagccgggcccaggcggaaaaagccctggagatgcttaacgcggccgagcggcctctgctcgtcgccggcggcggcattatcaacgccgacgccagcgaacagctggtcgccttcgcggaaataaccggcattccggttattcctaccctcatgggctggggcacgattcccgacgatcacccgctgatggcggggatggtggggctgcaaaccgcacatcgctacggtaacgccacgctgctggccgccgatgtggtatgcggaatcggtaaccgctgggccaaccgccataccggctcggtcgaggtctacaccgaaggccgccgttttattcacgtcgatatcgaaccgacgcaaatcggccgggtgttcacccccgattttggcattgtctcggatgccggtgccgccctggagcgtttcctggaggtggcgcgcgagtggaaagccgcgggcaaactcaaggatcgtagcgcctgggcccgcgaatgcgccgagcgtaaacggacgatgcaccgcaaaacccacttcgataacgtgccggtcaaaccccagcgcgtctatgaagagatgaataaattcttcggtcaggaaacctgctatgtcagcaccatcggtctgtcgcaaatcgcaggcgcccagtttttacacgtctacaggccgcgccactggatcaactgtggtcaggccggcccgttaggctggacgatcccggcggcgctgggcgtggtcaaagccgacccgcagcgccaggtggtggcactgtccggcgattatgactttcagtttatgatcgaagagctggccgcgggggcgcagttcaacctcccctacatccacgttctggtcaataactcctacctggggctgatccgccaggcgcagcgaaacttcgatatcgactactgcgtccagttgtcgtttgaaaatatcaacgcgccggaccttaacggctatggcgtcgatcacgtggcggtggtggaagggctgggctgtaaagcgctgcgcgtgttcaaccccggcgatattccggcggcgctgcggcaggctcaggaactcatgcggcaatatcgcgtcccggtggtagtggagattatcctcgagcgcgtcaccaacattgcgatgggaacggaaatcaacgcgatcaatgagtttgaagagctggcggaaagcgcggccgatgcgcccacctccgttccaccgtttaactga

SEQ ID NO: 244219 - DNA, 921 bp, Klebsiella pneumoniae
atggggcgctacactgaactgaatacatttgtgcaggtcgcggagaaggggagctttgcggcggccgcggtcaatgaaggcgtgaccccggcgattctggggcggcggctggatgcgctggagaaacgcctcggcgttaagctgatgcatcgttcaacccgcggactcaagctgaccgaagccggagaacgtctgctggaccgcgcgaaaatcgtgctgcatgagttcgatgaagttgagggggatattagcaacagcaacctggcggtgaacgggcagctctccgtatcggcgccggcggcgtttggccgtcgccatattgcgccgcatgtctacgctttcaagcagcgctatccggagcttaaccttaatttcaactttaccgatacggttctcgatctggtcaacgatggttttgatatgagtatccgtatcggcgagattctggatcccacctatgtggcgattaaacttttccccaatcagcgggtggtgtgcggtaccccggaatattttgcccgctgcggtatgctgcactcgcttgatgatttagcacagcataactgcctggcctttagcatgcagggcgggcaacagcgcggctggacgttccagaatcaggggcggcaggtggcgatcaaggtccgcggcgacctggcatgcaatgatggcgagcttttactgtcgtgggtaaagcagggattggggatcggctggcgttcgacctgggagattcatggcgaactgcagcgcggcgagctcattacggcgctggatgagtatgcgttgccggcatacaacatccaggccgtttttccccaccaacgctatctgccggcgaaggtgagattatttatcgattatctcaaggcactgtatcagactccggggtattgggacaaatcttacccgctgatctga

SEQ ID NO: 244220 - DNA, 1269 bp, Klebsiella pneumoniae
atgtcccttaacgactcaaaaatccgcaacttaaaaccatccgcaaaacccttcaaagtttccgattctcacggtctgtatcttcttatcaaacccggcggctcacgtcactggtatctcaaatatcgtataaacggcaaagaatcccgcattgcactgggggcctatcctgccgtctccctgtccgacgcccgccagcagcgcgacggtatccgtaaactgctggcgctgaacatcaacccggtaaagcagcgggccgcagaacgcggtgcctgcccaactgagaaggtgtttaaaaccgtggcgctggcctggcataaaagcaataaaaaatggtcgcagaataccgctgaccgtctgcttgccagcctgaacaatcatgtctttccggttgtcggacatctgtcagttaccggacttaaaccccgtcatttcattgatctgctgaaagggattgaagaaaaaggtctgctggaagtcgcgtcccgcacgcggcagcacgtcagtaatatcatgcgccatgcggtccaccagggattaatcgataacaacccagctgcaaaccttgacggcgtgacggcaccacctgccagacggcattatcccgccctgccgctggagcagttgcctgaactgcttgaacgcattgaggcatatcatcagggccgtgaactgacccggcttgccgtcctgctgacgctgcatctgttcattcgctccagtgaattacgtttcgcccgctggtcggagattgatttcagaaaccgggtctggacaattcctgccactcgcgaggccattgcaggtgtgcgttattccgggcgcggtaccaaaatgcgcactgctcacatcgtgcccctctcagaacaggccatcgccattctgaaacagataaaggaaatatccggtgtttatgaattggtcttccccggcgaccataacccgtacaagccgatgtgcgaaaacaccgtcaataaagcactgcgcctgatgggatacgacacgaaaaatgacatctgcggtcatggtttccgggcaatggcgtgtagcgccctgatggaatccggtttatggtcgcaggatgcggtagagcgccagatgagccatcaggagcgcaacaccgtgcgtctggcttacattcataaggctgaacatctggaagcccgcaaggcaatgatgcagtggtggtctgattatctggatacgtgtcgggagctttatgtgccaccttatatccggggtcaggaaaacagcaatgccgcaacctga

SEQ ID NO: 244221 - DNA, 657 bp, Klebsiella pneumoniae
atggcggtgatcaatgccaaacgcgtataccgcatcatgcgtcagaatgcgctgctgcttgagcgtaaaccggaaataccgccatcgaaacgggcgcatacagggaaagtggccgttggagaaagtaaccagcggtggtgctctgacggcttcgagttcagctgtgataacggtgaaaaactgcgggtcacgttcgcgctggactgttgcgatcgtgaggcacttcactgggcggccagtaccggtggatatgacagtgaaaccgtgcaggatgtcatgctgggtgcagtggagcgtcgcttcggtaacagcctgccgacatcccccgttgagtggctgacagacaacggttcagcctaccgttctcatcagacgcgtcagttcgccagaatggtaggactggagcctaaacatacggcggtacgtagcccggaaagcaacgggatggcggagagcttcgtgaaaacgatgaagcgcgattacatcagcgtcatgccaaagcccgacgggttaacagcggtaaagaaccttgcggaggccttcgaacattacaacgaatggcatccgcacagtgcactgggatatcgttcgccacgtgaatatctgcggcggcgaaccagtgatgggttaggtgataaaaagtgtatggaaatatag

SEQ ID NO: 244222 - DNA, 900 bp, Klebsiella pneumoniae
atgctcgacttcattagagacctctatgcatcattcaaacaaacatcattagaaagggttaaaagccctgtacttggtgcttttgtgttttcttggattggattcaattggaaaattctagccattttgtttttgagcaaagatccaattgaaaaacgcatcatatatatagaccaaaattttgacatattccttaatcttttaggaacaatttccattactattcttatatgtacttttttaccaatcgccaacaaattagtaaccagaattcaagacaaaccaaacacagatactattagactcaagctcacctcacaaattaaaatagcaaagcatcaacaaagaattgctgaaatagaagcaaggaaaaaattagcagaaaaaaaagaggataagttcattgataatcagatataccaaatgaaacaagaaaacattacattaaagagagaaatagaaactcttaacgagaatatttccacattgaacacatcactaaatcagagctttgtaacagagaatcactataaagagatgtcagacaaagctgaggtaataattaatggattgaaagatcaaatatctgaacacatgcgctcagagagaacacttcaaaccgagattattaaaaaagaagaaataatcgccaacatttcaaacagtataaaaagcgactctgagcaaattgcaaaatactcaagcgagattaaaaagaaaaatgaaattattagcagcatgaaagttagcttaaagctacaagatgaaaaagtaaaattacttgtcaaatcatatccaaaatacttcaatattacatcaattaatggtatttcatcacttgaaataacacataaccttataaaggattatatggataaatatattgacgcatcaatttaa

SEQ ID NO: 244223 - DNA, 669 bp, Klebsiella pneumoniae
atggccgaactctctccgaaacagcattacctcaaacacctggggcagctcaaaaatgagcgcaccagctttgaggagcactggcgcgaactggcggaatttatcgatccgcgcagcacgcgctttcttacgacggagagaaacaacggtagcaagcgtaatacccgcatcgttgaccctaccgcctccaaagctgcccgcactctgcaatcaggcatgctttcaggtatcaccagcccaacccgcccatggtttaagctggcaacgccggatccggagatgatgcaatatggaccggtaaaacgctggcttgatgtggtcatgaccaggatgaacgacgtcatgaaccgctcaaacgtctaccagtccctgccgattatctaccggcaccttggtgtttttggtaccgcggctatggcggttctcgaagacgacgaagatgtgattcgtactcatcctctgccgatcggaagttactacctgtcaaactcgcatcgtttgtcagtcgataccacgtatcgcgttttctccatgactgcccgccagattgttatgcagtttggcctggacaacgtcagtaacgccgtgcgcggcgcctgggataacgcgaactatgaagcatggttcgatgtggttgaagtggtcaacaaaaactggccaccgagttag

SEQ ID NO: 244224 - DNA, 1086 bp, Klebsiella pneumoniae
atgagaatatttttagatacgaatattttttataataactggttcgttaacaaagcaaactttcaatatctttttcacttcattaacaatgaaggtcacgaccttctgttatcaaacattgttttagaggaaacaaacaacattagaaatagacaagtaaactctaatatggaggaaatacaattaatcattaataaattaaataaattaaattctagaaagattaactttgataaagattccttaggaatatctgattacaatctaattgatgaattaaatgaaaagatcaatgatattataccaattgaatatgaaaatatatcgcacaatgtaattgtgtctcgcctatttaaaaatttaaaaccgttttcctcacaggagaaaggttatcgcgacacattaatatggctttcgtttgttaaacacttaaaggaaagcggacgacgtgacgaggttatattcataactgaaaatagctcagacttttatatcaacaataaagatgaaatctctttccatggtgatcttcaaaaagatctcgaagaagaaaatatatctataaaaataacaccatacaaaaaccttcatgagttcgttaagacacagatagataaagaaacacattcatttgaccacactaaacatgaatccacttttgaagactatgttgaaatcaagagcgttgaattcctagagttattagataacaaacaattaggtatgtatcttgaagactctctttttgagtcaaaactatccaacataaataaaataacggtagatatattagaaggatttgaggacaatagcatcgagagaatatctcaagttgatgaaaataaagtgtatgtatcttatgaattcaatcttcgccgagtgtttataaaaattgaaataccatatttagattatataacaaataaaaccgaaattgattcaaaatatgaagttttaaataacaacgggcaattagtcatgattgaaacattagttagaccatactttgatgttagcttcattttctcaccgcaaacagaagaacttgagtcattctctgtagatcatctctggttaagacgttaa

SEQ ID NO: 244225 - DNA, 957 bp, Klebsiella pneumoniae
atgaaggaaatgactaatagatttactgctgctctaaaagagttatgtcagaggagccatgatgagtgttctctgtgtagatatcgctttaacgaaggtgatacaacccactcaggatatggtctaaatcatgaggaattatatgtttgtgataattgttctgattatttaagtgaagttgcaatacgtagatattattcgcctagaccatatgttctacctgaagattctgttagcttatggaggtatatggatttcaccaaatacatgagtctaattagttctcaaagtatgtattttactcgttctgattgcttctctgatatttttgaaggcgctaaaggttatttaaataacaaagaaggatgggatcgtcattatcatgagttttttattaaagctatatcaaatccacctaaaggatttgatttaaacctatctgaaaaagaaattttagagcgtgcagatagtcttctaaatgatcttgagtgtgctggtataaaacaaaggcagagcacttttataagttgttggcatgagaatgaatatgagtcagaggcgatgtggagattgtattctagctatttaccaaatgcactggccataaaaacaactactggtgatttacttgattcgttaggtcgcgattcatccattaatatcggaagagtgaaatatatagattataaaaatgaatttgcagggatcaatgaatctttctggcgaaaacgtaagtcttttgaacatgaaagagaggttagagcaataattaatgattataaatgtgttggctatgggaaaagtgtgccatgtgatttgaaatgcttaattaataatgtctatctttcaccaagtgctgcagattggttcgtagacttagttcatagtgttaacgaaaaatatggaatttctgcaaatgtaagcaaatcagaaatgattggaacccctttttactga

SEQ ID NO: 244226 - DNA, 288 bp, Klebsiella pneumoniae; identical to SEQ ID NO: 192623

SEQ ID NO: 244227 - DNA, 318 bp, Klebsiella pneumoniae; identical to SEQ ID NO: 192624

SEQ ID NO: 244228 - DNA, 525 bp, Klebsiella pneumoniae
atgcccaacgggtggcacggtgacgaacctcgggggcaaactgattgttttttgtcatcctgttacctctctcgcaaggagtttagtctcaaggagactaggtacggttcagtgagaacgtgttcccagttgaagcaccggtaccagcatggtgctgtgggagcatggtcccagatgaaggtccggttccggtatgcggctgtgggaccgtggtcccagctgaaactccggccctggtatagggctgtgggaccgtggtcccagatgaagctccggtcccggtatagggctgtgggaccgtggtcccagatgaagctccggtcccggtatagggctgtgggaccgtggtcccaactgaagctgaggtcctggcatggggctgtgggaccgtggtcccagttgaagctcaggtcctggcatggggctgtgggaccgaggtccctgttgaatttcagcaccctgcaacacctgttgagttcagactacaacagagatttaattcgacgtagaaattctgaatgttaa

SEQ ID NO: 244229 - DNA, 855 bp, Klebsiella pneumoniae
atggcccgcggtaattccattgtcctgcccgtttgtggccaggaagtgagattttcacttgaagtcattccaggcgattctgttgagagccactcccgggtctggtcaggcaacgaacgtgatcaggaacttctgaccgaagatgcccttgatgacctgatcccctcttttttactaacaggtcagcaaacgccggccttcggccgtcgggtttctggtattatcgaagtcgccgatggaagtcgacgtcgtaaagcggctatcctgacttcaagtgactaccgtatcctggtcggtgacctggatgatgagcaaatgacggcactctcccgtctgggcaacgattaccgtccgaccagtgcctatgagcgtggtcatcgttacgccagccgtctgcagaatgagtttgccggcaatgtctctgcacttgccgatgcggaacatatttcccgtaagatcatcactcgttgcattaatacagccagactaccaaagtcagtggttgccctcttctctcatcctggtgaactgtcagcccgtgctggtgaagcgctctttaaagctttcgctgataaagaggaattattaaagcagcagacaaaagaactgcatgagcaaaagaaagcgggtgtcatatttgaagctgaggaagtgattactctgttaactgccgttcttaagaaaacgcctgcagccagagtaaaccagagttcccggcatcgatatgttcctggcgcctctgccttgtataagggcgataaagtcattctcagtcttgacagatcgcgcctgccttcagaatgtattgagaagattgaagcgattctgaaggaactcgaagctaaagcgggctga

SEQ ID NO: 244230 - DNA, 1692 bp, Klebsiella pneumoniae
atgcaaaaaaagacaaatgatcaaattattcttgagcatattctcaaagataagaaaagtgagtttgatattgaaataaatgaagccgaacattttgagatatattcggcttcggagattttaaaagattacgacatcacttatgatgatattatgtatagtatcgttggaaatggtggtgatggtgggtttgattcaatctttacatttgtcaatggagaattgcaaaaagaagatacagaattgaatacacaaataagaaagaatcatatcgagttagttgtaattcaatcaaaaacatctcctacgtttaaagaagatgctataataaaatttcgcgaaactgtacaggatttatttgatctttctaatgacatatcaaaattcaaaaaaagatataatccattattaatcgaaaggataactatatttagagatgtatatgcaaaacttgcaaaaacattcccatcatttatcattaaatttttctatgccacgcaaggtatggataatgagattcatcataatgtccttgataaggcaaacaagttgcgtgacgacgtccataaactatttagtggtgccacatttgactttcaatttattggcgccacgactttacttgaaatgagccgtaatattccagccagttcaagaacactggagatttcagagcaacctatcagtacatcggctggaagttatatttgtcttgtgtcattaccaaaatattatgaatttatttgtgataatggtgctttggctagaagtatatttgaatctaatgtcagagattatcaaggtagtgttacggtaaataccgggattcgattaactcttcaaaatttaaattctgacgatttttggtaccttaacaatggggtaactataatcacgccaaaagcagttagtgcgggtaaacaactaacaattgaagacccacaaatagttaatggacttcaaacatctcatgaagtatacagacatttttcaactcaagattcaacaagtgatgataaacgttcaattttgttaaggataatatgtgaagaaaacgaagaggcacgggatagaataatacgtgcaacgaatagtcaaacagctattctcccagcttcattaaggagttcagacgaaatacataggaatattgaggactacctcaaggcgaatgatttttattacgataggaaaaagaattattataagaatcttggtaagccagcatctaaaattattagcattgcttatttagcacaagcaatgatgaccattgtattatttagaccagatagtgcacgagcaagaccgtcaacattaattaatgctgataatgaatataagaaaatatttagcttagacattaatattgacacctatctgaaagttatattaataataaaagcaactgaaacataccttaaaaacgatgccggaccagatgtaacggatgcaaaaatgattaccaacattaaatattatgttgcaatggtagcagctattatatatttaaaaacaaagacagatatcttgaataaacttgcatccgtatcacaaattgcaatcccttatgaaatcttcagtgaaagccttacaattgttcttaaaaattatcatgcattgggtggtgatgatcaggtggctaaaggaggagcattaaccccagctatccagaaagatataacactatag

SEQ ID NO: 244231 - DNA, 297 bp, Klebsiella pneumoniae; identical to SEQ ID NO: 192628

SEQ ID NO: 244232 - DNA, 669 bp, Klebsiella pneumoniae
atggcggactggtttattgcgactgaaggcgtgaaggtggtgaaggacagcgccagcctgtggccgcagatcatcacggcggtttcatctgcaggcgctgcacttggtggtgtgtgtcttacacatcgtttcacacgcaggcgggaagaacgtgcggcagctgataaggcagcagctgaacgtcgttatatcgctactgaactggtgttcttgcttgaacgctatgctgtggcctgggtggctctggaatatttccttatccatgaattacatgaaaaaaacaaaacacctgttctgaatctttcagtagttaacagcgactggaggaccctgccagcacatctaatattccggctccgcttacttgaaacatatcaagcggatctgttgttacgcatagaacggaagatagttaatgaaaatccaatagtatccgtgcctctctccattgattgtttgaaaatgggcatattcgcttttattctggccgccaaactacgcagagaagttggattgccggattctgtccatctgagaggtaagcaggaagtgtttggcagacttagaagtaggcgcaaattatattggcgcaaaattgtcctgcaaaagaggagagccaaggaaatgccaaatggatctgattacaaggataatgataggttgttatga

SEQ ID NO: 244233 - DNA, 273 bp, Klebsiella pneumoniae; identical to SEQ ID NO: 202469

SEQ ID NO: 244234 - DNA, 222 bp, Klebsiella pneumoniae; identical to SEQ ID NO: 202468

SEQ ID NO: 244235 - DNA, 909 bp, Klebsiella pneumoniae
gtgattaaaaaaatatgcgaagtgattgatggagagtatgtctgtgacattgatatcagtgtggaagaatggaaaactttattaacaaatgataaagtttttgacacaaaaagtattgcagcgttaaaaaaatggtttattgagccaaatcattcctgcacatgcttcgatattggtaagaagtacgacctgcacagcatgagtgctaatggagtcataaacggactgggtggcagagttcaaaaagaacttggtagattcgaggttaaaggtgtcggaaatatcgcatccggtacaaaattcattaccgtaatgaagagtaaagaaatcggcggaaaacccaaaagaaacttatggacaattcgtgaggaacttgttcaggcaattaacgaactggatttttttggtacaacagaaatggccagcagtgagtattactctgacgatgagttgatcaatgccatagagaaaagtaatatctttgacaacgttcagacgtttgaatatacaggggaagccaaaccaaagaaaaatgcaatagaagtaaaaaatggcctctcgtatcccaggagtaaaggcgtatcccaaaatgcgctgaataaagcaggttacagatgtgaagtcgatagtgaccacccaacattcagaaggcgaaattcatccttaaattacacagaacctcatcacattgtacctatgtccaggcaagatgcttttgacacatctcttgatgttgaagaaaatatcatatctctgtgttgcaattgccataaacaaattcaccttggtcagggttatgaagatatgctgaaagaaatatacactgcgcgaaaaaggttattaaaaaaagttggtattgatatatcactggaaaacttgattctttattacaaaatggaaagtaagtga

SEQ ID NO: 244236 - DNA, 234 bp, Klebsiella pneumoniae; identical to SEQ ID NO: 78806

SEQ ID NO: 244237 - DNA, 432 bp, Klebsiella pneumoniae
atgaaaaatatcgtcttagcatcagtgttaggtttgagcttaatttctacggcctgggccactgaaactgtaaatatccatgagcgtgtcaataatgctcaggctccggcccatcagatgcagtcttcttcaactccagccgccatccagggggcagctccacggatggccggtatggatcagcatgaacaggctattattgttcatgaaaccatgaacaatggttcagcagatgcacataaaaaaatggcggaaagtcatcagaagatgatgggaactggcaccgttaacgcttcccgtccggcgacttcgtttgcggcgatgaatgaacatgaaagagcagctgttgcccatgaatttacgaataacggtcagtctggcccccatcaggctatggctgatgcacaccgccgcatgatcaatgcgggctga

SEQ ID NO: 244238 - DNA, 2271 bp, Klebsiella pneumoniae
atgtctaatgttatcgttttcacacccaagcatgaattagatcaacgagccaatctgattgattttataaattttattgagtccaattatccaactctcaatgaaaatattaaatatgaaagtaattactggcctaaagttggtaattttacgaaagtcggggtgagtagtcagtcaagggatgagaaggattgccttcacgtttcaatcattccttttgcaaaagcttacgttagttattctaagatgaataattcgtcaaggaatactaatcagttatacgcgttgagagcgatcgaagatgcatgcgttactgcctatcaaaaagttgacataagtcagctaagcgcgattgactttgatcgtgcagcgcaagttgcaaaggataaaatgggtaagggtgctgcttatcaagcaggaacacatttagtcaaattgcataaatttctgatagaaaagaagataataaaaccttttctatggaaaagccccctcaagaaaccatcagaaatgacagctattggagacgatgctgataaaaggcgtcaggataaattacctgatgaaaatgccttgatggcacttgcagaaatctttgctcaaaaagatgacgttctttcccccagggatgtgtttactacgtctaccatggctctgatgttttgtgcaccagaaagaggctctgagccaatgtatctatcagttgattgcattcacaaagaatcaatgagtattaaaagagcactagaatgtggttatacattggatgagttaaacaacttggttcaagcaagaaagcaatcttctcacgattatctgccaggatcagacaaagcctctttaaatctttatgataggattgagttatacggtcttaaatggttctcaggaaaaaattatggacatgctaacaaatggcttccaagcgtaatgactgaaacagctttgaaggccgttgaacgactaaaatcgctttctgaagaagcgagagattttgctcgaatgttagaaagttcagagttatttcctcggcatcggttatgcccagacgttgaagaaaataccttgttgactaaggatgaggcggttgcagcgttaggtttagatatttcatacatgaccagaaaacaagcaagtacttctggtaaccagttgcttaaaagatttgggatcgagcggaaggattatcaagtttgtttacgagacttgaataaattaatcaggaagaatcttccagaaggctttccattcataccgtttaaaaatggtaaaggtatggttaagttacgttggtcagatagcctttatgctggttttaaaaactcactacacagtgataaatcaacaatttacactgagttagtggttccgacaataaacacgttaaacgaagatttgtcgccaaccaagaagaaaaacagaataactcaagaactatcatcaggtagcctgtcagtttttcaacggtggggaaaaggcaaccttgtgatgacatcacatcagctccgacatatgttggataccatagctaatgtgaatgggttagatggtgaggccagagcaaagtgggcacagcgatcagatcctaaacacaatcgattttatgatcatactaccccagaggagtacggggaggatttattagattatcaggaaggaggtaatcaattatccgagataggaagtaaaggtgatatccccgttcagttttatgtcgctactcctcggactattcaggagctaaatactaaagctagtctatcagcacatacaactgaatttggtatgtgtatcagttcctatttaagcgaaccttgcgaaaagcatcgtgactgtattaactgtaacgagcacgtttgcgttaagggcgatgatggaaagtgtgatcgtatacgagataagctggagcgagaagaaaagttgctgcttaaggataagcgagctgttgatgatggcgttaacggtgccgagcagtggttttatcgtcgcaatgtgacagttgagcgatgtaaagagcttgtatctatgctgactgaccccaacattgaggacggtgcattggtgaaattagcagatgtagaggatgtaagcttacttgaccgggcgatggatgcaaatggtaaaaagaggctgcccaagataactaattacaacagggtcaaacatctggatgttgatgaatttgttggtgataaaatattaaacctagaagaacctgatatagatgtagtggattttgatggtcttgattatttagaggattttctctga

SEQ ID NO: 244239 - DNA, 1572 bp, Klebsiella pneumoniae
atgtcaaaattcaagagtgaaagtgatgttaaatcaattatagtcagagatgatgaaccgaggctgggtcaaggtatatcctttcgaggctttgagtttgacattggtgaggattcctggcgcttaagtaaggacgttatagtatatgttagtttcttacgggatcttgaagttaaattaggtagagatgtattagaaactttgctctactttgctgaagggtactcagcttcgtatactcaaagaatggctgtggcattaaagcaattcttcaaggttgcgggctcacctataattagctcgtcggccatattagagtttaaagtaaaggaagataaaggcaaagaacgatacctgctattaataagaacctttcttagacagatgaagtatttacagctagactctgaagtccctaatgatatttttgaattgatggatcagtggaggctgaaaggtggtgaacgcggtgttcctgttctttcactctgtccaataagcggtccatttagtgatatagaatttgaggcaattggtacacaagctgcacatgcttatgcagaaggaaggataactgcgtttgagtattcccttatacttttattcaagtctacggggcgaagacctgatcaaatcagtgggctaaaggttaaggactttgttctttcaaaaaagtatacgtctaagtacatttacgctatacacattcctagagtaaagcagagatctgcaaaattcagatcttcttttcgtatttttggattagttgaaactgttggccaagttttaactcaacatgtaaaagatttggtgagtaatgttgagtctaaaattgagagaaatctttctcaaaaagaaaaagaagaacttccattgtttatcacgccaagaaagttcaaggaaataagtaatatttcagatgatggtttgattttttatttagagtcagagatgtcgcacatgcgcactcagtggttaagagaaatattggaaaacgctgtagataaattgaatattatctccgaacgaacaggtgaacctcttagggcaaacccgtatcgcttccgctacacactgggtactcgtgccgcacgggaaggtgctggcactattacaatagcgactctacttgatcatactgatacacagcatactggcgtatatgttgagaatgtccctgagtttgctattgaaattggtaaagtcatgaatcagtctctgatgcagtatgctagtgcgtttgctggaaaaattgtggcagatgaagatgctatgcttaaggaaaaacctgatgccacaagaattccgtgccacgaaaaagaatgtaatgtcggttcatgcggaactaactccttttgtaccgactatgcacccatagcttgttatttgtgccctaaattccatccttgggcgaatgcacctcatcatcttattcttgagtggttattggaagaacgtaacaagttgaaaaatgaatcagcagacatggctgtggtgacgatcaatgaccgtgcgattattgctgtttgccaagtgattgataaatgcaaggagtttaacgctaatgtctaa

SEQ ID NO: 244240 - DNA, 1386 bp, Klebsiella pneumoniae
atgagagtcaaaaggttcaggtttagctcaggagagagttcctcaatactgctgggagatgatggtatgcccatgctgtatccaaacttgttcatgacgattaatcatcgcaataactcggatgctgcctccacatgtttcaaagtgcttgaaaatataaagtacctttatgagatttgtgagtttattggactagatattgaggaaagatcaaaaactggtaactttctcaaaaagaacgaaatggaaactctggttaaatggtccaaacgtacagtcgcagcttttagggagcacgtcggaaaatgtaaaaaaaagcatgttttacagttaaatccaaatgtcagaaaaattgaatccgccagagcaaacattgttgttgaagatgaaggtgacatatcttcgcataccagctatatgcgtgtgacttgttttgcaaattacattggctggcttgataattatttgcacccctcgaaaatttcaaccagtgaagaacagctaaaattattgagacctaaaaagtttagtgataatggcgatagtgacgaagaagcagagcttgtgattgatttgctggataataatgttcgtgtcagaacagggctaaataattcagctaatagaactcgtaaagatgagtataagtctttcacaaaaagtcaaatcatccgtatattagacgttgttagacctgattcttcagaaaacccatggggtgatgagagtgttagatttagaaatcagttgatcattaatttattatggcatttaggtgctcggcgcggtgagttggcaaaggttagggttcaagattgtagagtttcaagagagaacggagcaaggtttttatatattagaaaggctgatgataaggaagacaaacgaagccataaaccctcaactaaaacattagggagagcagtgccaattaatagtaagcttagcgctatgattgatgattatattataaatcatagatctaaggttgccggtgctgaaaaactgccatacctattaataccacaccaccggggaaagtcagaagatacagctttgtccttggcttcaataaataaaatatgtcatcaaatatcagcagtggttggttttagagttaatccacatgcatttcgtcactcttggaatgatgcttacagcaaaatggctgatggcaaaataaaaagtggtaagagcacagaagcaaaaacagaaagtgatcgccggaaactgatgggctggcatgaaggatccaagatggctcagaggtatagtaagcgacatgattcaaaacgggctttccaaagtggacttgaacttcaggaaaatggagtgacagaagtagataatatagttggcggttatgatgaagacatcctaatttag

SEQ ID NO: 244241 - DNA, 144 bp, Klebsiella pneumoniae; identical to SEQ ID NO: 183230

SEQ ID NO: 244242 - DNA, 1020 bp, Klebsiella pneumoniae; identical to SEQ ID NO: 183229

SEQ ID NO: 244243 - DNA, 228 bp, Klebsiella pneumoniae; identical to SEQ ID NO: 183228

SEQ ID NO: 244244 - DNA, 225 bp, Klebsiella pneumoniae; identical to SEQ ID NO: 200780

SEQ ID NO: 244245 - DNA, 870 bp, Klebsiella pneumoniae; identical to SEQ ID NO: 104001

SEQ ID NO: 244246 - DNA, 654 bp, Klebsiella pneumoniae
atggaaagcataaataaaaaaacagaagatataatcaaaagtaaattattatttgttgagggccgagatgaggttttatttttttccgctttattaaaaaaaatagaatttaatgacgaaatccaagttatagctttcagtggcaaggcaaacatgaaaaacttcatttccatgacgtctaaaacggagggatttattgagcgtgtcgtatcgattgcaatagttagagatgctgacaaagactacaaaagtgtagcaactgaagtttcagatacactaaaatgcatattttccattgaaaacacaaaaaatggagaaatgaaagaaaatgaaactatcaaagctggtttttttattatgccgggaaatgaaaagccaggtgaattagaggatttagttttatcatcgttccaaggaaataaagtttcggagaaaatagataattacctagaagagttgaaatcaattacaagaccagacgatgaaaactcacctttcatttatcctaaaaaaacatccaaagcaaaaatacaaatttacttctccagcatggaagagtcagatacaagaatgggaatctcagcagaaagaaaatatgttaacttcgaccatgactcctttactgatataataaaattcattaagactatgtaa

SEQ ID NO: 244247 - DNA, 1107 bp, Klebsiella pneumoniae
atgataaaagaaattgatatatctaactttaagagtataaaaaacattaagttaggcaatttaaagagagttaactttatcgcgggtaaaaacggaagaggcaaaacctcaatccttgatgcgatattcataacaaacgatctaacatcacctgattgccttgtaaaaccaataatatttagaggtggcactcctaaccttgcagcaggtgagttatggcattcatattttagaaaccatatcaaagaaaataaaataaaaatcctaataaatgaatacaatggtgctaaacaagaaacaataatatcaatagaggaaaaacccaaggggaatcaaaatattggactagtaacaagtgatagcctagataaaaacaacatttccccaacttctttccgaggaagtgaatctcttaagatccgcaaatatgacaaaacaaaaaatgaagcttcctctttaagaatagatataacccaacaaattaacggctcgcaaatctcatcgaatgttataaaccatggtggttctctagaacttaaaccaacaacttacatcaccacctcaaatctaataaacaactcaaacacaatattggtcgtaggcaatctaataagaaataaagatcaagcagaaatcattaaagaaatgaaaagaattaacaataaaataacagacatacaaattggtataatcgaaaatactacagagataatttttgatactggcgaaaaaaaacttgttagtctcgcttctatgggagagggaacaggtaagctcctgacgcttttagcgatttcttacaatacaaaaaatggcattattcttatagacgaaattgagaatggcatacactattcattaatgccatcaataataaaattacttaaagaacaatcaattaaaaataacaaccaaatatttatcactactcacagcctcgacataataaacacaatcagtaatctatatacagataaagagatatctgatgaagatatctcatttataaggataggttactccgaaaccaaagatgaaacacttacaagctcattttcgctacctgaagtaaaattatcctctgatgagaactgggagatcaggtaa

SEQ ID NO: 244248 - DNA, 189 bp, Klebsiella pneumoniae
atggacaaacagttgtgcgagtgcacctgcaagcaaaccctgccacagcttgatttttggaaacacctcggcaactacacaatacccaaccgcaaacacgatggagaatatgatatgtgttacgcctacccagttaaacacatgtccggcgaaggtatagacagccgcatttggatcggccagccctaa

SEQ ID NO: 244249 - DNA, 303 bp, Klebsiella pneumoniae
atggctatgtcaggaatgcaccacgacatggctatgccggaacactgcgaacaaaacctcaccatggttcatagcatgattgcgggacacgctatgtccccaatggaagaaattgcctgtgggtactgtcagctactgattcatctgccattcgtccagttcgtgctaacggtaatgctctggctgatgttactttgcgttcgtatccgcttccttctgccggcgattctctgtccgatttttcgcgcctggatacctcagcgcgcccgcgcaccgcctgctgtttttctttctgcgaaataa

SEQ ID NO: 244250 - DNA, 1431 bp, Klebsiella pneumoniae
gtggctgataaacgcaccgcatctttatggtgtcaggccatcagggaagccgcaactccctatacctcttcggaaattctactggatgtcgataaagagtttggaaccaacacaaaatcattatggggtaagatcttcgatttgctgcccatatatgcgattttcaaagccgacagggaaagtagcgatggggattccgaagctaaaaactccttacagcaggccgtaaaagacgctcaggctgcgctgcaggacaaaattacagcacttgaaaaggatattcaggatagtgttcttgatgtcgcacagagaacgttggataaattacgtgaaatggcaccagaacttgccagtgaacttactccgcgatttaaggagaaacccaagtggaccttcaatttcacccttgatggggaaaatggaatccccatcaataagcgaggtagtgggataagaaggcttagcctgctgaattttttcagggctgaggctgagaagaatgtcgtggggacgcccagaaatgtgatttataccatagaggagcctgaaacttcacagcatccgaactatcagataatgctgatgaaagctttactggcacaggcaggccagctgcaccgtcatattatcgtcaccacccatgttccggcgcatgccggattgatccctgtcgaagctgtacgttgtaatgacgaagcagacgcagaaatactgtcgtctatcctcaacattatcagtgataagccgagttatgtttatcgacgcgagtggggcatccggcgcaagcaaagttgcacagagggacaaccatctgtgaatgccaaaagactttacaggataatgagcgtacgtaatctgctgttgttgcatgacaagccagagcgatcgaagcgtgaacataaggccaaaatcacggtagcagaaagcgatatgctcaggtattcagatgactttgagttcgactgctacaagagtgaaaaactgcaggtcacgttcgccctggaatgctgcgatcgtgaagcactgtacagggcggcaagtaccggtggatatgacagtgaaaccgtacaggacgtcatgctggttgcagtagagcgtcgcttcggtaacagcctgccggcatcacctgttgagtggctgacggataacggttcagcctaccgttctcatcagacgcgtcagttcgccagaatggtaggactggagcctaaacatacggcggtacgtagcccggaaagcaacgggatggcggagagcttcgtgaaaacgatgaagcgcgattacatcagcgtcatgccaaagcccgacgggttaacagcggtaaagaaccttgcggaggccttcgaacattacaacgaatggcatccgcatagtacaccggggtatcgttcgccacggaatatctgcggcggcggaccagtaatgggttaa

SEQ ID NO: 244251 - DNA, 486 bp, Klebsiella pneumoniae
atgatgctgctggatacgtgggaacatctttctggccagataagaaaatttaattatatgctggaaaaacttgcccgaaacgatcctgtttgtcagatattacagtccgttccgggtgtgggcgttctgacggcattaagctttaaaacatcaattgatgacccttcgcgcttcagacgtgtcagtgatgctggcgctttcctcgggttaacgcccaaaaagtaccaatccggtgaggtggacaggaatgggggaatttcaaaacagggcaacagaatgacacgcacacttatctatgaagcagcatcctgcttgctgacccgctatggcaaggatacaagtctggctatatgggcaaatgaacttaggcacagaatgggctacaagaaagttattgttgctttggcgaggaaactgacaatattaatgctgagtatgtggaaatcagagactttttataatgaacggcttaaagcggtaaattaa

SEQ ID NO: 244252 - DNA, 1557 bp, Klebsiella pneumoniae
atgatgaatagcaataaaaaaactaataaatacgtaatggtaataatttgtataaccttcacactctctatgttctacctatccacaaaggctgtaatttatattctcaacaagagagatgttgagggttttgcagaatctattctagaaagaagtgttttattcatggagcaaatagagtttgtggaaagtaaaagcaagagtgtaaatgaatcagcagtttgcacaaaagaacacataaaaaagctgcgagaaattctctggcctcaacgttttattaaagacattgcttatgctaatcaaggtacgctcttgtgtacggctttgtggggtgatgacttagcaccagaaaagctcaacaacaattataatagtgtaaagtatggcaaaggtttttggttgcttgatgtaaaacctgggatcttaggaggtaataatatatacgttataaataatttagcaatcataccttcaccattcatgtttgctaggttttcattagattctacaaataaaaaaataagtgcaatagttagtgatgagaaacatcaagctcatatcttctttattggggacaacaccaacgacctttataaagtggagcaccacacacccaaaccgattgcatatataatttcagaaaaatgcaatcatgaatttaatttatgtgcaacatcgggcatgtatatccaaagcgtattcgacatgcctgtattaataaacttattattatttattctttcgttagccttggggttattaatgtttgtaagcattaatcttttcttatctaagaaagatactattgtgtttcgtctcaatcaggcattgaaaactgataagttaaatatagtttatcaacctattctatccatcaaagacaataaagtgataggtgtggaggcattattaagatggtatgataatgaatacgggcgagtatctcctgatatttttatttctattgctgaaaagcatgggcttataagttacgtcacaaagtttgtgatttataaatcaataaaggaaatgcacgaattgataaatactcataaaattgagttgagtattaatattaatacaagcgatctattttcaccattattccatgaggtgctgacaaaagcaaccaatttatataaagttagccctaagctcgttactcttgaactaacagagaggcgttctgatagtatatccttaataaatgagagtttggctaaattaagagtgttgggctacaaaatagcccttgatgattttggtgctggatattctaatttaaactggttatccaaactagaagttgataaaatcaaaatcgacaaattcataacaaacttaatctgtacagactcaattaatgctaatgttctcaacaaaattgtttcaatacttggcgaaacgcataatgaaatcatatttgaaggtattgaaacagaggggcaactctcatacctagtggctaactttcctgatgcgtatgttcaggggtatttttatgccaagcctatgaacattgaggagttaaaaaaatacttagataagaaagcttaa

SEQ ID NO: 244253 - DNA, 330 bp, Klebsiella pneumoniae; identical to SEQ ID NO: 196933

SEQ ID NO: 244254 - DNA, 783 bp, Klebsiella pneumoniae
gtgcatacaagattcaaccatagcaaagattatggtgatcagtttcaatcatcattcacgggatatcagggtgttaaaaataatatagcgtatggggtaaccactatttatgacagacaaaacaatggtggtaactataaatctattggtgctaatggaagcattagaaatgactattcttatctgaatgcgagtatcagtgccggtgatcaccaacaacaattttcagctggtgcttctggtgctttaattgcaacacaggatggtttttttgctacccctgaattaggtgacacctttgctatcatcgaagctccgcatgccacaggggcaaaaatctccaatcaggctggacagccagttagctccaaagggtatgctatagttccatatctcaatccatttacgcaaaactggatagatcttgatcctaacggcgcaggagataatgtggaaatattatcaagcagtacatcggtagttcccgatgcaggtgcagcgatcaaggttaaatttaaaacaagacaaggtattcctttatttttaaatgtgcgtaagaagaatggtgatatcccccctttaggatctaaagtatttaatgagaataatgatatgattggttatattggacaaggagggctcttgtacgccagagttgcaagtggtgaaggagtactaaaagtgatgcttgattttagcaatcaaaaagaatgcaagttacattatatagtcaatgacaaaatggctaaattgggtacacccaaaaacgctaagtgtttttaa

SEQ ID NO: 244255 - DNA, 1023 bp, Klebsiella pneumoniae
atgataatgtttataagactattgcctttactttttttaatgtgttgtcattatctctacgcatcgtgtcagcttctctctggtagcaccattgaatatgctgtaaatatgagcagcaacaatttcacacttaatgtcactaactcaccagtaggaacgttactgtacacttatggtggaatgacaatcaccaataatgctacgtgggatatcaactgtaccgggaatgaacccagtggttataaaagcatcggtggaacacgtgttggttcggcatataacagtaaacctggagatgtttttagcatccctggtcttcctggtatcggatatagttttcaaatgggagagcaggatggtgttaattttgattctttattttacgcataccctaatgcttctccatttaacggagaaagagtattcagcgcagaaaccaaaaaacctactctttatttctggaggattcctgattcatctgggcttcctcctccggggcaatactgttttaatagttatcttggcgatatatatcttgatagcataaatgcaatcagatttagtgtgagtgggctatgcgttactgttaaggctccaacatgtacagtaacgaacattagcaaaaatattaccgttaacctgggcacacataataaaacatcttttactggagtaggggctactacatcagaagtacctttcacaattgctttatcaaattgtcaaaatgtgggttcagtttttatgcagttcaacgctacggctgatcccagtccttcaagcaataatcaaattatccagatagatagctcggggaattctgcttccggaattggtatccaaatactgaatagtagctataaccctgtaacattaaataatccttatcaaatttggtctggcactaaaggcagtcaaagcacatttaattttcagtattatgccagatacatccaaactctttcttctgtaagtgcaggggaagccaatgctgtagccacgtatgtgttaacttacaattaa

SEQ ID NO: 244256 - DNA, 690 bp, Klebsiella pneumoniae
atgaataatgttttttttatattttttttgttagtctattcatgcagcgttgaagcaaatattattatagatggtacaagaataatattcccatcaactaacaaagaaatatcagtgagggtgtctaatgtgggggacatgccttcattagctcaagtgtgggttgatgatggtaaaattcaaaacagtacaagtaatgatactgccccttttatagttttacctccgattgtaagaattgaaccatcaaaaggtcaaacgttccgtttagtttattcaggaatgtctttacctcatgaccgtgaatcggtttattggttcaacctattagacataccacctgaacctaaaaacactgaagaaattaactatttacagttatcaatacgttcaaggattaaaatcttctttaggcccaaagagattcaagaaaaagaaaacaatcctgagaaatctctgtcatggatatttgacaaacaaaaaaacgttattaccgttaaaaacaattcacctttttttataaccattgatagtattactgttaatggagaaaaaatagtaggggctatggttccaccatattcacaaatcgatataaaaaataatggcagtaagtggaatacattaccaaaaaatgtcacctatacaacaataaatgattatggtgctttagtaaagcacagaatataa

SEQ ID NO: 244257 - DNA, 567 bp, Klebsiella pneumoniae
atgaataaatcagtcatggggatggtttcgattggtgccatcattttaatgaattcagccgtagcgaatgccacggatggtcaggtctcttttaatggagaggttattgaaaattcatgtcaggtagttcaaaagaacaaagttgtcacgttacctacagtacaacgttctgctttggacgctgctggggcgactgcaggtatcgttcctttcacaatagatcttaccggttgtacagctggttctaatgtttcagtttactttgaaaaagacaatgttgtctcgagtgatggtagattgctgaacaatgtagataccagtggcggtgatacagcagcaggcaatgtcgaagtggagttgatgaacaataattttggttttatcaatcttgctacacagccggccattaactcagatggtaccgttagtggtagtgcagtaccagtttctgttgctgacagcagtggcgctgcgagtttaccattctacgcgcgttattatgcaacagcagcatctacagctggaaaagtcaatacttacgtaaacttcacagtagtctatccataa

SEQ ID NO: 244258 - DNA, 234 bp, Klebsiella pneumoniae
atgctgagcaagcgggttagcatcatcatgaggaatttgtcttccatacgcacacactacacgttcatccttaaatacatcaataattttctcgaggaatcccatttgaacagccaaattccgcgttcctccatggttaaaatcgcggcccgggatactcagcagctcaaaacctgcattgagagcaacactgtcggtaccatcggtgctactcgagtcgataacctgtactag

SEQ ID NO: 244259 - DNA, 318 bp, Klebsiella pneumoniae
atgaaatcgtatctttacgctaaagaaaatttaaaaaaattactgcatggggtaattacgcgagaaggaaataatattgatgattttcatttgcagcgcataaagttcacaattacctctctgaatttacctctctgtttgaaacatgatgcagaaaatatcacaattaaaatagaagtgatgatacagaacaaaaaaaattacaatgcagatctgcaatatctttctgtagctcttttggacttatatacaaatattgtaagatatataatctatcaatcaattaaatttattgacatagatcaaatgtataaataa

SEQ ID NO: 244260 - DNA, 252 bp, Klebsiella pneumoniae
atgagcagacattacttcaggcgaccgatagctgagcacatctcaaacattcgctcagagctggcaaaagtaccagcagaaaagcgtcttcacgtcatagctgaggcgttgtacgacatgaacccgacaggagccgatgaggttattagggcatcctgtggctgctatgagtgggatatcagcatggactaccgcagcgcagacgttcgttatgcagataaaaacaaacaggaggtgccgcatgacaactga

SEQ ID NO: 244261 - DNA, 789 bp, Klebsiella pneumoniae
atgttagaatcacttaaagaattcacgacatcgacattcaacacagcaatgaatcgcgttaagaaccctgcattcggcgctttcgcaatttcatggtgcgcatttaactggaagcaaatactttatttgttttttgctgataacggaatttattacaaaatagaatatatttctcaaaatagcagttggtggagcgtaattattttacctgcattctcgtcacttgttttatgtgttggtttaccatgggttaataatgctataacgaaatggcaaagcaagcctcttgacaatgcagattcaattgagaatttcaaacaggcgcgcatgattcaacgctccacgcgattgcagcgcctgaaggccaagcatgacgtgacttacgacagagttaaaactggcgctgaaaaagatatccaatcaatgaaagaacaaataactgaatctcaggcaagaatgggcgagcttaccagtgaacgagacgagttacgtaaaaaaataaattttttaaataaagaaattcaaaaccttaaatcaaatattgaggacgcaaattcaattatcactgagaagaatgagcgcattagccagcttgaaaactcaagagaatctttattggcacaattcaatcttgatattgcatcacagcacaatcgacagcaatcggctcctttgcaaccgttagatctatatgacagcatcaaaacaaaaattgacaattcactcttaaaaaatgatgagataaataaaaaatatattatcaaagataacaaaaacagaaaggattaa

SEQ ID NO: 244262 - DNA, 705 bp, Klebsiella pneumoniae
atgaacttatttgatcgtctgctgtatcgccgcctttgcaatgagcagcctgccgacggtggcgctgcaccggcgccgtctgagccagctgcacctgttgccgatgctccagcaccagaagttgaccaggcaaaaccagaagtcgataagcaacagcctggtgctgaaggtgacaaacctcagcacgacaaaccagctgatggtgaaaagccaaaggataagcctgctgaagaaaaagagcagaagcaggaaggcgcgccggagaaatacgaattccaggcaggtgaaggcgtcgagctggacgttgaagcactgaaggacttcgagccggtagcgcgcgagctgaacctgaccaatgagcaggcgcagaagctggtggatgcatacccgaaaattctggccggtgtgcagcagcgtcaggcagatgcatggcaggcacaaactgaagagtgggcagcaactgtgaaggccgataaagaaatcggcggcgataagttgacagccaacctcggcgttgctcagcgcgctttggataccttcggtacgccggagttgaaggaatatctgaacggcacagggctgggtaatcacccggagttggtgaaagcgttcatcaaagtaggcaaggccatgtcggaagacggcatggtgacaggtaaagagggcggtcagcgtagtgcggccgaagtgctttatggcaaataa

SEQ ID NO: 244263 - DNA, 1899 bp, Klebsiella pneumoniae
atggccgatgtattttctctggctcctgaaggccaggcatggacggacgataaaacgacggctaatccggcgcggccagaagactacgatccgacgttttttcagggggcagcctccgcacctgtacgcgggttgattggtggaacaattggtcttgctcaatcagctgtgggattcagcaagcgcctaatcagcgatccagcatttacagcagatgtggcgccgacggttaacattttccgcgttatgttccctgatgctgataaaacccttaatgacacctacgacacgatcggtaagcagttgcaggaaatgcttggttatgtgaaaccagacgccggcagtcagggtacggccgcagaggtgctttatgggctcggccagtttgcgccagcgattggtgcctcaatcatcggcggccctacggtcggcgccgccacggcttttggctctacctatgaacagtcatatcaggacttcagagccaaaggtgtagacgagtcaacggcgcgtaatctggctgcacaacagagctccttcaatgccgcaggcatggcgcttcccgctgctatcggtacgacgctggccacgcgcatcgcgtcaggcgtcgcaatcaacacaggatttggtggccttaaccgttattcagttggcgaaacactggaggagaaaggctattccgatatggcgaagcagtaccgggtatttgatgggcaggcgatgctggttgacgctgtgcttggcggtgcctttggtggtgctcatcacctggcctcgcgaaatgctgatacaacacctccggcagataccgaagcgccaataccggcggcagaagtgcagagcgtgcctgataacgtttcctcggcagcccaaggtgagggagccccaacgccagtttctctgggagatgttccggcagcaccagaggcaacatatgaatcaagaatggctgaacttgaggctgacgccgggaagttgctttcccgtggcgatcgcaaggtgtggcagtcagaagtggcaaacagccagcgaatcctgcaaaacctcaacgagcagcgagcctctatccttaacgaacaaccatcaggtagtggaaaagcattgtcgacagcccggcaggataagcaggccagactgcgtgcagttgaccagcagatcgaacaggtgcagaagcgcctgcaggatgcgaataacactctggcgccaaacatgccaggcggtcagttttatgaggcccgcgctgacctgtcacgtattcagcaggggatcatccctgaaagtatgcgtggcctggtgcgtgagacagaaattaaacccagcgacatcgatgcggcccacaccctgaacgaggggctttattacgacattgagtcggctccggttttgcatgccagcaacgagagcatcaacagccatgtggccgccatggatgaagcataccggcagctaaatgacggtcagccagtgaacatcggcatgatggcccgtgggctggatggcccggcgcggccaggcatgctggaatcagcaagcgagcagtaccatgcaatgcagcaggttttcgaagagaatggtgtcaggtatgaaacgccgtcagaactggcaggagaagcaccggatccgcgcgcagaaagtgcatttacggcagccgacgaaactggcgggcaggtcagtgttgatcctgacaccggccaggcgatttcatcaaacagttacgacctgatggcggcgcgcgatatggcgactaccaatccggatctgacaattacgcaccccgacacagggcagcctgcaaagctctccgatgttctggctgaatttgatgaacaaatccagaccgtgcagaacgaatcgaaagtgtattcagtcgctgcggcgtgcttcctgaggaacccataa

SEQ ID NO: 244264 - DNA, 519 bp, Klebsiella pneumoniae
atgaaattatttcctgtggtgctatttttatgttttctttcatctggttgcatgacttcatccgagtatcataaatacttaattgataggattgaggaaggagaaaaccaaaaggctgccaacatattaaaagaaaatgaggaacaccaaggtggtaaattcttatgtaaaacatttggctcagaatttaaaggcctgaaaccaaattcgatagttaaagtaactgatgaagttgttagatttaaagtgtatgaacaaaacaacttggtatttacaagcccagaactttccataaataccataacaaaagatagaacggcatcattagaagatgaaaatattactgcaagtgttttcgtcggttacagggaagatagcgtggggtaccggtatgaagttaactttgaaagcaaaataaaagacgggtctttatataaggttgtttacggaacggcacatcaaatattaaccccagtctatgctggtaacatcactttaagtgaatgtagaaaaatatag

SEQ ID NO: 244265 - DNA, 1392 bp, Klebsiella pneumoniae
atgaactttccattaatagcgaacgtagtcgtgttcgccgtattactgtttgcgctggggcaaacacgtcataaacagtggagcctggccagaaaagtgctggtcggtctggcgactggcgtggtatttggtctggcgctgcagctgatctacgggtctgacagccaggtgctgaaggattccatccagtggttcaatatcgtcggcaacggttacgtccagctgctgcaaatgattgttatgccgctggtcttcgcctccatccttagcgcggtggcccgcctgcacaatgcctcgcagctggggaaaattagcttcctgagcatcggtactctgttgttcaccaccctgatcgccgccctggttggcgtgctggtgaccaatatgttcggcctcaccgccgagggtctggtccagggcagcgcggagaccgcccgtctgaacgccatccagagcaactatgtggggaaagtagcggatctcagcgtcccgcagctgatcctttccttcgtgccgaagaacccgtttgctgacctgaccggggctaacccaacctccatcatcagcatcgtcattttctcggcgttcctcggcgtcgcagcgcttaagttgctgaaagaggatgtggaaaaaggccagcgcgtgctgaccgcgatcgataccctgcagggctgggtaatgaagctggttcgtctggtcatgcagctgaccccttacggtgtgctggccctgatgaccaaagtggttgccgggtcgaatttgcaggacatcatcaagcttggcggcttcgtggtagcctcgtacattgcgctgggtattatgtttgtcgtccacggcctgctgctggcgattaacggcgtcagcccgctgaagtacttccgtaaagtctggccggtgatcaccttcgcctttaccagccgctccagcgccgcctccattccgctgaacgttgaggcgcaaacccgtcgtctcggcgtaccggagtcgattgccagcttctccgcctcctttggcgccaccatcggccagaacggctgcgctggtatctatccggcaatgttggcggtgatggtcgcgccgaccgtgggcatcaacccgctggatccgatgtggattgccaccctcgtgggcatcgtcaccgtcagctcggcgggcgtcgccggggtgggcggcggcgcgaccttcgccgcgctgatcgtcctgccggcgatgggcctgccggtgaccctggtagccctgctcatctccgtcgaaccgctgatcgatatggggcgtaccgcgctgaacgttaacggctcaatgaccgccgggacgctgaccagccagtggctgcgccagaccgacaagtcgatcttcgatagcgaggaagaagccgaactggcgcatcgctaa

SEQ ID NO: 244266 - DNA, 153 bp, Klebsiella pneumoniae
atgattttacgtgttttggctgtatcgatgattggttttacgctcgcaggctgcgtgagcagcagcggcctgtccggcgacgtttattccgcatctgaagccaaacaggtgcagagcgctgagagatcccctcataatttccccaaagcgtaa

SEQ ID NO: 244267 - DNA, 459 bp, Klebsiella pneumoniae
atgaaccgtattatacctgcggggtgtcttgccgccctttttctggctggctgcaactccccttctcagcatactcctgttccgcgtaactacggtgctgcctctgatgtggcggttacccggcacactcagtacacattatgggacaaaggtgtgttttccggccaacttccggtttcaacggggtctcatcttctgacagctaacagcgatcgcctttcctttgactgggaaggtgatgcaattgaattactgaacgaactggccagagtcagggggatgcagtttaactacaatggtgtccgcctgccgttaccagtcaaccttcacgtccgggatatgacgttttccaatacgttgagacttattgaagcccagacagcctggagagcaacaatccatcaatatccgggcttgttacaggtcagcttcatgcagccggagaaccggaaaaaatga

SEQ ID NO: 244268 - DNA, 819 bp, Klebsiella pneumoniae; identical to SEQ ID NO: 8490

SEQ ID NO: 244269 - DNA, 1149 bp, Klebsiella pneumoniae
atgaatattcctgatgagtttggtctttttccgtttcagcgtttcacggcagatgaactacggcatttctttgtctggtgcgccgcacataaagtcagtgatgtggatctgaccggcgggtcacctgtatctgtcagtcgctttggccgacgggtgcgttgttccagtgcaacgttaccaaccacactcatgtcctccctgattgatgaactgttcggtcgggaagtcattccccgcgttctggcaggcaatccggttgacaggacgatacagattaacggggatgcatccggtcgctatggtcttaaacgcggagaacgcatccggttacgctctcacctcattcagggcacatctggtgcggaggagaaagcaatatcaataaccatgcgtgtcatcccgacagaaataccggacatcctctccatgaacattgaaccagacctgcttgaagcaatggtctgcaaaagcggtctgggatttgtatgtggtgaaaccgggtcagggaaatcaacgctgtgttcagcactgtaccgttacattatggacaatttccccgacgccaaaatcgtgacatatgaagacccggtggaatatatcctgggaaatgaaaacgatctgctcccaccgcatcaggcagaaatcgggcgtgatgtggtcagttttgctgccggactgcgttctgctgtacgacgtaatcccgaaattatcggtgttggtgagatcagggataacgaaaccgccgacgcagcggtacaggcaggcaacaccgggcattactgcctgagcaccatgcatacgaaatctcctggtgaaacgctggcacgtcttcttgggctgtttccccctgtcatcagggattcgatggcctgggctgtcctgtcactgttgcagttcattctggttcaggttctggtcagaacaaatgacggtggtcgtaaagccgtccgggaatatatcgtcattaacgatgagcttcgcgacaatctttccggaatgccgcatgcagagtgggggcatcacattgatgccataatccggcaggagaagcgccgtatccgggaccagattctggaaatgtatatccggaatgaagttgaccgaagagaagcgattctttttatcccgccaggggagttacggtcatga

SEQ ID NO: 244270 - DNA, 291 bp, Klebsiella pneumoniae
atgaaaagagaaggtttctggcgatatgcaacaccgccagtcaacatccagggcgtacctctgccgttcaccatgatttatctgtttatatgcccctttccctccaaaacaaccttctggatttgcaccggcatcattttatttttcgttattctcgaccgttcaggctggactgtcaggacgatctgtactcgcattttcagcattctgagaggggccatcgcctccggtcgtccatggtggtatcgccaccatacggaatcaccacgagactggactggcctcgattaa

SEQ ID NO: 244271 - DNA, 552 bp, Klebsiella pneumoniae
atgtcaggtaaaaaaactatcgttactctgctccgggtatcgctactggcatgcccgttactgttcacgacaccatcgtttgcaatgatcgacacgccatccgtgaaggtcggcttttctcctgaaggaagcgcatccgctctggtgcttgacacaatcaacagtgcggaaagctccatcaggatgatggcatattccttcaccgacccggatgtaatgcatgcgctggcaaaagcgaaaaaacgcggagtggacgtccgtattgttgttgatgacaaggggaatacgaaccgggcaagtcaggaagcgatgaaatatatcaacctgctggacattcctctccggactgtagatgccttccccatccatcacgacaaagtcatcattgttgacggaaacacggttgaaactggctcctataacttctctcgtgctgctgcacgcaagaattcagagaatgtcgttgtgctcaagaatatgccggatgtagccgcacaatatcttgaacactggcaggatcgctggaataagggtacagactggagaccctga

SEQ ID NO: 244272 - DNA, 3768 bp, Klebsiella pneumoniae
atgccgtctgtatcccgctaccgcacctggcttgccgtgcctgcagatgaaatagaagatctcaaaaaagcacatcccccgatgaacgggcacacgcccgtcatctgggacaaggagcacaaactctggttcgcccgcccgggggcggacctgtccaggctggaccgctggctgccccggccacaggacgtctccatgaacggcagtgatccggtcaccgagtttgcccaggttctggagaatgccggactggttctgaaagaactgccggtcatggacgggaaaatccaccgtgtcccgaccgccgatgacaaaaaaggacaaaaaagtggcgcatatcgcggattcctggacggcagacctgccggctggtacagggattatcgcagcgcggataattcgccgatcacctggaccttctccggcggagaacagacagatccccgcgcaagactccacctgaaagcgcattcaatgcaacgcagggaggacgcggagcgggaactgaaagcacagtacaaccgacaggccgcgtatgcccgccgctatatcaacaaatggccgcaggccacagcacatgaatacctgacccggaaaggcattcaggctgcaccgggggtgcgggtaaacaacaaaaatgaactggttattcccttcagtaaccgtaacggcgcgatacgctcttaccagcgtattccggtcaccggggggaaagatgcccgcatcctgatagattcggagaaaaccggtaactggtttgcgctgggcacaccgcgcaacggtcagccggtactgtttgccgagggctatgccactgcggcctccctgcacgaagccacgggccttccggtactgatgacggtggatggaggcaacatgattgccgttgccgaaaatgcccggcaaaagtggacgcaaagcccctttatcttctgtgccgacaacgatcatgcaatccgggttaacaaaggtatcgtcagtgcaacaaaagccgcagaactgacaggaggatcggtcatctttcctgcgttcaccgatgccgaaaaagcgcaggggctgaccgatttcaatgacctggacgcaagccggggacgggccgcttttcagcatgtcatcaacgcccagttagaacacatcggggtttccacccccaacagtaacaccccggaaatgcgcgaggcactggtgataggcaacctcgtttttacaccggtccacactgaggaaaaaaccatgactccgacagaatatcctgaaacatcacccgatacagggcacagccatgaccagggaccttctctgccgtccgccacgcagcaggaacaaccagctgcttccagcagtaacattgctgatgaaacacagtcatttaccagtcacgccactgaaaataacggcaaagatgagcggcacgctgataacgttcaggcgcaaacggaaagctctgtagttcaggactcccctgcagaatcaccggcgtccccggaaagtacaacggcgtctgcccctgatgaacccgctcatccggcggaacctccggaaaaagttgtctcggtggccacagataaagactggcgtgaatttgaagccgaactgtcacaaccggaaaaaaacgagtcacaacaggaatccggcacttcacctgaaataccggcccctgctgccccccccgcatcccctgaagacagtccctcatctgaaaccatgaatgaatcagccgagccatcaccttcccctgatgcagtcaaagaggaaatgaccgtgatgacggagcctgatgacaaacaaagcaccggaatatccccggatactccccgggaagaggcggtcaaccatgtaactgaagacattccccttcagccagagccgttccttcctgagtcagatggccccgaagaatacgaaaactacagcgcatatcaggagctgatgaacaatgaaaatcctgagcatctgcaggaaaacagtgatatgccgtcgcaaccggacacaggccacgttcaggctgatgagtcagaacttcaggccacaacagatacagtagaaccggctgtccgggatgaccccactccacagcaacctgttcagagcacatcatcttctgataatacttcatcgtttctcgacaaagcgcgtggcttttttacgcgtaaaaaaacggattcacaggcgcatgagaacagtgatcccaccccctcaccggaaaccacgacgaccacaccggcacctgacagtattgtctacgccccggaacgccctgatgcaccgatatcgctcaatctggacgaaatcattaaatcgctggaaggtgaagaacgagcagacagaaccgtcctgtacaaactggatggcaaacctgccttcattgaccgggtaaaccggctggaaatggtcaacggtgccagcaatgacgatcgcagtgttctggctgcacttgctgtggccactgatttttatggtggtgtcattgagctgacgggcagtgatgcctttaagcaaaaagcgatgcagttgatcatcgagcacaacatcaaagtgcgcatgaaattcccggatcagcgagcggcgctcgaaaaattacgcaaggaaatggctgtcggtaaggatactgttgtcacccataagccaacaccggaacttaaccggaatacccctgaacaaccagcagtcccagaccctgttcaggaaaaagaagccacacaatccccggcgtccccagtagcccctgaagcatcaaccgtcagcaccgtccctgcatcatcaccggctgaacctggcaaaacggcagatgcggcacaaggtgaagaaccaccaggaaaacttcgcccgggagagagcgtgactgccgtactgcacaattttggtcgtgctgaatatgcacccggcaaaggagagagtttctttgttgagcttaaaaaccgcagtggcagcaaactctactggggggaacaactggaaagtctggtcaaaaaccaccagaaaggtgacgtggtgacactgacacttcagaaccgcgaacaattcatcctcccgggagagcaaaaagcacgtttccggaataagtggtccatggagtcagttaccaacgggatctcggtatcacatgataatccggataaaggtcagcgtattcaggcgattccggtcgaaacctttatgaaagtggctgcgcaaatcagccaggggtggcccgaagagatgaaagcgttacgtatgccagaaaacgtcggctcacatctgtttatcggtgaagaccgacatccggtctccgcgccacagaacgcaaatcaggtaacagaaataaccagcgcagcccctgacaagctgacacctgttctgggatcagtggataaggatacgcgtgaactcaacctgctacttgtccagagtgccgatgaacatctgcagggtgtggtccggctgaacggcacattgtatccggcactggccaccccatcagccgacaacagtcagctggttatcaatgcgctgaccgacaaaggtttacgctttgcaggttatggtgaagcggtaaaccacgatgctgacagcacgaatcgccctgcaccggagcttatgcagtttcatctgaaaacccgggaagaaccgctttttgctgctgtctacacgccggaaaaacaacctgatgcgttgtaccggaacctgggcttcgagcagtcatggcagcagtggtccaacagccaaaagccggaggacaggcaggaaaaaactctgcatcaggatctctcccacagccccggccgatga

SEQ ID NO: 244273 - DNA, 348 bp, Klebsiella pneumoniae; identical to SEQ ID NO: 8495

SEQ ID NO: 244274 - DNA, 693 bp, Klebsiella pneumoniae; identical to SEQ ID NO: 109596

SEQ ID NO: 244275 - DNA, 984 bp, Klebsiella pneumoniae
atgcaatcacgttatttactgagcacactgctcctggtgtgcagcgccgccacgtctgcagataacgcaggatggcagaacgcacgcacaccacaaacgacaaattctgccagcgatcacgttcagaacgcctcccaaaacaccggaggtgttccggcaacactggtaaaaggtgagctgcctgcccccgggcaggccagcccgctggtacaggatgcggcaaggcttgattctgagctctccgccgatgagattcgctcactacgcagtctcatggcggataacgagcgggccatcaatgcgcccatcaccagtgttgtaccccgtatcagctctctgacagttaatctgtcccccggtgccagccttcctcttgttcgcacagccatgaacaacctgagcgtggtgacatttaccgatatcaacggttcaccatggccacaatccgatcctccttataacgcggcaccaaaactctttgatgtgcagtacaacgagaacatggtgacaatcacaccattgcggccatgggcatccggaaatatttctgtctacctgaaaggtctgtcggtaccggtcatcctgaacgtaaccagtggcgaaacagatacgccgtcatccagtcaggaaatggacagtcgtctggatctgcgaataccacggcagggaccaaccagcccggttgtctccatcccgacggataagatcgccctgcatgatgcaacattacaggcatttctggatggtattcctccccgggacccttcagttaagaggctgaaattcacaggtaatgtcccggatacaacgatctggcaacacggcgatgaccttctggttcgttcccgggcgatgttgcgcgatgaatttgaacagaccttgtcctctgccgacggaactcatctctggaaacttcccgtcaccccactactgactttctctgtgaatggccagtccattcacgtgacaccagaactggagtaa

SEQ ID NO: 244276 - DNA, 1290 bp, Klebsiella pneumoniae
atgagtgctgaacaggatgccggtaaatccggaaagaaactggctgccctgcttggactgggcagcatcatcttatttggcggcggctatatcgcgttttccaaactatcagggagtaacagcgatatgcagtcagccgtgaacattaacagtgcagcaagcggcggaacgcgcagcgttaccgaaacgcctcactatcgtgaactgttaagagcggataatgaacgaggggccgcagctgcagcccgcaataatcagacgttcattgccagtcttccacaggggcttgatattccggacactcaggaaaagcaacaacagcctgcagcaaaaccggaaaactatgctcatcgccaggcttccggcacaccacaggaggatcgagcagccagtgaaaaacgtatggagcggctgcaaaagctaattgtaagaataaaagatcagcatcctgccggtagtacaccaaccatagcaacgactatgtggaataaatctccggcagaaacaacagggcagaatggtacgcagcaattcgcattaaagaatgccagcctgtccacgcctgtagcagaaaaagggatacaactgatacctgctctgacccgtataccggcatatattgatactgcagtggattctgataacccgtcatccaaggttatcgcaaccattcccgctggcccctgggcaggggcaacgctgttcagtccgggagtcaaactggtgggtaacggcgtggagatccatttcgaccggatgagctggaacggcatggaccttaaggtcaatgcatatgctcaacgggaagacaacctgatgtcatccgtggccagcaatgtgaatacacgctggtttaaacatatcattctgccgtcagtgttaggaggtgtgggcagtattggcacactttataaagatgccaacacgcaggttattcagggtaactatggcacggttaccggacgcgtgggaatgcccagtggtgaagctgttgcgggcgttattgccggtggtatggcggaaagaggaagtcagatattaacccgccaggcagaaagtgagccctataaacaggtagaagtgtatcagcatgaagtcgtatcaattctgtttgttgacccggtaatgacaaacgacgccaggtcatcttccctttccagtggcatttccccttcagttaatcgtacatcacaggcggaacaacgctcgcaggcacgaatgcagacagccatggagcaaagaaaagctgtgatgcaacgtcggtatgatgaacaaccggagacaccataa

SEQ ID NO: 244277 - DNA, 417 bp, Klebsiella pneumoniae
atgagccagcttgcccgggatgtaaaaacagagctggataaccgcgatgaaaaaattcaggcaacactgaatatgcttcacgacagcattaacaagctgggcgaagctataaaaaaggatgaagaatacgcacaggaaacacgccgtcagctggatgatatccggagccgcctgaacggaataatgacacagaaaagcgtcactgaatcctcttccacaccgcatccagcaaagaaaaaaacgtcgtctgtacttaacggaatgaaaatcatgtcgatggaaactggtatggcctggattcgctggcagggtagtacctgggctgtcagagaaggtcagacgctgggcaatgtggtgatccagcggattgatccgactacccggaccatcatcaccagtgcagggacgttacgctga

SEQ ID NO: 244278 - DNA, 528 bp, Klebsiella pneumoniae; identical to SEQ ID NO: 8500

SEQ ID NO: 244279 - DNA, 405 bp, Klebsiella pneumoniae
atgtcacgtattcgtgtcgtagcggcccgtctgtacgccgcatttatccacgcacaactgtttgtaatgtcatgccggagcaaactgactaagttcctgctgctcattcccatgatgttgctgcccaaagccgttcttgccgatggagatcttgccgatatggttcgcaatgtcgaacaaggtgccaaaacagcacagtcatcatcactgactattgcgcagttcatcggcgtaattctgtttctcgggggcctgattggcctgaaaaaagttgggaaacaaggggggatgggactggctagttgcattgtatctatcgtcattggggcggtacttgtcgccggacctgaaatgatgagtcgcagccagaaacagttggggatttcctcaatttccattggctaa

SEQ ID NO: 244280 - DNA, 189 bp, Klebsiella pneumoniae; identical to SEQ ID NO: 8502

SEQ ID NO: 244281 - DNA, 801 bp, Klebsiella pneumoniae; identical to SEQ ID NO: 8503

SEQ ID NO: 244282 - DNA, 3045 bp, Klebsiella pneumoniae
atgaacataaaccgtttaatcttcactatcgaagactgtctgaacacgctatcccgtttctctgtcgcaagcagttttgttgagtattgcgatttacgtactgtaattggtctggacagacaggatcgtgaacgtcgcccatggctgaattcgccctatattgcagccacaaagcgtggagaatatctctctgtctttgaagtcagcggtgctttcagggaaatggatgaagcatccgaccagactggcccaggttcactggaatcgctgatcaccagcatgagtgacagcctgaatacggcatataaaaacagcggtcataaaatcagcttcgtttttgagcgtgatcctgacatggggaaagaagaaatcgaagacatggtcgccccacaaaagcgctcactggctaatacaggtatccagttacaggatgtggtcgatgagaaagtcacaacactgtccccatggctggtccgggagcgttgctggctggcgatctggagtggacccgaccttatcagcaacagcgatcgcaccgcccatgatgagcttgtcagaagactggctgaacgggtaccgaaagcacgctttgcccagtccccctggcagtggaccttatctgcactgaaaatccgccacgaagcttttcttgataatgtggaacaggcactgagacattcatctgatggcctgattctccggctactggatatacacgaggtcgggcgtgaaatacgtcgtcagacagaacggcacagcacaccgcgtaactggcaaccccacctgcctgaagatgcccagccagcgggatatcgctggactgacgatgaatccgtactacatgctccttcattgcatttgcagttattcaacactcaggtgaccacacagggcaacctggttcaggcgggcggactctggcacggaatggtatcgattactttacctccgcaaaatctgcagacgtttaacgaactggtccgtgccgtcccccgcgcagtcccctggcgcatcagaatggatctgatgcccggcgggatgaaggctcttaatctgaagaaaacgcttctgacttacagcagcttcatttctgccgttcgtccaatgtatgaatccgttatggccctggcggcaacggatgaaaaagaacctgtctgcataatgaccatcatggcctccacgtggggaaaaacacgtgaaatatgcacacgaaaccaggccattctgaaatcagccattgaaggctggggcgtatgtggcaccacgacaacatttggcgatccccgacgcgcctgggtgaataccattctcgcggcatccggaggctccggcccggttcccctgtatcccccgttgtcacatgccatctcgcttttcccgcttaacagggcaggctctgtctggcgaggtaaagggaatcttatgttacatacagaagacggttccgcaattgaggttggtctggcgtcatcccaacaaaataaacatacagaactcgcaccaggcgatccgggactgggtaaatcagttctgattaatacattgtcggaaatacagatatcatctgctcagaaaaacctgcccttcattgcctatatcgataagggatacagtgctcagggactggttcagcttattcgcgacagtcttcctccggaaagaaaagacgaagctgtcggtattattctgagcaatgatccggaatacacccgtaacctttttgacgtgatgtacggcgctaaaaagcctattacgccggaaaagaatttcatgtcatcggtgctgtgtgctctctgtgtcgataccggtaccggtcaaccctgtaaccccggagacacccgacaaattatcaaccagcttatcgagctggcttttaaagagtacggtgaaaataatccgcgactttatcgcgcctcaacggaagaactggtggattcagcactgcaggactcgggactgtatgaaaaacatgatgcaacctggtgggccagatcaacctggttcgaagtccgggatatgctccacaatgccgggtatatcatggcggctcagcgggcacattatcaggcaatgccccagcttcccgaagtgtcctcgatgctgggccataccagtctcagggatgttttcggtactgttcagcgtgatggttcaaacgaacttctgctggactacatccgccgcgcgctcgagcagggacataacgactaccccatgatatccgggtatacccggtttatgatcaacccggaaacccgggtcatcgctgtcgatctgaataatgttgccggtgacaaaacgcctgcaggcaggcttaaaaccggcatcatgtacctgcttgcaggtcagatcgccggtggtgacttcaccctgccacaatacagggatgaagtgttaaagcagcttccacgggaataccatgaaatcgctcttaaacgtattaaccaacttgatcaggaggttaagacaaaagtttatgatgaactgcataacgcccggggcattgacttcatctgggaaaatctggatacccaggagcgtgagcaacgcaagtttgctatccgcacggttctgagtacgcagtatctgagggactacccggaaagcgttcttaagtcagcaaatactctctggttactgcgctacaaacccgaagatatccccgtactgagggataacttcaacgttcctgaatttatgctgaaacgcttcctgaaaatgccggaaggcccggcaccagatggtagtggtgttcctgttctgggagtattcagggtaaaaagtggcacgcttgcgagaatactcaaatttaccgtcggtccactggagctatgggcgctgaactcatcgccaaaagacagtgccctgcgtaaaacactgacaaataagttaggttcagttcgggcacgtaagattctggccgaaaacttccccagaggttctgcaacgtcattaattgagcaccgggcgggccaacataacagtgacaatgttattgaagaactggcctcggagctcatccgaaaacagggatacaatctctga

SEQ ID NO: 244283 - DNA, 615 bp, Klebsiella pneumoniae
atgtgtacaattcatatcaccccacgctgccggagacctgccagagggcaggtatttcttaaaaaacttgaggtaaaaggtgacagtttctcattcactctgccgtcacgtgtcttcaggttacatccggcccccaatcccagagtgatatacgcctcggatgccagaacacagggaaaggttacaggcatgcggctgttgttgccgtccagcacagatgagctgataacaacggcaatatggcaggtttctgtcccggatgaagcaccattcgacgttcagcatgtcatccagtggatactcccttcaccgctgacttcgctgatgtccgatgatacctggttatggccatccgttcccggaacgccggcactgagtgccggtgactggcctgttatggatactgacccttccaccttacggcgcgtcagacgtcgttctttcagcatcatcgataaccggaacaggaaaggttatatcaccaggcgatatcagtgtttcccactggccccactacctgaagacagaaaatacgacagccttcctgaccttgtgctccaccccgagcaggagacaataaaatgcaaagaaaaacattactcgcagcccttatag

SEQ ID NO: 244284 - DNA, 1203 bp, Klebsiella pneumoniae
atgcaaagaaaaacattactcgcagcccttatagctatcctgaatggaacggcataccaggctcatgcttattcagtcaccgtcgtcgccagccgtcccgttgaacagcaggtcgtccccagaatggaggccatcaaaggtgtgctgagtgacatactgagtacccagacagccacgggtaccgctatcaatcagaactctgaaaagctggcaagtgtcattgcccagaacggacaggcgacacgtcagcagatgattttcagtaatgaaactcagcgcctcgaggaggcacggaaaagcttcaccgtgccagactccatctgcagtgaatccgcatcagggattgcaacagaaagcaaaagtgcctcagcatccgcagcctcaaaactcagtaaaggtggcggtgtgagcaaccgtagcatccgcgaccgtctggccagcgcagcaaactctcccgtgcgggaagcttatgatggcgcggccatacacgccagttactgtacagaagcagaatatgcacgttttggaggaaccgccgtttgtccttctgtgggcgaaataccaggtggagacagtcaggtacgctcgatttaccacggcgcaggtacagcggacacacctgcggcactgacatgggatcagaagcaaatagatgcagcgactgcttacatgaaaaacacttcccgcccctctgccggtcgtgctctgggtaaaggagaagtgaatacccagagtgggcgaacctacgtcggactccagaacgaatacaacggcatcattgattctgcgtcgaatccccaactgacgttgattgctgacagcacgcctaatgaaagcacacgtaaagcactggctgaaacactgcagtcagactcagcggccgcttacttcgaccaggtggcttcaccagaagcaaaagcacggggatatatgagtacccgtgagtttgaagcttttgaggctggccggcgctacgccaacacagcatacctggtggatttacaggaaatgcagggggataacctgctccgtgaactggtaagaatcactgcgcaaatgaactggcagctgaacgatctgaaagaacagatccgccagggtaatgttatctctggccagcaactggctctgactgcccgccagtattatgaaaaacaactcggtagccttgagaaaacaatcaatcaggcaaacgcacgttga

SEQ ID NO: 244285 - DNA, 585 bp, Klebsiella pneumoniae
atgaataagttaccggaaaattcagaccagacgaaaaacgtcaaaaaatcactatccataacccgcatagccacccggaggattattaacatttttgttcctctgatggagactcgcctgataacgaattctgtacagcatatgctgaagcaacaaaaaagcaggctggaaaaatttcgtcaggtaaataataaaaaggcgcaactctgcctctcgtgggaagaagctctgcaggccagccatatgtcagtagacgacctggatcgtcgtttccgccggcgcagaacagtatggcggttatgctgctggagtctgctggccatcgctttattcctcagcggtatgctctttgccgcctcctcattacctttgatgacacaggtacgcgccatcagcactcttgtgttgattctgtcaggcgtcgctctttgtgcttccagagctctgatagttacataccgcctctggcagttgcatgaacgaaaagtcagcgaacccgagcaggggactttccgtgattttctgaacgaccgcaatggctggcgcaatgccacattaattgccgtaaccagtaaacaatactga

SEQ ID NO: 244286 - DNA, 2169 bp, Klebsiella pneumoniae
gtgaaaattttacttcgcgcactctgtgcaggccttgctatatcctcactgccggcaatggcttcagtgacctatcaggatattgtgtctgccgccaccaatcctgacgatctgtcccgccaggcgctggtcacgatattcggtgatgtggtcaccaatccactgtcaaccagcgaccccaccctgatcggaagcatgttctgggtgttcaacaatatcattgccgtacttgctatcgtctggtgtatcttcattagtatccgccatgttgtgcgttcggggcatcagggacaggtattcagcgtcgggcgcgatattgtcggcatactgagtttcgtcgcaggctttctgatgatcgttcctaccggaaatggctggagtctcgctcagctcattatgttatggggcgcatcgataatgggggttgggtccgccaatgtgatggtgcaagttgccgctgataatatcgcaaatggttattcaatgactgtacagccagttcaggcatccacacgaacagctgcgcgtggcatttttgaaatggaactatgtaagtatgcggttaacgcaggactaaatgattttaatcagaccgccaaatcctcgacttcactgatgacagaatcagctaaaaccgccagtggtaattacactgtcacggtatccaatggcagcggtatctgtggtacagccagcctgtcagtagaaggaaacggaacaacagatcagtcgacgattggaaaattctttaatcccttcagtaaaaacgagtacagcggtgttatctcagcacaacgtgcagccatggataatatgattagcgacatggacaacgctgccagtgagtttgtgacaacatttctggaaaaaagaaattctggcaacggaacactgccggatatcgagacacgaattcagaaagcagccgacgaatacgaacgtgctgtgcaaaaatcgctacccactgataacggagagcaatccagaaaagaggctcttaaatcttatctcacaacctacgggtgggtaacgcttggcgcatggtatcagacctttgccactgctaaccagcgtctggcagagctggctgacagagctccagctgtaacttcaatgtcatcactgggagaagttggtgatactgacttattcagtgcggtcatgagtgcctataggacgcaactgcagaattcctcctatacgccaccgctgggcacagtagtatcatccagtgaacaacgcatggcaaatgcacaagatccgaaatctgccttgtctgaaattatgggcccccttgttagtctcactaacaggattgcaacggaaacaagtggcacaggcacaaccagtgctcaaattaatcctctgataaaaatgaaaaatatcggagatataacaatggtaagtgcagaaggaatctggactatatatacaacggccagagttgtcgttgccggtggcaaagattcaattcttgtaaaattctttaactcactaacaggtgccgcttcgatgcttaccgcgctgtttgaagcacttgcaccacctgtttattttcttttgttcctgatgttctgtgctggattttccttatcaatttacctgccattcattccgtttattttctggatgacaggcatcgggaactggatagtcagcgtattaataggatgtaccgccgggccgctgtgggctgcaacacatctcgggacatcagaagacagaggaagtcgggcagcctacggttatatatacttaattgatagtatgataaggccgcccatcatggtctttggttttttctttgcttctgtagccatcatcgccgtaggcacaatactgaatgcattatttggcgctgccctggttaacgtacagttcaattcgctgaccggtattttcagtcttgctggtttcttgctgatatacgccagaatttgtacaaccactgtagctgccatatttgcccttcaggcctacctacctgatcatgttattaacttcctagggggacgtgatggagccaacacgcttggcagcatggcaaattctgttaaagaaatatttattggaggaagtcgcaatatccgacatactcctggaatgaaaacagatcgtcttaaagataatacaaaaggaagtgacgacaaggacggaataaaaggataa

SEQ ID NO: 244287 - DNA, 663 bp, Klebsiella pneumoniae
atgaaagctaaaaaagaaacaacagacagatttccaacctggtggctattttattatgtattaagaaaagcttatttctttcttggaatacctttttttctgttctgcgcattaggctttaccgaaatgctatgttctgatcgttatttcggaaataaggtcgaagattatgttgtcactttcggtagttggttcttattacttgcgccaggcatatggatgtactcacgtgcaaaaacaaggagagaaaaaataagaaaagttgtacaaacaataaaagagtcaggcttctactctccagagaaggggtatgagggattatctttaacccagggagcttatttcggcattgaccttaaaaatggcacaatgttgtatgtccgtatctatccaggcaacattatggatgttatcggttttgacattcataatttcactcgtactgtaacagacgacaaaaaactggaaattcatacgaaatacatcaatctgccaatggttcctgttccatcatggtgtgctcatccagaaacagcatcaaacaccatgcacgcaatggcaagtcgaggatatgattaccctgtcgactttcctcgcctaattcaggagaagcgtaaggagtgggagcagattgcaggcatgcctgtagccgaagtattttaa

SEQ ID NO: 244288 - DNA, 210 bp, Klebsiella pneumoniae; identical to SEQ ID NO: 8510

SEQ ID NO: 244289 - DNA, 177 bp, Klebsiella pneumoniae
atgaatctggtagacgcctttgtcaaaaaagtaatatccgggccatatgaagaatatggaaaatggtggatagatgttgaatacatttcatggggtgttcccgggaaaacaagactgatgtttgagtcaaaggagcaggcactggaagttaaagaagggtacaaatttttaacgtga

SEQ ID NO: 244290 - DNA, 1176 bp, Klebsiella pneumoniae
atgttaagagcaacaaaaatacgcatctatcctactcctgaacaggctgcatttctcaacgcccagttcggtgcggtacgttttgcgtacaacaaagctcttcacatcaaaaaacacgcttaccagagacacggagtaaatttaagtccgcgtaacgatctgaaaccgttgttgtctgtggccaaaaagtcccgtaaatatgcctggctcaaagaatttgactcaatggcattgcaacaggcggtaatcaatattgatgtggcattttccaacttttttaatccgaagctgaaagcgcggttcccgacgtttaaacgcaaacacggaaaacaatcgagctatcactgtgtcgggattaaggtgctggataatgccatcaaaatccccaaactggccccgatagaagcacgccttcatcgtgaacttcatggaaagctgaaaagcatcactgtcacccgttctgcaacggggaaatactacgcttccattctttgtgacgatggcgcttccgcaccagagaaacccacgtacctgaaggaagaaaagattacaggtctggatatgggactggagcactatgccatcacttctgatgctgtaaaagttccgaatcctcgccatcttatcaatgtaagtcgtaatctgcgacgcaaacaaaaagcattatcccgtaagcaaaagggaagcgcgaatcgtaaaaaggccagaatccgtcttgcggccttacacgaacgggtggcgaatgcccgtgctgattttcaacacaagctctctcgcgcgattgtcgacgaaaaccaagcggtaattgtggagacgctgaaaacagccaacatgatgaaaaaacacaatctggcaagagcgataggtgatgctggctggcacagcttcatcacaaagctggagtacaaggcagcgacaaaaggcgttcacctggtaaaactcgaccagtggtttgccagttcgaaaacgtgccattgttgtggttacaaaatgccggaaatgccacttcataaacgcatctggcgatgccctgagtgtggagcagagcacgaccgcgatatcaatgcggcactcaacatccggcaaaaaggaatactggaactaaaggcggcgggactcgtcgtctctgcccatggaggccagcgtaaatccgtcgcacagacggttgcggcctga

SEQ ID NO: 244291 - DNA, 1017 bp, Klebsiella pneumoniae
atgactgttgttactgtcggtattgatttagctaaaaatgtgttcgctgtgcatggcgttaatgctgcaggaaaagctgttttagttaagcctcttgtgcgtcgggctaaattgcttgaattgattgcaacacttccagcatgtctgattggaattgaagcatgtacaggtgcacattactgggcaagagagttccagaaaatggggcatacagttcgaattatggcgccgcaactggtttctccataccgtatgggtggccgtcatgggaaaaatgatgctgcagatgccgctgccatttgtgaagctgttacccgtcctaatatgcggtttgttcccataaaatcagttgagcagcaagggcagttatttgtacacagagctcatcagggatatgtcagtgagagaacagcattgattaatcgcatccggggattgctcagtgagttaggtattgttctcccgcaggcgtttaaagcgtttttatccggggtggctcaggtccttgaggatttgcccggttactgtaatcaggttattggtgatcttcttaatgagctttatcacatagaagaaaagattaaaaacagtgaaaaactcattcagcaacttgccagagataactcagcagcacagctactaatgcaattcagggggataggcccgatgactgcaacagcaatcgttgccagcataggtaatggtcatgatttcaagaatggacgtcagtttagtgcctggctggggctaacaccaagacaacaaagttccggggggaaagcacggttagggagaataactaaagccggcgacagctatctcagaacacttcttgttttgggggcgagatctgtattgttgggagcagctaaaaatgatgatccggtcagtcgatgggccctgcagttaaaagaaaggcgaggatatggacgagcgcttgttgcgatagcagcaaaaaatgcacgtatgtgctgggcaatgttgcacctgagagatgaattcagatttcctgcctag

SEQ ID NO: 244292 - DNA, 1725 bp, Klebsiella pneumoniae; identical to SEQ ID NO: 23714

SEQ ID NO: 244293 - DNA, 492 bp, Klebsiella pneumoniae
atggcgagatattcccctggccaggctgggttagttcagtcatctccgaacatattttcagcgtttcttctggtctggtcttcaccgtcatttctcgacagactctgctctgtaagaggagtactgcaatccacagacgtatggagaccagattgtttttccagtaattcaagcaatttcttttcaaccgaaaaagcacctggtattacgctggaaatcaccttattaatatcatccagagtcgtattttctgtcagtaactccgatatcagcaaaggaagacgtttatctatagctgcaaacgccgcaccagtaactaacatcgcgcgcatgaaacgtccccgctccttcagtttttcatttgcaatgagctcatctgctatcttatctcctgtccgttcatccgggaaaagttcaaatgagcagcgtctggatttattttcatcactcattagtcacaccacctttcatttttatcattcccatgactaa

SEQ ID NO: 244294 - DNA, 981 bp, Klebsiella pneumoniae; identical to SEQ ID NO: 8542

SEQ ID NO: 244295 - DNA, 645 bp, Klebsiella pneumoniae; identical to SEQ ID NO: 8540

SEQ ID NO: 244296 - DNA, 414 bp, Klebsiella pneumoniae
atgttttttattgagaatgaaggtcaggctgtcgccagaacggattactggcagtctgtacaggcgcaggccggatatgtctacctcagctggaatgccggcgaagccaggctgcttgtcccggatgcggcaaaacatttactcagggagatgcggggggctgagtacgtcatcatcagtaagggaacgctggatggccgcgatgcgctggaactgatatttgaagacggcagcgatgcgccgtttgtgatccacatgctgagtgagcagtgcgatcgcctgctccccgaaaacaaccagggcgggggttttgttgtcaccgtctggacgcgtggcggtaaccagctccgttatccgggaaagtaccgggttgtggaaaacctgcccgacgtttccccgtggagtgaacactga

SEQ ID NO: 244297 - DNA, 1881 bp, Klebsiella pneumoniae
atgtctgaccctgtacgtattacaaatcccggtgcagaatcgctggggtatgattcagatggccatgaaattatggccgttgatatttatgtaaaccctccacgtgtcgatgtctttcatggtaccccgcctgcatggagttccttcgggaacaaaaccatctggggcggaaacgagtgggtcgatgattccccaacccgaagtgatatcgaaaaaagggacaaggaaatcgcagcgtacaaaaacacgctcagcgcgcagcagaaagaaaatgagaataagcgcactgaagccggaaaacgcctctctgcggcgattgctgcaagggaaaaagatgaaaacacactgaaaacactccgtgccggaaacgcagatgccgctgatattacacgacaggagttcagactcctgcaggcagagctgagagaatacggattccgtactgaaatcgccggatatgacgccctccggctgcatacagagagccggatgctgtttgctgatgctgattctcttcgtatatctccccgggaggccaggtcgttaatcgaacaggctgaaaaacggcagaaggatgcgcagaacgcagacaagaaggccgctgatatgcttgctgaatacgagcgcagaaaaggtattctggacacgcggttgtcagagctggaaaaaaatggcggggcagcccttgccgttcttgatgcacaacaggcccgtctgctcgggcagcagacacggaatgacagggccatttcagaggcccggaataaactcagttcagtgacggaatcgcttaacacggcccgtaatgcattaaccagagctgaacaacagctgacgcaacagaaaaacacgcctgacggcaaaacgatagtttcccctgaaaaattcccggggcgttcatcaacaaatcattctattgttgtgagcggtgatccgagatttgccggtacgataaaaatcacaaccagcgcagtcatcgataaccgtgcaaacctgaattatcttctgacccattccggtctggattataaacgcaatattctgaatgaccggaatccggtggtgacagaggatgtggaaggtgacaagaaaatttataatgctgaagttgctgaatgggataagttacggcaacgattgcttgatgccagaaataaaatcacctctgctgaatctgcggtaaattcggcgagaaataacctcagtgccagaacaaatgagcaaaagcatgcaaatgacgctcttaatgccctgttgaaggaaaaagagaatatccgtaaccagcttgccggcatcaatcagaagatagcggaagagaaaagaaaacaggatgaactgaaggcaacgaaagacgcaattaatttcacaacagagttcctgaaatcagtttcagaaaaatatggtgcaaaagctgagcagttagccagagagatggccgggcaggctaaagggaagaaaatacgtaatgttgaagaggcattaaaaacgtatgaaaagtaccgggctgacattaacaaaaaaattaatgcaaaagatcgtgcagcgattgccgcagcccttgagtctgtgaagctgtctgatatatcgtctaatctgaacagattcagtcggggactgggatatgcaggaaaatttacaagtcttgctgactggatcactgagtttggtaaggctgtccggacagagaactggcgtcctctttttgttaaaacagaagccattatagcaggcaatgccgcaacggctcttgttgcactggtcttcagtattcttaccggaagcgctttaggcattatcgggtatggtttactgatggctgtcaccggtgcgctgattgatgaatcgcttgtggaaaaagcgaataagttctggggtatttaa

SEQ ID NO: 244298 - DNA, 495 bp, Klebsiella pneumoniae; identical to SEQ ID NO: 79141

SEQ ID NO: 244299 - DNA, 474 bp, Klebsiella pneumoniae
gtgagagacaaaaccagggaggccatgcggctttttttaggcggcaggtgctacacggctgaaaaacttgaaaaggattatctggctgaagtggctaattacagtaacgaccgctgggaagcaccgcaacgtgcctcacgcctggctgccagcgtaaagcgttacaagacatcagaaatgctgcgctttatttttgctaccattgcctacgatcccgatccagatttaaccccgctgactgtgagacgtttgtgcaaggcattgttcggcagaaccggaagccagtggctggttgttgaagtttttggggagaaggggcgtcagcaccgcagcgcggacagcaatccggagatggtggaaaaaatggctgccagatatcgtcatgccgccgaactacactggtccgcaacgctggcagaaattgaacgggtaaagcggctttatcagacgaaaattaagaaatccaaaaaataa

SEQ ID NO: 244300 - DNA, 849 bp, Klebsiella pneumoniae; identical to SEQ ID NO: 191885

SEQ ID NO: 244301 - DNA, 282 bp, Klebsiella pneumoniae; identical to SEQ ID NO: 191884

SEQ ID NO: 244302 - DNA, 288 bp, Klebsiella pneumoniae; identical to SEQ ID NO: 79138

SEQ ID NO: 244303 - DNA, 534 bp, Klebsiella pneumoniae; identical to SEQ ID NO: 79137

SEQ ID NO: 244304 - DNA, 684 bp, Klebsiella pneumoniae; identical to SEQ ID NO: 79136

SEQ ID NO: 244305 - DNA, 567 bp, Klebsiella pneumoniae; identical to SEQ ID NO: 19456

SEQ ID NO: 244306 - DNA, 255 bp, Klebsiella pneumoniae; identical to SEQ ID NO: 79134

SEQ ID NO: 244307 - DNA, 453 bp, Klebsiella pneumoniae; identical to SEQ ID NO: 79133

SEQ ID NO: 244308 - DNA, 591 bp, Klebsiella pneumoniae; identical to SEQ ID NO: 19457

SEQ ID NO: 244309 - DNA, 1068 bp, Klebsiella pneumoniae; identical to SEQ ID NO: 79131

SEQ ID NO: 244310 - DNA, 438 bp, Klebsiella pneumoniae; identical to SEQ ID NO: 79130

SEQ ID NO: 244311 - DNA, 1683 bp, Klebsiella pneumoniae; identical to SEQ ID NO: 8476

SEQ ID NO: 244312 - DNA, 1296 bp, Klebsiella pneumoniae; identical to SEQ ID NO: 79128

SEQ ID NO: 244313 - DNA, 1554 bp, Klebsiella pneumoniae; identical to SEQ ID NO: 79126

SEQ ID NO: 244314 - DNA, 1098 bp, Klebsiella pneumoniae; identical to SEQ ID NO: 79125

SEQ ID NO: 244315 - DNA, 615 bp, Klebsiella pneumoniae; identical to SEQ ID NO: 79124

SEQ ID NO: 244316 - DNA, 561 bp, Klebsiella pneumoniae; identical to SEQ ID NO: 79123

SEQ ID NO: 244317 - DNA, 657 bp, Klebsiella pneumoniae; identical to SEQ ID NO: 79122

SEQ ID NO: 244318 - DNA, 1293 bp, Klebsiella pneumoniae; identical to SEQ ID NO: 79121

SEQ ID NO: 244319 - DNA, 135 bp, Klebsiella pneumoniae; identical to SEQ ID NO: 10665

SEQ ID NO: 244320 - DNA, 1155 bp, Klebsiella pneumoniae
atgccgtctccacgcatccgtaaaatgtccctgtcacgcgcactggataagtacctgaaaacagtttctgttcacaagaaagggcatcaacaggagttttaccggagcaatgttatcaagcgatatcccattgcccttcggaatatggacgaaataacaaccgttgatattgctacatacagagacgttcgtttagcagaaatcaacccccgaacgggtaaacccattacaggtaatactgtacgtcttgaactcgcccttctgtcatctctgttcaatattgctcgtgttgaatggggaacctgtcgtactaacccggttgaactggttcgcaagccgaaagtatcctcgggacgagatcgccggctaacgtcttcagaagaacgtcgcctttctcgctatttccgcgaaaaaaatctgatgttgtatgtcattttccatcttgcccttgagacagccatgcggcagggcgaaatactggccttacgttgggagcacattgatttgcgccacggtgtggctcatttacctgaaaccaaaaacggtcactcacgggatgttcctctgtccagacgtgcccgtaactttcttcagatgatgcccgttaatctccacggcaatgtttttgattacaccgcatccggctttaaaaatgcctggagaatagccacacaacgacttcgcatcgaggacctgcattttcacgatctacggcatgaagcaataagccgcttcttcgaactgggtagcctgaatgtaatggagattgctgcaatatcaggacatcgttccatgaatatgctgaaacggtatactcatcttcgtgcatggcaactggtcagtaagcttgatgcccgccggcggcagacacaaaaagtggcagcatggtttgtgccgtatcctgcccatatcacgaccatcaatgaagaaaatgggcagaaagcgcatcgtattgagatcggtgattttgataaccttcacgtcactgccacaacgaaagaggaagcagttcaccgcgccagtgaggttttgttgcgtacactggccattgcagcacagaaaggcgaacgtgtcccatctcccggagcgttacctgttaacgaccctgactacattatgatttgccctctgaacccgggcagcaccccgctgtaa

SEQ ID NO: 244321 - DNA, 825 bp, Klebsiella pneumoniae
atgagactgaatacgaccggtattgcggcccgaatgatgctctcgctggacaaaaaagcaatcggcgaaaaactcatcaacggtcgtcagataaacccgacacctctgcaggtccgttacccccaaggggtaagagaagttctggggataatgagcgaacaattagccatatccaccgctgatttaacccgaatcctgcttgaggatgctcttcataatatgtttatgcctgcggataacaccgcagggaacataataagcagaattgaatacatcatgctgtcgcatgatataaatgcgccattactggcaacattgctgtcgccatggaatatccgctccacggttatacaggacccggccagacttgcagactatctttcagctgacgctctcgaacatcttgctgaatgttttaatctcaatccggactggctgaatggccatgaaaactatccgatagcgttgtccggtgaatggccagatactgctgataatttcagaatgcttattaatgatagcagcaacactgaagttattttctggcatagtttccccttcgcaggaaacacgaaaagagaatattacggggtaatattgagacagaaaaaagaaataaatggttctgtaatatatccggcactatcattatcaccaacaattctgaacgatgaaaaaagaaaatggttaactgaatatacaaccaggcagaatacaacaatgtctttgcgacgcgtcacgttgagacctggccttgccgggaaccttattacagggcaaatactacctgttagcttatttaatacgtctttattaccctggtaa

SEQ ID NO: 244322 - DNA, 1200 bp, Klebsiella pneumoniae
atgaagaaaaatcatattacccgcaccatcattgcatctgctgtattattttcctttaacgctgcagcagcgacgtcatattttgaagcacgtaacgatgcaatggggggcaccggggtagcatcttcccattatggtgtggcacctctggcaaacccggctttactgacaaagcacaacagcaatgatgatttcagccttcttctgccgtctgttggggcacaagttgctgatcctgatgatgtatcaaataaagctgatgatgttaaagatgactgggatttgtttgatagtgctgttgataaccagcatggcgtacaacaggcagcagcaaatcttaaacatcgtctgcaggaattccgcaatatcaatgcagatgctcaggtaggtgtatcagctgtagcagccatggcaaatgacactctgccgtttgcccttatggtcaagtcttacggaactgtcagcgtaaacggaaaagtaaacgatgcagacctggattatctggacaaagttgccaatggaacaattaccgacgtcgataagaatgccctgacctcacgcgcattcgggcgtgcagctgtaattaccgacgtcggaatttcatttgccaaagaactggaaacggccggacaaaaatggtctcttggcgtcacaccaaaatatcagcgtgtggacctgtttaactacaacgtaacggttcgtgattacgacaaagacgattttgacggtgacaagtaccacaacacgaaaaacggattcaacgccgatattggtgcttatacagacctgaatgacaactggactgtcggtcttgttgcccagaacatcattccacgcagtattgatactaaagtcgtcaatggctttaaagaaaccttcaaagttcgtccacaggcaaccgccggtgtatcctggcataatgacctgtttaccactgctcttgacgttgatctgactcctgccagtggcttcacttctgacagcaaacgtcagtttgcaagtgttggtgctgaatttaacgcatggaaatgggcgcaattgcgtgccggttatcgtcagaacatggcatcaaactccggaagcgccttcaccgctggcgttggtatctctccatttgacgtcgtacatatcgatgtttccggcctggtaggaactgaccacgattacggtgcaatggcacaacttcagttcactttctga

SEQ ID NO: 244323 - DNA, 594 bp, Klebsiella pneumoniae
atgaaaccacgttcttcttattcaaaaacagcattcattcttttattttctgttttcctggtagcggcagtgacaaaagcaaaaagctcgcttcccgatatcaccctggaacaggcaaaagaaattaatgctgataacaccgttattttccttttccgccatggagaacgttgcgaccgttcagatatgccatgctattcggataaaagcggaatcactattaccggtacagagaaagcacagcaggaaggtattaagttcgcaacaatcttcagtgaatatgatatttactccagcaatgcggtaagaaccatacaaactgcaaaattcttctccggtaaagaacccgtcgttatggacagtttatcagactgcaataatgatctttataagacgcttgaatcaatcgcaagagaatctcataaaaggaacatagtaataatgacacataatcattgtttatcatttctggccagagataggctcggcaagaaattcaaaccggcgtaccttgatgccctgatcatgcattacgatggtacccggctcatacttgacggaaaatacggcactgttgcaaatagtcggtggtga

SEQ ID NO: 244324 - DNA, 930 bp, Klebsiella pneumoniae
atggataatgtcaatttcccggttattggacagcagcaagatctagaccttttcccggtaaaagagattgaagtcgatggtattcaaatgggggttcttaataacggcaccccttacttaactatgcgcgggttatcgaggctgtgtggtgtcgattctgcaacaatggttagatttaccaccaattggcaagaagaaagatccaagccgagaggtaaaaaaatcgatgcgattttgcaatcaaaagggctttttatagataagctttacactactgttgttagtcaaggtactgaaacgcatgcttatcctgatactgtctgcatggcgattcttgagtattatgccttcgaagctgcaaaaaatggattattcgatagcacaacagcgcttcaaaattaccgagctttagcagaaagcacactacgacgcttcatcttcttgagcgtaggaattgatccagaaaacccacttagaggcgcccttgagtgcttccatgaaagacttctgatgaatgatcaaattccgcttggcttcttctcggtgttcagagagatggcagatctttctttacggatggtgagacaaaattttaattttggtccaggagcaataccggatatcagcgtgggtatgctttggtcaaaacactgggtagcatcgaatcttgatgccaaatatggaattcgaattaagcatcctcatgtttaccctgattggttccctcaggccaaagcaggcccagtagaggcatggatataccctgatgatgctttgggtgagttcagaagatggatgcaaaatgagtacattcaaaatcgcttaaccccttaccttctgaaaaaagttagcgatggcagtctccctaaaattgatgcaccaaaaatcattgaagcacttcgtaagccagaattaccaaagccacactga

SEQ ID NO: 244325 - DNA, 246 bp, Klebsiella pneumoniae
atgacaggcaaagacgcaattctgaactacctgaaaacgcataaaacctgcagctctccagatgtcgccgcggcttccgggatgacgcatacctgcatcaaccaggctgcaaatatcctggcaaagcagggggtgctagtagcggaagctcgggtgtgccgctggattatgtttcagaaattaacatgtacgtttcccgcgatgttaatgctgaaaacccgttccctgccaccgatcgcatcgtag

SEQ ID NO: 244326 - DNA, 285 bp, Klebsiella pneumoniae
atgaaattcgaagaatggttagcacaacaggatggcgtcattgaggttgagtgcggctgtgttaccactgaagctttttatcactggatgcgcgtagcttatgaggctggcaactctccggtagtgccggatgatgtgtcgatattcgaagcggcaattgaagaatgtaaaacgtgcgactcaattgatgagcatgcctggaatcacggtgttttggctgtgatagcaaaatatgaatcctgccgcgccgccatgctcgcagccgccccgcaggaggtgaagtga

SEQ ID NO: 244327 - DNA, 216 bp, Klebsiella pneumoniae
atggacaaatgccagggcattttcggcaagatatttggtcattcattccgggtggcgataacaaaaggcgcacctgacttaaggctaggcgaatatcagggtggtagaggcgttctgttagacattatggaaaaaactaggaccgaaacctatcacggaatttactgtaagcgctgcgggaaggttatcaatgccgcagagaagggggggaagtga

SEQ ID NO: 244328 - DNA, 642 bp, Klebsiella pneumoniae
atgaaaaaagaaaacgaaaaagtctggtctgaattagccagagttcctcggcgatcatatttaggtaagtatcgtcggcttactccatctcaaaatcgctgggttagatcccttcttaatcactggggctctgtatttggggggagtggaactgaacacctttcaggtggcggcgggatgtggtcaatgataataaccgggtggactggggagcagcaggaaaaaatcactgatgttctcgccaagcttcgcaagatgggttacgaaggtgcaaacctcatagtcatggcaaaagcgcttctatggcctaaaaaatcactatctgacatcatcggtaatgcaattgatcaggatgaagctgactttatggaagcaataatccttaaagcgtttccaaaagagacgatgatttacaccattggtaaaaactactacaaaagccggcagccaatggttgatatggccagatggatgcaatatcactacgcgccatttcttaccgaaaagcagtgtatcgatagggtgaggtggtgcgttgagttgtttaactctgctgtctatttcacactttgtgcagaacttagcatcgaaaatgaggttaacgtgaaaaaagacttgaaaataagttttgaaactgcataa

SEQ ID NO: 244329 - DNA, 732 bp, Klebsiella pneumoniae
atgaaagttatcaaatattggaaagttcagcttctgcagctttctcagccttccagcattatcaccgcccgcaatctggtcgaaaccctgttgtttgaggggtactcgaaagataaaccgaaaattaacctcggttccggagtaaatattgagttatttacagcgcccgactcgctggaaacacgcatcttccgagataacctcattgacagcgttcgttgcatcccggtatgtgagagtgatgatgagggtgatgatgaaattgacggaaatcgtgaagagcagactaagccgccctcacgcgaagccatgattgaatatatcaagcaggctattggtgaaggttatcagcctaaaacctgcgatgagctcattagcaaccctgatctgatttggttcttgcatgacgaagcgatcgattatgaatatcgcgcttgttggcgctggtaccaaaacggtcatggttttcatgagacttttagcggccccgagaaaatccacgatcacacctgcgtaaactgcttccttgggcgcgttccgtgccttggtgactgccatgtggctgacgttaacaaggcccgaagttcttccttcgaagacgttgtgaagccggtaatcaaatggctgaacgaaaacgccaaccatcatgcatcggtcaccgttgattgcaccagtgctcagttgcttaccggtgagatcggcattcacacggaacagttcattaaggactga

SEQ ID NO: 244330 - DNA, 384 bp, Klebsiella pneumoniae
atgaagtatgtgaatctgggtcgtagcgggttgaaagtctcccgtctttgtctcggttgtatgagttatggcgaacctgaacgtttgcctcaaccctggtccctggatgaaaaggcgtcacgaccgctcattcgtcaggcgcttgaagccggcattaatttttttgataccgcgaatatctactcgggcggtagttcagaagaaattacaggaaaagcgctgagagagatggccagacgcgacgagatcgttgtagcgacaaagaccttctttccgtggcgcaactcacccaataccgggtttctctcccgcaaggccatttttaagtctattgacgatagcctgatgcgcttaggcatggattatgtggatctctttcaataa

SEQ ID NO: 244331 - DNA, 237 bp, Klebsiella pneumoniae
atggttacgctttggggaaattatgaggggatctctcaggattacgcctgcgcccgcgcgcgggtggtggattacgacttcgccaccccgtggatgcagttttttgacagcctgcagcagagcacggcgtatcgcatcgccccccagccctgctttgaggtctatcttaacgacggcaaccacgacggctactgggatatcgacatgtatgttcccgttgagcgcgtcgcgtcgtag

SEQ ID NO: 244332 - DNA, 252 bp, Klebsiella pneumoniae; identical to SEQ ID NO: 15676

SEQ ID NO: 244333 - DNA, 684 bp, Klebsiella pneumoniae
atgcctctcgtggtgaacggcatgaaaatcattaataaaaaagcccgacaaattgagtttgtgggcttaaaaatattgtcgcttactgagattagcatggagcctgagagaacgtctgttagcttctctattcagcttccttgctctggcttaattttcctgcgctggcggcgtttgatctcactttgcatggatgtaatgatgaattgtgacgtactttcgtcatcttctttcaccatttccatcgcttcaactacgtcatgtggcactcgtgcctttaaggcttgtgatttagcattctttgtaccggtagccattactgaatctccgtatgtttggtgggccacagtatacacgggaaaagaacaaagaaaagcattgacgtgggccacacctggtatttatagtgggccacaccttaagtgttctagagtgaaaaaggcaaagcccggcagtgcagcaacactaaccgggcctctgaccaatccgctgtatgaggaaacgaagatggctaaacagaagtgtacctggttatttgcggcgatcaaccgcaatcaacgcaatgcccgtcctgtgatgttaaggatcaccgcagataacgagcggtcagcgcggcgcagacttgccccggactatgtgctgagctttgccgggcgcattccctgcggaggtgaacatgcgtaa

SEQ ID NO: 244334 - DNA, 360 bp, Klebsiella pneumoniae
gtgcagagcgtgacttacggtaccatcgtgcatacgcgcgccgtacagatccagagcggcgacgatagcaatgccatcggggccattggcggtgcggtactgggcgggttccttggaaacaccatcggcggcggtaccggacgctctctggctacggcggcaggtgcggtcgcgggcggcgtagccggtcagggcgttcagggcgcgatgaataaaacgcagggcgttgaactggaaatccgtaaggacgatggcaataccattatggtagtgcagaaacagggcagcactccgttctccgttggtcagcgcgtggccattgccggcagcggcagccaggtcaccgtctctccgcgataa

SEQ ID NO: 244335 - DNA, 1185 bp, Klebsiella pneumoniae
atgaaacggcataagaacttcaatttgttgttgatgctggtactgctggtggccgtcggccagatggcgcagaccatttatattccggccatcgctgacatggcggtcgcgctgaacgtccgcgaaggggcggtacaaagcgtgatggcggcctatctgctgacctacggtatttcacagctgttctacggcccgctctctgaccgcgtcggtcgccgaccggtgatcctcgtcgggatgtcgatttttatgctggcgacgctggtagctattaccacccatagcctgccagtgctgatcgccgccagcgccatgcaggggatgggcaccggggtcggcggcgtgatggcgcgtaccctgccccgcgacctgtacgaaggcgctcagctgcgtcatgccaatagcctgttaaatatgggtattctggtcagcccgctgattgccccgctgctcggcggcatcctcgacaccctgtggagctggcgcgcctgctacgctttcctgctggtcctgtgcgccggggtgaccttcagcatggcgaagtggatgccggaaacgcgcccggaaggggcgccgcgcaccaaacttctggccagctacaaaacgctgttcggcaccggcgcctttaactgctatctgctgatgctgatcggcggcctggcggggattgcggtattcgaagcctgctccggggtgctgatgggcgcggtgctcggcctgagcagcatggcggtgagtattctgtttattctgccgatcccggcggcgttcttcggggcgtggtttgccggccggccgaacaagcgtttcccgaccctgatgtggcagtcggtgatctgctgcctgctggcaggtctgatgatgtggatcccagggctgctgggcatcatgaccgtctggaccctgctggtgcctgcggcgctgttcttcttcggcgccgggatgttgttcccgctggccaccagcggcgcgatggagccgttcccgttcctcgccggaaccgccggggcgctggtgggcggcttgcagaatatcggctccggcgtgctggcctggctgtcggcgatgatgccgcaaaccggtcagggcagcctcggcctgctgatgatgctgatgggcctgttgattctgctgtgctggctgccgctggcctcgcgcttcacccaccatcagcagccggtataa

SEQ ID NO: 244336 - DNA, 2436 bp, Klebsiella pneumoniae
atggctggcaagtcccttggtacgttaacaatcgacctgatcgcaaaagtgggtggatttgttcagggtatggacaaagccgaaagatcttctcaaaagtggcgcgaccaggtaaaaaaggatgctaaagaggtaagctcttcaatcatttctgtgggtgctgcggcggctacagcagctgttggcattggtgctgctgggttagccattgttaaaaatactgcacagcaggttacagaagctgatcgctgggcaaaatctcttaaaatgtccacccaggatttgttatcgtggcaatacgctgctgaacaagccggtttaaccggtgacaacatagccgatattttcaaagacattaatgataaggtcggcgatgcggtcctgaataaatcaggtgaggctgctcaggcgctggatactttggggctttcagctcagaagctggctcagcaatccccagataagcagctgatggcaatcagtgaagcattacagaaaatccccactcaggccgggaaaacaaatattctcgaaagtctgggtaatgatctgtcaaaaatgctgccgttgtttgataacaacaacgaaaagctgaaacagtttatccagttatcaaaagattttggtgtcgctccaccgcaagaagatattgataaccttgttaaggttaatcagttctttcaggacatagagactagcgcccgcggccttaaaatggaaattgcttcggggctggctaagattgaccttacaccattgcaggatgggcttgatgatattcgtgacgtcttcaccgatcctgctgttcttcaggggctatcagacctagttggtgaagccataagccttgccggggttgtggggcgtattgctggtggcttgggggccattgctacttatacccgctctcgtatcggtgctgtatctggtaattataacgctgctgatgaaagtgatattgcacagcgcattgcattccttaacaaacgagggaatcaaagtaaggaacaaaaagacgaattagactttttaactaaacgtcttcaatttcttcgcgcgataaagtcaagcatgactccggagcaggtagatagaggagcgaaagggctcacctctctactttctgatcttggcattgacacttctaaagataatgatttttcgttgggcaaaggggagtctaaccagaaccagccaaaaacaaaaccaaaaagcaatcctactgacaatgctttcaaaaatagactgcttgatttacaaaagcaagccgccctgattgaaacgactggtaaaaaaacagccgaagttaccgagcttgaaaagataaacttcgatatttccagtgggaatcttaaaaaattagcagaagcacaaaaagagcaattgagagatgcagcgagagttctcgattccaaaaaagaagaacttcggataaacaaagaaaatgcaaagttagctgaatttgcatcaaatcttgaacgccaaaataagttaattagacaggggcatgaaagtgagtttgttggtcgttattcgggctcaagagaaagaggtagggcgcaagagttaaatagcattcagttagactttgaatcacaaaaagaggatttattaaagcagtatcaatctggtgatataactaagagtttgtatgattctgaaacatcagctttgcaggatgctctaaatcaaaggcttgaaattcagaaggattactataagcagcaggatgagatgcgtggtgattataacgctgggtttatatctgggtttgctgaacaagcaactgccgcaatggatttgtattccaccatgcaacaggttggtgcgcaaacatttagcagcatgaccgatatgatcgttcaatgggccgaaacaggtaaattaaatgctcaagattttgcagcaacgtttattcaatctgtaggaactgcgctattgcaatatgcagcagcgcaagtcgccatggctgcattgaatgctttcacccaatggataggggttccttatgttggtcctgctgttgcacctgcacaagcaatagctgcggcagctgctgctggcgtgttcatgactgctatcggatcggcgcttcatggccaggctcacgacggtatcgactctgtgcccgaaactggaacctggctcctgcagaaaggtgaacgcgttacgactgctaaaaccagcgccaaacttgatgccactctggatcgagtagcaaaccagtcaacagggggcggcgcgatttattcgcccacaatcaatatccccatcaatggtaacccttccgatgcaactttggcgctggtccgtaaagctgcagatgagggggcagaaaggggataccggaaggcggttaattcagtcgcaagcggtcagggtgatttgcataaggccttgatggggaaaactacctcggggaggaaaattagctaa

SEQ ID NO: 244337 - DNA, 483 bp, Klebsiella pneumoniae
atgactcagattaaacgcctttacgccagcagcggcccggagctgatcattgagacgctgcagatcaccattggttctgacgtccattatctgtgccagggctacgagggtattacggcaacgacggagaacggcgataccgtaacgtttaccgcctgtgcgatagacattgctctgccggcgcgcaatgcggacggcacgcaggacctcaaatttgccctgtgcaatatcgacggtgttgtgtccacggcgatccgcaatgccctggctaacagattgcctgcatcgctgacgtaccggcgttatatctccacggatttagcggcccctgcggaagtgccgtatacgctgaaaatcaagtctggttactggacggcgacagaggcgcagattaccgcgggttatatgaatatccttgataccgcctggccacgttaccgctacacgcttcctgtattccccggactgcgttacatgagttga

SEQ ID NO: 244338 - DNA, 735 bp, Klebsiella pneumoniae; identical to SEQ ID NO: 232852

SEQ ID NO: 244339 - DNA, 327 bp, Klebsiella pneumoniae; identical to SEQ ID NO: 233161

SEQ ID NO: 244340 - DNA, 141 bp, Klebsiella pneumoniae
atgatgtccctctgggatgcgctccggatgaatatgatgatctcatatcaggaacttgttcgcaccttccctagcatttgccatgaagtattatttagcaaaaatgcagacaagttaatcctgatgcgaaaagagaattaa

SEQ ID NO: 244341 - DNA, 234 bp, Klebsiella pneumoniae
atgacggaactggaagggcatttgctgaacgccttagagcatttgcaacaggactatatgcggcggctgaacgagtgggagagcgccttcgcggaattgcagaagatgcacgaggttacgcaacggaacaacgcgatactgaacgagcgcgtcgtgatattgagtcagcaggtgcagagattagccgggcaagtggatcgcttgagtcggttatttatcgcgaacaacagctaa

SEQ ID NO: 244342 - DNA, 561 bp, Klebsiella pneumoniae
atgagcaatcttttacaaatgggaacagacttcgagaagaaactgaaagagcgagccgcttctaccgagaacatgctgaacagcgagttcaggaagctcgaagagtctgtagacaaggcattgagcttaaacaggcagaaaatcagagacgctatcagcgaacatacaacatccgtgaaaaagcaactggatacgctgagcaccaccgtgagcatgcagttcagcaccacagaggccgaactgtcccggcagcagaaaaaactgctctggcgggtgatcaaagggcggatactgtttccggcgctgaccgcgctcagcgtcacgggcggcattttcctggggtgctgggggctgatggagtggcaggaaagcaagattgcgaaaaatatcctgactatcagagagcaggaaaacacgctggcgaaactcgaggcaaaaacctggggggtgacgttcgtcaatggcgagaacgggaaatttctggtgttgccggacggggtgaaaggggaaaacacctggacggtgggcgacaagaacgccgtgaggctggtcagggagtaa

SEQ ID NO: 244343 - DNA, 369 bp, Klebsiella pneumoniae
atgggggatttgttagggggaatgataccgatgaaacgcgagaagatgctcacgatacgggttaccgatgaggagcacgcccggttactggaacgctgcgagggtaaacggctggcggaatggatgcggcgggtctgtctgggggagccggttgcacgcacaggaaaactgccgacactatcgccgccattgctgcggcatctggctgccatcgggaacaacctgaaccagacagcccggaaggtgaacagcggccagtggtcttcgattgaccgggttcatgtggtggccgcactgatggccatcgagggtgaattgcgccagttgcggcaggctgtcagggaacagggggtacgggatgatagttaa

SEQ ID NO: 244344 - DNA, 372 bp, Klebsiella pneumoniae
atgggaaacggatggcatgaatggccgctgatggtctttacggtcttcggccagtgcgtcgtaggcggctttattgttctggcgctggcgctgatgacaggcaagctttcccgtgagcaggagcagcgcgtggtgggcagcatgttcggactgtgggtattgatggggatcgggtttattgcctcgacgatgcaccttggctcgccgctgcgggcctttaattcgctgaatcgcgtgggagcctcgtcgctgagtaatgaaatagccagcggggcgatcttcttcgccgtcggcggaattggctggctgctggccgtgtgcaaaaagctgcctgccggcctgccggcctgcggagcctgtggctggtggtga

SEQ ID NO: 244345 - DNA, 189 bp, Klebsiella pneumoniae
atgggaataaaaagtatacggattaaaaacatactctcctttgatgacgtatatattgatagctttgaagattttaatttgattattggtagaaataactctggaaaatcaaatcttttaaaagtatttaaatacttttatgaaaaattcgaattacacgccctctggaataataacaattacatatga

SEQ ID NO: 244346 - DNA, 1047 bp, Klebsiella pneumoniae; identical to SEQ ID NO: 205959

SEQ ID NO: 244347 - DNA, 174 bp, Klebsiella pneumoniae; identical to SEQ ID NO: 205958

SEQ ID NO: 244348 - DNA, 210 bp, Klebsiella pneumoniae; identical to SEQ ID NO: 205957

SEQ ID NO: 244349 - DNA, 315 bp, Klebsiella pneumoniae; identical to SEQ ID NO: 205956

SEQ ID NO: 244350 - DNA, 372 bp, Klebsiella pneumoniae; identical to SEQ ID NO: 205954

SEQ ID NO: 244351 - DNA, 372 bp, Klebsiella pneumoniae; identical to SEQ ID NO: 205952

SEQ ID NO: 244352 - DNA, 588 bp, Klebsiella pneumoniae
atggaacaaattaagccagaccagcatttggattatgcctattggacattcatgactggaacaagaccttttcaaggtattgagatgattatctcgaacatgatcaagaactttaaagaagtcacaaaccatccatgtggatctttcagtgctactaatgacatgattgcaagaattgcaattagtgatacagcaatcgtcatgtcatactcattgcttgagggtttttttcatgaagaattcgagcactacgtgaaaaatgagaagtctaaaaagccaggagaattaagtgctttgattaacacagtatttaataagcaaaatataactatcaaagactggcgaaatagaagaaaggtagttgatttagtgaaggatctgcgcaatgcggtggtgcacagcaatggactaatagataatgatgtttataaagagaagtgtatagaacttttggaagaagatttttttgaatgtactgctcattacccaatactgacttttgacgggtcactctggctactaaaagaatttaaaagcattgctgatgaatattcaaaagcagtttttattgggcctgacaaatcatag

SEQ ID NO: 244353 - DNA, 294 bp, Klebsiella pneumoniae
atgacggtgcgcgttgactgggaaaccggggtgggtgatacagaaggttcccctggctttggtaatgatgaaaagtaccttgcctgggttaagaaaatgaaggctcagaaccgtcagcacagcaaaaccgttccgctgcctgactataacggccaggatgtgtgcggcattacggtgcactttttaccctgcgatgacgtgaaggtgactaccagctgctggtcaccgagaaatgtgaactatccgataaaagagcccgtcaggatgaaggagcctgccgtatgtccgaagtag

SEQ ID NO: 244354 - DNA, 423 bp, Klebsiella pneumoniae
atgggtgatatgaaagaagaaaataaaaatttcgccttccgcataaacctgatactgcagcaaagtggctggaacctttccgagcttgctcgcagggttatggtgagcccacaagcgacccatcagtggtccaggggtgatacgacagccagaggtgaacgcctgaagaggttgtcggctgctacaggtaagcccgggcactggttctttttacctccgggtgaagaacctactgaagaagagcttcaggaactggaccgcgccactccattagatgacaaagaaaaggctttactggcacttttcaaccaaatgcctgaggctgagaaaaaccggcttatcgtccatgccaagggtgttttaaaagagctggacctgctaaagggtgatgttgctgacatcataaaaaacatttctaactaa

SEQ ID NO: 244355 - DNA, 228 bp, Klebsiella pneumoniae
atgacccctgaattaaagaaccagatttgcacactcatgagtcaaacagagattgctgttgctttgggaacaaagccacaaacagtaagcctgtggttgagtgggcaagtgcctgcgaatcgcgttattccattatgtcgagtgcttaattggagcgttacgccccatgaaatgcgtgaagatatttatccaaacccaactgacggcctgccgaaacaggaaggctga

SEQ ID NO: 244356 - DNA, 480 bp, Klebsiella pneumoniae
atgcaggaaattaataatcaacgaaaagcgtttctggatatgctcgcctggtcggagggtacagacaaagtgggacaaccaacaaagaaccgaggctatgacgtcattgttggtggttcactctttactgattacagcgaccaccctcgcaagttggtgagcctgccaaagctgggtattaaatccaccgcagcgggccgctatcagctgctggccaagtggtgggatgcataccgtaagcagctgggactgaaagacttctcaccggcgtcgcaggaccaggtggccctgcagcaaattaaagagcgtggagctttgccgctcattgacaacgggcagcttcttcaggccatctaccgttgcagcaatatctgggcgtctctccccggcgcgggctacggccagtttgagcataaggccagtaacctcatcgcaaaattcaaagccgctggcggcgtcgtagcggaagttaaacaataa

SEQ ID NO: 244357 - DNA, 183 bp, Klebsiella pneumoniae
atgcgactctttaagaagcttctgatgaaccgcagccctaacatcttgatctctcataacttccccccccatactccgtcgcagaattatagcgcacagcattttactgcatttagcgaatttggccacttctatcacaaaaagcacataatcagcatgaagacactgatgaatcaggggtaa

SEQ ID NO: 244358 - DNA, 1227 bp, Klebsiella pneumoniae; identical to SEQ ID NO: 148463

SEQ ID NO: 244359 - DNA, 558 bp, Klebsiella pneumoniae
atgagcttacattctactccagatattaaacttgatttaatgtgcccgtacatggttgaaacagcattcaactattttatgacggctcagaccgcatcccataaaaaaggggtaatacaaaatgtcttatcagcactctctattgaaataattataaaaagttattatgcggtcatttcggataagaaagggtctattgatgagcgatataacattgaaaaaaagaatcaaacccaccgccataatttgcgcgatatgttagaaaagttaccgcctcacataaaagaatatcttttctctgaaacagatcttatcatcatttcaagaaacccagaaatcttccagaacagcagatatttatatgagcctggtgtttcctcaagttctctggatgcgttagatagacttgctgctagtgtgatttataaaaccgtaatgctgtataaacataatgaatgcgaagacctattcattaggctttttggaagagaggggtgtgattcctataatttttaccgtttatacgtttcaaagatttccgggtatgcgtatgtttag

SEQ ID NO: 244360 - DNA, 231 bp, Klebsiella pneumoniae
atgaaagtgttaaaaccacaccagcagcgcctaatcgtcgagcatgacgaactgaaggcgaagattgaagcgcttgagaaatttatcgccgaaagccctattttcggtgatctgcacgatattgagaagaaagccatgaagctgcaactcaaggcgatgcgccattatttgaaggcgctggacattcgcattcagatgcaagaaataaaaagtgaaagaccagcacactaa

SEQ ID NO: 244361 - DNA, 246 bp, Klebsiella pneumoniae
atgaaaatcgttatttatggaaaggacagctgctcttactgcaaacgtgcggtagagcttgctaaacaattaaaatatcagggtcatggtgactacgagtatatcgacattgtagaagccggcattgacgccgttgcgctgggtaatttggttgggaaaccggttcgaacggtgccgcaaatcttcgtcgatggcgagccaattggcggttacactgagctgtccgcattcatgacttatttataa

SEQ ID NO: 244362 - DNA, 321 bp, Klebsiella pneumoniae
atgaaatttttactcctcgcaccgaccctcctgtttagcactatcgttggcgctgagacgcagcagctccccggcagcgagaaggttgtcgccaatactcaaacgttgatggaaaacgcctgcgccagctccactaacaaagaagagtgcctctctaatgccgctcgactagcctcatattctttcatagtcggcaatctcgttgggagttgtgacatcctgtatacatccaccgagagagttacttctaaagagtgcgagaacgcaaggaacctgtctaacgcgtttacgtctttaacgaatcgtaatgaaaaaagataa

SEQ ID NO: 244363 - DNA, 537 bp, Klebsiella pneumoniae
atggaacctaagagagacttcacatacggcattgaagcagagaaggaacgcaaccttggcaagacgatggagtacttcaagttcattaattcaaagcacatccctgtcagagtagtaatagctaacggccggtcgttttgtatgaatgtaactaatctcgatcaaagggcaaaacgaatatatctaggcacattacccttctatgagaaagataatcgcatcatcatccccgtcgactacatcatatcggtagagcagatccttgtcagcgatatcgaaacagcctataagggtcaattgacaataagacgtggtgatttagaggatgagggatgcaagcgctcaggccgtgacttcttccaggtaatcagattcgcccaccagcaggataaagctgtaagggtatatctttcagacaatcgcgtcatagaaggagtatctacaggcatgaacgagcaatctgttggtctaaaattggtgatgggaaataaaatacagctattttatgattgggtagaccgtgtggttcccatttga

SEQ ID NO: 244364 - DNA, 552 bp, Klebsiella pneumoniae
atgcgagccatcacgaaaaaatctgacacagtctcggaaaccgaaatggtcgatgttttgaaaaccatggggtgcgttgagataaagaaaaaagataatgatattaggaaatataatcatctctttctaataaatgataatatcagtgaagacagtgctccgggatttcattttgtgcatgttaggaggtttagccaagaaaaatatgaataccagtttataacatatccatttgagataaccaaattcggcagattgatagaagacataagcgatgttgaattgggattctctcgctctttatctggatttacaaaatatccgaagatcgacgctaaaggagttctctatgaaaaaggcggagagtccaaatcgggcttgggttatgctataatcattcacacttgcgacggtttgaagctcttgattgaacgtattcgcaaaaatattgatgacggtctgctgtccgacaaattcgataaaaacagcattcgccaaaacgaagacctgaaaatcttttatagatctcgaaaaacaatattggaatcataa

SEQ ID NO: 244365 - DNA, 444 bp, Klebsiella pneumoniae
atgcctgaacaaaaaatgaaaatcacggatgaacagttttcggatttcacagggactatgttcaacaccccgtttaccaaatccatctctgatgtaccaatgacggtctatcgacagaatcggctgacagcctgcttccagtcaaaaccttaccaagatccgccgcccgtgatccacgtccagtccgttactgtggcgccagcgaaagcgtcggtcactgttgaaagcaccgtgcagcttggaggctcaattaaaccggataacgcaaccgaccgctcattccattgggtgtcggataacacaggtatcgcgaccgttgattcttctggtctggtgaaaggcgttgccgctggcactgtgaagatccgtcttgttgctaccgatggctccgtaacaggtgaagccgttgttactgtcgaagctccggcagaagcagttgtttaa

SEQ ID NO: 244366 - DNA, 1185 bp, Klebsiella pneumoniae
atgaaccctaagcaggtcaaaagcatcaaagatactttttctgatttaatcgacgaaattgtggtgaaagtcaatggaatttcgtttagagaaagaactcaggataattttaaaaaactctctgataagttaaactctcaaaataaagcctccacatctcttgatgaacaaaccgctacttgggcattcgtagatgcagtaacattatttaacttaaaaaaaaatctatccgtaccattttttgaaaatattcaaataaacgaagagaccaaggctgagttaatcgactatctttttgattactttatggctctaccccacgaatacaaaatcgcaattccgttacacaatcttaatattccactttttaaggaagataacaataacattgaagtattagatctggggattggacttcttcatgatgaatctccatttaatgccttaacaaatagatatttacgactgacagggagtgggtatttaacatatcgaaacgccacgcatggggttaaaccatacctacaagatttcaatgtattcttatactgtttcacaactgcaaaaatcttcaaagtaaagagtgatttattaatacatagatatagtttcgaaaacaccctcccggggagttccaaaaaaatccctattttgcatgcaaaaataaaaaacacaagtcgcgagcaattacttgacacttttgagctaccattgcaactatctaaatttttggatgatttagagttcagtaaagatatggcgtatctttcaaaagaaaaactgagatttataaattcattgataaatgataattctgatgcggccaaatatataaaggcagcaatggactggtatgtgaatgcaaaaatggccatggatgaaaccatgtcattcattcaaatatgcatgggtctagaagcactattaggcgataaaagagaacaaggagcaggtatcacacaaacattgtctgatagatgttcttatcttatcgggaaaggtatggacgatagaaatgaaataaaaaaacaattaaaaaagatttatgaactacgctctgcaattgtgcacggcctgaaaaaccgcattaatgcatcagaaaaagaatatgtgaacaatgcgactgtttttctgcggagagccataaaggttgaatgccagtttttggaatattttaaagagtag

SEQ ID NO: 244367 - DNA, 288 bp, Klebsiella pneumoniae
gtgaccaccggcggccacaatctccagcgctcgtttgccctgctgctggccgataacatcgagcagatcttcgtagcgttcatcccgagcaggcgcctcggcgagaggcggcgaaagcgatgtctgccccgcaagaaatgcgcaaacctcctgcagatggtcggcgaccagacaatcgctgccgccgatcaggccgacctccgccgcattgtcagaggagacgacaatgcgccggccggctttgatggcctccattgcgctggggatcgcccctggaacgcctcgtaa

SEQ ID NO: 244368 - DNA, 996 bp, Klebsiella pneumoniae
atgcataaagcggaaggtttgatcgacgtgatcgttgacgatagtcaggtcgagcttgtagtgcccggcaatacgtttccagtattcgataccggacccgcccagcggatcgatcccgagcttgaggccggctttctgaattgccgccatgtcgacgatatccgccagcccttcgataaacggctgtaccagatcctgctttttaacatgaccggatgccagtgccgcatcgagggagatgcgcctgacgccctgcagacccgaggccagcagttcgttagcgcgattctctaccactttggtgacgttggtatccgccgggccgccgttcggcgggttgtacttaataccgccatcttccggcgggttatgagacggcgtgatcacgatgccgtctgccagcggaccaccttttttgttgtgcaccaggatggcattggaaatggccggcgtcggggtgaaaccgttgtgttcctgcacgataacatcaacgccgttggccgccagcacttccagtacggaaataaaggccggttcggagagcgcgtgggtatctttacccacgtagcagggaccggtaatcccgttcctggcgcggtcttccgcaatcgcctgcgcgatcgccagaatatgctgctcattgaagttatggcgccctgcactgccacgatggccagaggtaccaaacttcaccgcatgctccgcgttgcccgcttccggcctcagtacgtagtactgcgcggtcagctgagcgacgttaatcaaatcactctgttgtgcaggctcccctgcgcgtttactgtccgtcatttttctctcctgtcatatccgtcaggcttatttatgtgttgctgccgggtcgctcatcgacggggccggtctcctgccacccgccccggcgtttcctggttgtcagtacgcgctcagagttgcgttttgtcgatataccagatcttttgcgcatactcccgcaccgtacggtccgatgaaaaatag

SEQ ID NO: 244369 - DNA, 1428 bp, Klebsiella pneumoniae
atgaagtatatgcataaaaataacatagtcagtacaagtctagcgttgtctgacttagtcagttttgctatttcggtcggcttagtactaggaatccatgccttatgtactacagatttcaatcataccttgctgatgacacagctagaagggtggttcacgctgcatgctattgttgttcttggctgtgtcggctggtattcagtccgcctgcggcattatttttaccgtaaaacattttggttcgaattgaaagaaattttgcgaaccttagtaattttctcggtctttgaaacatcaattattgcttttacagactggttattcccaagtgtcatctgggcttctatctggatcgttacatttatattactgccaacactgcgcatgacaactaaacgtctactagatatagttggcctctggaggcgtgaaacatggattctgggaagtggaaaaaatgcagttgaggcctttaatgccgtaagcagcgaacgtaatttaggtttatcagtaatcggctttattgctggcgaagctaatagccaacaagttagtgctatcgcagggatccctgtgattaatcctgatgctgaatggttagctctacaggataagaaaacacaattcattgtagcggttgaaacgaaccaagctgacttacgcaacgcttggttaagaaattttatgatcaaaggataccgttatgtttcagtcatccctacattgcgtggcatgccattagatagcactgatatgtcctttatttttagccatgaggtaatgatcttccgcgttcaacaaaatctggctaaagtttcttcaagggtactaaagcggatttttgatatttttgggtcactcgctcttattgttattctttctccagtcttaatttatattagccgtaaagtgaaaaaagatggtgggcctgcgatttatggccacgtgcgggtagggaaaaatggaaaatcttttaaatgccttaaattccgttcaatggtggttaattcaaaggaagtattgactgatgttcttgccaatgatcctgaagctcgtgctgaatgggatttaaactttaagttaaggaatgacccgcgcgtaactaaaataggtgcatttttgcgccgcacaagtctagatgaactacctcaattatttaatgtgctaaaaggggaaatgagtttagtggggccacgaccaattataactgaagagcttgaacgttataatgatgaagtgggttactacttacttagcaaaccaggaatgacaggcctctggcaggtaagtgggcgcagtgatgttgactatgaaaccagaatttattttgacgtttggtatgttaaaaattggtcaatatggaatgatattgcgatactatttaaaacggttagtgtcgtaattaaaaaggatggggcttactaa

SEQ ID NO: 244370 - DNA, 717 bp, Klebsiella pneumoniae; identical to SEQ ID NO: 182289

SEQ ID NO: 244371 - DNA, 150 bp, Klebsiella pneumoniae; identical to SEQ ID NO: 189545

SEQ ID NO: 244372 - DNA, 294 bp, Klebsiella pneumoniae
atgacggtgcgcgttgactgggaaaccggggtgggttcatcagcgggtttcccgggatatgaagatgagaagaagtttttagagtgggcaaggaatattaaagctcagaaccgccagcacagtaagaccgtcccgctgcccgactataacggccaggatgtgtgcggcattacggtacactttttaccctgcgatgacgtgaaggtgaccaccagctgctggtctccgagaaatgcgaactatccgataaaagagcccgtcaggatgaaggagccggccgtctgtccgaagtag

SEQ ID NO: 244373 - DNA, 1035 bp, Klebsiella pneumoniae; identical to SEQ ID NO: 242468

SEQ ID NO: 244374 - DNA, 1152 bp, Klebsiella pneumoniae
atggctgcttcaacattttttattccttccgtgaatgtaatcggcgctgattcattaaaagacgcaatgaatacaatggcggaatatggttttcgccgtacgctgattgtcacggatgccatgctaacgaaattaggtatggctggcgagattcaaaaagcattacaggaacgtgatattttcagcgtaatttacgacggtacgcatcctaatcccacgaccagcaacgttgccgctggcctgcaaatgttgactgaaaacgactgtgatagcgttatttctctcggtggcggttctccacacgattgtgcaaaaggtattgcgctggtggcggctaacggtggcgatattcgcgattacgaaggtgtagaccgttctgcaaaaccgcagctgccgatgatcgccatcaacaccacggcgggtacggcatctgaaatgacccgcttctgcatcatcaccgatgaagtacgccacattaaaatggcgattgtggataagcacgttacgccgctgctgtcggttaacgactcctcgctgatggtcggcatgccgaagtctctgacggcggctaccggtatggatgcgttaacccacgctatcgaagcttacgtgtcgattgctgccacgccgattaccgatgcatgtgcgctgaaagcggtcaccatgattgcgcaaaacctgccggtcgccgttgaagagggcagtaatgctcaggcgcgcgaagccatggcctatgcgcagttcctcgcaggtatggcctttaacaatgcctctcttggctacgtgcatgcaatggcgcaccaactgggtggcttctacgatctgccacacggagtatgtaatgccgtactgctgccgcatgtacaggtatttaatagtaaagttgctgccgcccgcctgcgcgattgcgcctcggcaatgggtgtgaacgttgctgatctcaacgaagagcaaggggcagaagcctgcatcgcagcgatccgcgaactggcgcagaaagtgaatattccggccggtctgcgtgagctgaacgtgaaggaagaagattttgccgttctggcgactaatgccctgaaagatgcctgtggtttcactaaccctattcaggcgacacatgaagaaatcatggcgatttatcgtgctgccatgtaa

SEQ ID NO: 244375 - DNA, 1290 bp, Klebsiella pneumoniae; identical to SEQ ID NO: 190629

SEQ ID NO: 244376 - DNA, 1752 bp, Klebsiella pneumoniae
atgaaattcttagagaatatcccgtcttacctgtttttcaccggtaagggaggtgtaggcaaaacttcgatttcctgcgcaacggctatacgtctggctgaactgggaaagcgtgttctgcttgtcagtaccgacccggcttccaatgtcggtcaggtattcgatcagactatcggtaacactatccagcccgtgactgctgtgtctggtctttcggctctggagattgacccgcaggacgccgcccagcaataccgcgccagaatcgttgaccctattaaaggtcttttgcctgatgacgttgttaacagcatcagtgaacagctttcaggagcttgtacgacagagatcgctgcattcgacgagtttactggcttactgactgacgcttctctgctgacccgctttgatcacatcatttttgatactgccccaactggccacactattcgccttcttcagcttcccggagcctggagcagcttcatcgaaagtaacccggatggtgcttcctgtcttggtccaatggctgggctggaaaaacaacgcgagcaatatgctcatgcggttgaggcattatccgatcctgaacgaactcgtcttgtgctggtcgcgcgattgcaaaaatcaacactgcaggaagtcgctcgtactcatgacgaattatcagctattggccttaaaaatcagtatttagtcattaacggtgtcctgcctgcgagcgaagcagaacgtgatgcactggccgctgcaatatggcaacaggagcaagaggcgctggcaaatcttcctgccgggttatctgatttgccgacagacaacttatacctgcagccgctgaacatggttggtgtatccgcattgaaaggcctgctcaacgaacacgctgagataacatcgcttcctgaacaaagcccacagaacaagccagagaatatgtcgttgtctgtcctggttgatgatatcgcccgcagtgaacacggtttgattatgctgatgggcaaaggtggtgtgggcaaaaccacaatggctgcggctatcgccgtcagtctggcggataagggttttgatgtgcatctcaccacctcagatcctgctgcacatctcagtacaacgctcaatggcagcctcaaaaatctgcaggtcagccgaatcaaccctcacgatgaaactgaacgctatcgtcagcatgttcttgagacgaaaggcagggatctggatgaggctgggaaacggctgctcgaagaggatttacgttctccttgcacagaagagattgcggtgttccaggcgttttcacgcgtaattcgtgaagctggcaaacggtttgtggtcatggatacggcacctaccgggcatacgctattactgcttgatgctaccggggcttatcaccgtgagattgccaggaagatgggggataaaggtcattttaccactccgatgatgcagcttcaggaccaggaacgtaccaaagttttgctggtcactctgcctgaaaccacacctgtactggaagcggcaaacctgcagtccgatcttgaacgtgcggggattcatccctggggctggattatcaataacagcctttcgattgcacagacgcaatcgccgctgctttgccagcgcgccctacaagagcgtcctcaaatcgaggttgtgaaaaaccagcatgcaagccgcatagcgttagtaccggtaatggctgcagagcccactggcatcgagaaactcagagagctggttgtttaa

SEQ ID NO: 244377 - DNA, 363 bp, Klebsiella pneumoniae; identical to SEQ ID NO: 59977

SEQ ID NO: 244378 - DNA, 354 bp, Klebsiella pneumoniae; identical to SEQ ID NO: 59978

SEQ ID NO: 244379 - DNA, 636 bp, Klebsiella pneumoniae; identical to SEQ ID NO: 186046

SEQ ID NO: 244380 - DNA, 840 bp, Klebsiella pneumoniae
atgcctaagataattatgctgatcccgatcgaccaggaagcgggattgagcagcgtgagtcttggtctgttgcgcgcgcttgaacaacatcgcatgaccagcgcttattttcggcccgtggcacaggatactcaggatgttgtgccgggtaatatgaccagcatcctcgttggattaaatagttgcgcagatattataccttctttttccgttaatcatctcaataatcttttaaggagtgagcaacttaatttttttctggaagaagttatcgatcgtattgaaagtcatattgccagatgtccgggcgatattatcgtagtagaaggagcctatccggctgacaatcttccgggtgcgcagcagataaatgaggcgctggctaaaacattaggcgcagatgtggttttggttgcatctcagggtaatgaaaagattattgatatccggacccgcgttgaaggggcatatgccacgatgcgcgggttaaaatcacaaatctcaggagttatcgttaataaatatatcgtgccggacgatgatggacgccccagttctgttcaggacgcgttgttacaccgtgcggtgaatatcagcaatagtagtgtgattcagatactgagcacgggcgccatccaggtcagaggctgtattcccgcatgtaaggagttgacgttattgcgaaccgtcgatatcgcgcgccggttgggggcatcaataatcaattctggcgatatgatgactcgacggattcgtgagattgtattttgcggccacgcgctcccgcaggcactgttgcaaatagtcggtggtgataaacttatcatccccttttgctga

SEQ ID NO: 244381 - DNA, 1014 bp, Klebsiella pneumoniae
atgggacggcttaaagtactgcttaatcggcatgatgtggataccgttgtttttgacggtgttttatccaatccgacaacaagtaatgttcgggaggggcttgccatcttattgcatcatcattgcgatggcgtcatctcatttggcggcggttcgcctcatgactgcgctaaagcgatcgccttgcttgcaactaatggcggtgaagtcaaagattatgaaggtattaattgttcggaaagagaacaactgccgctctttacgattaacaccactgccggtacggcatctgaaatgacccgcttctgtattattaccgatgaacagcggaaaattaaaatggcgatcatcgataaaaatgtcaccccactgatgtcggttaatgatccggagctgatgctggagatgcctgcatttttgactgccgccacgggtatggatgcattaacccatgccattgaagcttatatgtcgaccgcagcatttgcggtgactgatggactggcgctgaaagcgattaaccttatctacaataacctgcgcacggtggttttccagggcgataatctggcggcgcgcgaaaacatggctatcgcgcaatttatggccggaatggcatttaattccgcatcgcttggctatgtacacgcgatcgctcatcaactggggggattttataacctggcgcatggcgtatgtaacgcgattttgctgccgtatgttcagcagtttaatgccgggcttccctcggccgctcagcgtttaattgatatcgccagggcgatggacattgacctcacaagcagtgacacacgtaatgtggatttggtactgacagcgataaaaaaactctcttccgacattggcattccgggaggattagcggacttaggcgttaaagcgcaggattttgatattcttgctgaaaacactcttgcagactcctgtagcttaacaaaccccagaccggcaacacaccgtcaaattaaagagatactggcggccgcaatgtaa

SEQ ID NO: 244382 - DNA, 1368 bp, Klebsiella pneumoniae
atgaaagatatgaattgccatcacgattctgtaaaccaggctattgcgcttgtcgaaaaagcgaagcaggcccaacagatattaaactcatttcctcaggagaagatcgactttattgtcgcagggatgatcgcggcggcggaagaggccgcggaacgtctggcaaagatggccgtctatgaaaccggcttcggcaatgtggaagataaagtggtaaaaaataaatttgccagtaccacgctttatgagtacattaaagatttgaaaaccgtcggcgttctgaaagaagacccgatgactaatacggtggaaatcgcgacgcctatgggggtactggcggcgttgattccatccaccaacccgacatcaacggcaatttataaagcaattattgcacttaaatcggctaacggaattgtcctggcacctcatccctctgcccgaaacagtattatagaagccgccaacgtggtatatcaggctgccctgaaagccggtgccccggaaggcattatcggctgtatgacgcacctttcactggacggcacccaggcactgatgtgtcatcctgataccgcgatgatcctcgccacaggtggcgaagccatggtgaaggcggcctacagttcagggaatccggctatcggcgtcggccccggcaactgtccggcatttattgataaatcggccaatacggaagaggccatcaggaaaatatttaaaagcaagacattcgataatggcgttatttgcgcctcggaacaatccatagtgattgaaaaagccattgaggagcaggtcaaacgcgccattgaaatttatgatggctatctcctttctcagcaggaatcagaaaaactcagtaaaattcttctacgtgacaacggttccatgaacccggcaattgtcggacgtactgctggctatattgctgatatggcggggattacgatctcgggtgatgtcaaagtattagtttcgcaacaatcttcagtttctcatcagaatccttatgcacgggaaaaactggcgccagttctggcgctgtatgtagaagacaatgccggatatgccattgatcgttgcgttgagctgctgaagaacgaaggcagcggccatacggcgtccattcatgcgcacaactcgcaggtgatccgcgagtacgcagcgcgggttccggtatcccgttgtttaattaatacgcccagcgctctgggcgccatcggcgccacgacgaaactagcgccagctctgacgctggggtgcggcgctatcgggggaagttcggtgtcagataatattggtcctcaacatttaattaatattaaaagagtggcctatgattcagcgcaattaatgccgtcataa

SEQ ID NO: 244383 - DNA, 258 bp, Klebsiella pneumoniae
atgatcatggattacctgttgatgtcgtatattgcggttgtttcctgctggcctgtcaccctgatcctgctgttggtcgctagtgtggtattgctgcatgctgaccgccgggtgttgagagtggccatcatcgtcctggtcggttttctggcttttgctgcctgggagttcgggaagacaatacataatcccccttcattgctggcgggtaaaacggcatggctatctgaactgattcctgtaaggagtgagtggtaa

SEQ ID NO: 244384 - DNA, 1392 bp, Klebsiella pneumoniae; identical to SEQ ID NO: 187647

SEQ ID NO: 244385 - DNA, 306 bp, Klebsiella pneumoniae
atgaatggtgcccagtttcagcgaaccggcggttcgcatcatctcatcccactgatcctcggctttcgacagatcggcacaaccacgtgccagttcgtccagtgcaccgtaatttgccgatttatccacccgccagaataccgcttcaccggcatcggcaagccggggggaaaactggtatcccagcagccagaagaggccaaaaataatgtcgctggtaccggctgtgtctgtcatgatctcaaccggattcagccctgtctgctgctccagaaggccttccagcacaaaaatggaatctcgtaa

SEQ ID NO: 244386 - DNA, 336 bp, Klebsiella pneumoniae
atgaaagataaagcgtcatttgactcattttcggctctcgatatgcgtgccggtaccatcatcagggttgaggagagtaaaacatcaaagcccacctggcgcataactattgacctaggaccagaactgggaacaagggtgtcatgcggtgcgtatactaactatgcagcagaagacctgcaggaaacgcaggtaatctgcatcgtcaatctgggtaccatgaagatgggacctgaaaagtcagaggtgctggtacttggtgtgtctgatggttcaggcgggacgatcccgctgacgacagaaaagcgcgtcgataacggtgaatgcgttttctga

SEQ ID NO: 244387 - DNA, 693 bp, Klebsiella pneumoniae
atggacttaattcttttttcgtttaatattaatttatttacgcagggttctattttaaccccagaatctaaatcaattatgaaactaatgccttttattaatgaggactttttcccgagtcatggtgaaggcattaataatgagaccggtgtgagtagcaaggttttaaaagttgagaaagaaatggatggttgtcgcctttctgtagtattcgcaccttgggctattagcattattgttgagtctcgctctttcgtagagtgttcgcaggttatttctaaggttgaatatttaattaatctgcttaataattgctttggtgataaaagtattataggttctcgcttggctacgattctaacagttggccttaaaaatacacctgaacttgatgaggttatttataataaatattttaaaggcgagactcgtccttttgaatggtctttcaggcaagcacatacttctaagtttgaagatgaagatacatttaatatagtaagtgtaaataaggggcatgcaacaataggttacggcggtgttgtctttgatggagatgcgatagttgttaatgtcgataataacacactcccagttaacaaagtaaaaagattttctcttggtgagaactcttttttaaataatcttatcactaaaactattggtgattttttatcggtaaagggtgagtga

SEQ ID NO: 244388 - DNA, 660 bp, Klebsiella pneumoniae
atgagcatcgaaatcatccctgatgaaacatttataaaaaataatgattttcatcattccgcgaatggtagtgacaatattattgcaggcataaaaatacacagtaatgaagcttatattgtaaatcgcagaagcaaaacaggcgtaacactggagttttctagaggtaatgttgatggcaagacgaatcttgatgttgaatcaaatgcgtccagtactgagtctgccaagaaaatagcttcaattgctaatgagatatatcagcttttccttcttgaaaatattgagcttggttgtgattcaaagacatcagccttgataaataagttaattactaacaatggttatgaaattgttgatatggccctcactcaattactgagtgaacatatcttgtattctaccaagccaattattatatgcaaatttttaactgttctttctgagctagattccagtttaattccagttacgtcgagttatgcaattactagtttgtcacataaaaaatatgactctgttaaggaaatggtccttatgaccattgaattgtggaggaataatgatgcactagtattattggaggagatggagccttatcgtaggaaacaccttgaacaatatcggttaaagattataggtatgcttaagggagtataa

SEQ ID NO: 244389 - DNA, 522 bp, Klebsiella pneumoniae
atgtcttattacattcgcagagttaattctgatttctgggaaggaaatttacctgaggatgataattatctttctatgcccgttgatggaataacaaattgttgtaaaacatcatcaaatgctttgtctatttggaaaacagatagcctaaacatacacgacgaatgtaataaaaaactactttctgctatagcgttggtttatgacaagccaaggcccttgacttttatttttttaagtgatgacgagctttcttctattggtttggagttagatgttacccctggtgatactccggtggttgaataccaaggagaacatagagatatatgtaaattaacattggattctatagggaagttggcatggataattcatcaaaaagttaatgacgacaattcgtataatcttgtctctgccgaagagatttctgattttacaaaggaaatgtttcctgatgttgacgcgcttcctgataaaaataaggctaatagaaaatggtgtaatatatataaagaataa

SEQ ID NO: 244390 - DNA, 318 bp, Klebsiella pneumoniae; identical to SEQ ID NO: 104261

SEQ ID NO: 244391 - DNA, 2244 bp, Klebsiella pneumoniae
atgtcggtacctaaccaaatcccttacaacatctatacggccaacggacagacaaccgtatttacttacgaattctacatcatcagtgccagtgatttagaagtaagtataaatggttccgttgtcaccagcggctataccgtatctggcataggtaacaaagacggcggcgatattacttttttgacgccgccggtgagtggggcggttgtcatgctcgaacgcgtggtaccgacataccgtctcaccgattaccaggacaacggcgacctgctggcggataccgtcaacaaggatttcgaccgtatctggatggctatccagcgcgcgtttatcgatctcggatttgcccttactcgtccattcttaggcgggccatttaacgccaaaggttaccgaattgagaatttaggcagcccaataaatgactatgatgctgctacaaaagaatacacagacgggattcttaaacataatcttgaaagagttttaagagttcccgaaagttacgtgaatgcgttaccgccagctaactacagggcaaataaaatattggccttcaatagtgaaggaagccctattactgtacttcctgcaagtggaagcgccagtgacgtgcttatagaactggcaagcacggaaccaggtcgcggagctgatttagttgcggggacgcgaaaatacttcagggttactgattatccgggaggggcgccaaattctacggttatcaggaacagtgatggctctttaacaatagctaagggcacaaataatacatcagcaatcaagtcagctatagctgatgcgcagtattgtaatggggttgtgtatttacccgctcctgataatggtagcgcatatctttttgatgatactttatttccggctgtaacatccggggctttgtggcgtggcgcgtctcttcagggggacggtaaaactgcaaccaagctcatttttgatggtggagataaaccagctgtacatgtaaaaggtacatccgggtggcctacgaatatattcatacaaggcatgtctctttactctgctaatgattttgtaggcgaagggtggaaactccaggggatcaccggtatcagattgacggatttttctgcttatcgcttcggtgatggtggattatcattttcaaacggttcagcatcaggcatttttactgaatttaatatcgttgaagatggctggctggagaataacaagaccaacataaaattcaggaaagatggtggtgatggttcgttccacgggatagccctaagaaacataatcaacaacaacgttcctgggcaaacaggtcttgatgttggggctgggtgtgtaatttataatgccgactggaatcaggtaacgttcttcggttctgaaggtgtccagtggatattaaataacggtgcaagaaatggtttcgaaaccctctattttgagggggatggaacagtaacaaataatggtggctggagtaccgcaggatactggcgggtacaaagctcatcgggcatcataagcgataactctaccattccatttacgaatgatggatatcttagccccacgactcctacggatgcgaatttttcagctgctggcttttcgaaggtacaggcattgcagccgcttttgcatacccagacctatcgcggactgatgcgccttactggaaataacgcacaggcagtagccgttaccggctatgactccggcgcatttgaacgtcaggggttagcaattgtatcccagtcagatggtgacagtgtgaaagatcttattctgcgtcaactactccatttgaatggtattacttcattcagaccagaatacagatttaactatattggaggtggaacccaattaagcatcaactccggaggtcgtcacactggagtcatggggagaagaactgccggtaatatcacagcaagcagctcacagcaaaccattacaacggatctggcgttacctgctgcaaaccagactttcatgatttcagttcatctgtatagttctgatggggaacacagacatgttgcaacatttgttggcgcggcggtaactgggtctgtagcatctactgcattgctaataacaagtcattcagacgctgctatcgcatttccgtcagcatcattcgtaattcttgagggtggcattctgcgttttgcaataacaaccagcgttgatatttcatacgaaattaaagcgcttggtgtcggaacatattaa

SEQ ID NO: 244392 - DNA, 282 bp, Klebsiella pneumoniae
atgatatctagcgtgacaggaaaatacatttctgattcgggtatcgaattaccgaatgcatttattgtttttaagggggcgtcaattttctcgcatacagtaacaacagaagatgcatctattgaaacgcgtgatgttgaattttcatttaacgtttatgtttcagagtcagcatatgataacggtaaaccacagtttgaaactttcactaagattgcagcattagatagcgataaaacgatggatgaacaagtcactatgattttaaatatgtttgtttaa

SEQ ID NO: 244393 - DNA, 228 bp, Klebsiella pneumoniae
gtgaacaaggtcgaactgcttgagaagatatcggtgctcgccactgaatgccacgcactggcctgtgaattggatcttggcgatgaacgcactgagatgttcgagatatacaacgtgctgagaagtcttggacgcagcggatatgcaagccagataagcaaagccaccaacccgcttctgtgggcggttgacgataacgacgatgattgggatgaggatgatgagtga

SEQ ID NO: 244394 - DNA, 381 bp, Klebsiella pneumoniae
atgaaaaaggttctattggttgcagcaatagcggttgtacttgccggttgtgcttctggcggcaataagtcgattgagcaagaaacgcagattggcgttcagagtaaaataatcaaaggaaagacgacgaagcaagaggttaaggctgcatatggagatccaactggggtatcaatctccagtgatgggaaagaacagtggcactatgttttcacaaacacacaggtcagcgggaaagcatttattcccatctatggactatttgataacggcgctactaccaacatgaagcagcttataatcgtgtttaagggcgatattgtagataattacttatttaataattcaaatacagaagttaaatcaggcctcctaaactaa

SEQ ID NO: 244395 - DNA, 180 bp, Klebsiella pneumoniae
gtggccgaatcgttcttcagttcactgaaaaaagaacgcatcaggaagcggatatataaaacccgggacatggcccgggcggatattttcgattacattgaagtgttctacaaccgtaaccgacgccacagccacctcggtggcgtcagtccggaggccttcgaacaggcctcgtcgtga

SEQ ID NO: 244396 - DNA, 579 bp, Klebsiella pneumoniae
atgttgccgggcggcggctgcgccttacccggcctacaggatcctctcacaggctcacactccgtaggcccgcgcaagcgcagcgccgccgggcgatggtatcaggcacggtacccgtggtattgccgggcggcggctgcgccttacccggcctacaggttcctctcacaggctcacaccccgcaagcccggcaagcgcagcgccgccgggcgatggcatcaggcccggtacccttgattttgccgggtggcggctgcgccttacccggcctacaggctcctctcacaggctcacactccgtaggcccgcgcaagcgcagcgccgccgggcgatggtatcaggcacggtacccgtggtattgccgggcggcggctgcgccttacccggcctacaggttcctctcacaggctcacaccccgcaagcccggcaagcgcagcgccgccgggcgatggcatcaggcccggtacccttgattttgccgggtggcggctgcgccttacccggcctacaggctcctctcacaggctcacactccgtaggcccgcgcaagcgcagcgccgccgggcgatggtattag

SEQ ID NO: 244397 - DNA, 438 bp, Klebsiella pneumoniae
atggaaaccaatatcgtagaagttgagaattttgttcagcaaacggaagagagacgggttagcgcgttcgcgaaagaagtgaagcgctacctcgaaacctaccctgatacccagtatgtcgatatcctcctcactgacctgaacggctgcttccgcggcaagcgcatcccggttgccggcctgagcaaactggagaaaggttgttatttcccggcctcggtgtttgcgatggatattctcggcaatgtggtggaagaggccggtctgggccaggagatgggcgagccggatcgcagctgcatcccggtacccggcaccttaaccccttcggcggctgacccacaatcgatagcccaggtacagctaaccatggttgatgaagatggcgctccctttgacgttgagccgcggaacgtactcaaccgcctctggcagtag

SEQ ID NO: 244398 - DNA, 279 bp, Klebsiella pneumoniae
atgaagttttatgctactaagaaatatatgacaaaatcaggaatagaattagttaatgcttttattttatttaaaaatagctccatcttttcacatacaatagacgtggacgaatcatctgtcgatgagataaatattgaattttcttttagtgtatatgcatctgaagatgcatataagaacaagaatgaagctattgagtcatttacgatgattaaaaaatatgatgaaagcaaaagtttagaacaatgtattgttcaatgcattgatagtatctga

SEQ ID NO: 244399 - DNA, 423 bp, Klebsiella pneumoniae
atgaacatcgaaacagtaaacgagctcattcagtcgctggagtcggcaggcaaggtgtcgatcagagagcagaagttcctgaagctggcgaaagcgtttaagcacctggctgcggagaatgtggcgctgaaaaaattagcgccggcacctttcagtaagctgatgatggaagcgcttgatacttatcattcgaaagctgacgacgtgcctgagttggccatgctgagcgcatacgtaaaactgcgcgatgggctaaaaacccccgccaccgatcgcatcgtagccgggattaaggctgatggggtggagtcaggaattaaaaccatcatgacgatgctgaatcaccaggctcctggcgtcagtgatgcaatcaacgtgttgcgcgtccactcctctgagctgcgtgcgggggccgacaaatga

SEQ ID NO: 244400 - DNA, 234 bp, Klebsiella pneumoniae; identical to SEQ ID NO: 193227

SEQ ID NO: 244401 - DNA, 459 bp, Klebsiella pneumoniae
atgactaaatcaaccataaccagagagcgcttagaacaactcgctgataacaacactatctgcaaagtttcatgggatgagcggatcgaactagcacaaattgcgctgaccacattagccagcaagccggtggcagaggttagagcgtactacccattaggcattgacggtggtaaacaaaagttcgtccaggtcactggcgagcttcctgactttggaacgcaactgtacgttattccgcagccagcgccggtagccaccaacgaagagcaccggcagctgcgtgacctggtcatgatggtgaagatgctctgcagaacggtgagaaagtacaacccggaaagccagcaggcggcaaatttcaccgcctatctccaaaaggaaggtctgatatcggcagcggattgtctgcgcgaaaccgatccgctggataatgagtcggaggatcgccgtggctaa

SEQ ID NO: 244402 - DNA, 294 bp, Klebsiella pneumoniae
atgtggcgaggaactgaccgcagcagaagccagatgatactggctgagtatcgccacgactataaaaccaaagactctaaatccgtttacctggtgcggcatagcagccgctcccagcatactgttctggagcaattcctgacgatagagcgcgatagttttgggcgatttaccccgactatcgaactgaaagactttccgagtgggcttagcgaccgcgagtcgatgctcaaacttgccgactggctgcaccgcttgggcgtggcgattgaagataactggagccaaccatga

SEQ ID NO: 244403 - DNA, 780 bp, Klebsiella pneumoniae
atgaacgcactctctgttttctcgtttcaggaaaaccaccccgtgcgggtggttctggttaatggtgaaccctggtttgttgctgctgatgtctgtaaagcgctcgatatcgctgataaccgtgctgcagttcgtaaattggatgatgatgaaaagggtgggtactcattacccacccctggtggggtgcagtctgtaggtattgttaacgagtccggtttatacactctgatcctccgttgccgcgatgcggtgaagcagggaacgacggcctggcggttccgcaagtgggtcaccaacgaagtcctgccagccatccggaaaaacggtgaatacagctacgtcgaaaccaccccaaaaagcgccggcgaaccattggactggcggcaaaaggaagaattacgcggcctgataaacgatatagcccaaagttttcagtatcgaaacgcgtggatcagtggtgtttggctggcgctgcgacgtgcctgcaggaatccatcacctaacccaattacggtcgacgatctgccggctatcattgccgaattacgccgaatattaacggcggcagaaactgccctaggtaatatgcgagtttacgaacgggagctgctgcgcgaggtagttcgtggcgggcgccagagtatgtcgtgtgaagaattgcctatcactgatatcaatacggaaatggagaaggtgctgccagcgcattttgagctggccatcagtaagctggagacgctatccacgaaattaacgcccccggatatctcctcctga

SEQ ID NO: 244404 - DNA, 333 bp, Klebsiella pneumoniae
atgacagatatcgcccggctgattaacagcattaagcgccgcacgtcctcagcaagagagcttggctacgatgttctgttcgtggcactcgatgatttggatgtcctggctgattcgctggagacggcgctgcgcgcaaacgccgcccaggcctctcacatcgagcagctgcaggacataaaacgccagctggaattgaagttagccaagccggtgcagttaccaaaaacaaacggctactggactgagccagaaaaggcgtatgaagaagctattacgttcgctaagaggcaggttcgtctggctggattccggtgtgagggagatgagtag

SEQ ID NO: 244405 - DNA, 294 bp, Klebsiella pneumoniae; identical to SEQ ID NO: 244402

SEQ ID NO: 244406 - DNA, 459 bp, Klebsiella pneumoniae; identical to SEQ ID NO: 244401

SEQ ID NO: 244407 - DNA, 750 bp, Klebsiella pneumoniae
atgaaaacgccactcacgtatggtgcccaccgaattcttcacgatttgttttcaaaaggcgcgatgttcaaaggtgcgttaagccgtgaaaaattacccgaactggaagagcgtggctttgtcgctactaacgccaataatcttgtatatctgacccccaccggccagcaatatgcaattgaatcctttattggtgagcattccaaagtttcgcaaggtctttgcggcaataccatcgagcaggaaacgctttcatcagtgttagcgcattacctgcccaacacccctccggataaagccagagaccacgctgtgatgctggcctctgcggtcaaagcttcttttgcagaattgaagcgctccaccggtggtttcgtaatttctcgcgatggcgccgctcaggttattggcgaaaaaatatctgaaacaacaatccctgcgtcggcccttaaaccgagcacagatggaaaggaaaagcgggggtcaacctttacgataaatattgaggtggatgccagcaaagccattcaagcgcttgatgagttcagccatgcattcgataaacgcatagcctccgcgttagaaaaaggacttatgccgggtggaaagttacgggaagcgattagccagaaaactgatgtgagcggaaaccagtcattaagccatcgcgtatccggggtggagtcagcactggcaaacctgagtagtcaaatcatggtgttgcagactaaacatgccagcccggtctaa

SEQ ID NO: 244408 - DNA, 429 bp, Klebsiella pneumoniae
atgtttaatcgtaatgaactgaccatctctatgttttatgcatccactactgatgctgatggcaaccgtatcgccactattaccctacaggtgaatgatacagaaggttcgccagtacaaagcagccagttattgtgtgtcactgataaggcaggaaagaaaacgtattcagtcggtgaacaaagcacgaagaatggctctgaccctctgttggtggcgattgagaattactggcgacagaacaccccagcggtcactggtagtctgatgtcggatgtcgctgacttcattaccggcaatgtgaatcagtcttcaacgtgggttggtttcaatggcctgaagatcttcgatggtgttcagctggatacccgcctccctgaaagcgtgctgcaggcggatggcagttccactacagagacaggctcctga

SEQ ID NO: 244409 - DNA, 201 bp, Klebsiella pneumoniae
atgagttacaccagctgtacctattgcggctcacgtctccatacgcgggctaactgcccaaaaacatggggcggctcatcgcgtcgtgccaatctgcgctgcagctattgtggccagcccgagcataactcgaatgcctgtccacataatgcgagcagcggtcagcggcgcagcctgaatgacgacttccacctcgactga

SEQ ID NO: 244410 - DNA, 711 bp, Klebsiella pneumoniae
atgcgtcagaaaacgattaaggccatccaggaacatgcggccgcagaatatccgcgcgaggcctgcggcctcgtcgcccagaggggccgagcggagcgttatttcccctgccggaacctggccacagagtcgaaagataattttgtgctggcgccggaggattatgcggaggttgaagaatggggaacgatcaccggtattgttcacagccatcctgatgccaccacccagccgagcgaactggataaagcgcaatgcgacgcgacccttctcccctggcatattatcagctggccagaaggcgatctccgtaccatccacccgcgtggtgagttgccgctcctcgagcgaccattcgtgctgggccactacgattgctggggtctggtgatgagctattttcggcaaacccacggcatcgagctgcacgattaccgcgtcgattatccgtggtgggaaaaggagtatccggacaatttttatcaggactgctggtatgaatgcgggttccgtgagtttgatggtccaccgcaaccgggtgatatggtgatcatgcaggtgcaggcggataagtggaaccacgccgggattctgctggacgggaatatgctgctgcatcacctgtatggccatctcagcaagcgcgtgccgtatggtggatactggttagacaggacgatgaaaatcgtccgataccattctctgtgttaa

SEQ ID NO: 244411 - DNA, 894 bp, Klebsiella pneumoniae
atggaactttttgcgattacagacagcgaaataccgactagaataattaagattgacatagatgctcccgcacaaacggtagtagaaaatctatttagaactcagaggagtgagtttataaatgaagatatcgaagaaatagagttttgtgcatcttataatgttcaggatggtgagatattttccatcaatccatttgatgacgaaataggcattattaatgcaatcgaacggcctgatgctgttccagtttgggaccccgatgatgtgtcagttcattatttcaaagcgttatttacgggtgagccagcttcgaatggtaatcctactcaagtttggcttcaatgtttcgatagacgacaaataattaataatgaaaaatcctttttccaagtagtaactcagcctggaaatagattctcagtgtccactcgtcctggtttttcgcttagtgatcgattaactgctattcttgtgggtgataaattattgttcaagagtttctttatgctccggcgattttttaacatggaagagtattttaatgaagctactagagaggatttagataactttatcggtaatgatatatttcatgtggaaaatgctgaagattttatgatgtttgcagattctgcaattaaaaagaaagtatctttgataataagttctggaatactcaacgatcagcctattgaaaatctaattgagtgtgcccagaagattggatatcaattaggtattactaatgtgaatggtgataataaaatcactatgccaaactctaaaagagaagtgaagcaactattatatttccttgatcagggctacttcaattcaataatcacaaatgagttaatgttgacgaattcgaagcgaccaataagaatttga

SEQ ID NO: 244412 - DNA, 558 bp, Klebsiella pneumoniae
atgtatactggttttttatacagttatggtgggtggtgtatgcttaatggatttgctcgctatgctttgactgctagttcggttgccccagtttgcctgacattggcattcttagcttatattaatgataattataagattcttgtttcctcaattcttttggctgtcgtaagtgtggttttttgtgtctttataatcaagcaagcacaaaaatataatccggtcacattgaaaaacttagaatcggcatctccggcagataaggaaataaccaactatttcttgacttacttatttccacttatatctgggccgaccacttttatggattggcgattagccctgtttttttatttaagtcttttcttctacataaagcactcgtcttcgtatagtttcaatccaattttgtctatcatatttggattcaagttttatgaagccgaagatgacactggggtgagttttgttcttttgtcaacaaaacctcttaccaatgcgaagatcaaaggtttgagggtaaagaagcttactgaacatacctatatgattgtataa

SEQ ID NO: 244413 - DNA, 414 bp, Klebsiella pneumoniae; identical to SEQ ID NO: 120251

SEQ ID NO: 244414 - DNA, 1158 bp, Klebsiella pneumoniae; identical to SEQ ID NO: 120250

SEQ ID NO: 244415 - DNA, 543 bp, Klebsiella pneumoniae
atgactatatctcaagttaaatatcaagatggcgcatcgcatgacggcgacaacaatttttatacactgtcgagtttagaatcgaccattgatcaggttaaaaaatcttgtttaggccatgacgaattaatatccattatggaagatttagctgagtatctagatgattatccaggaagagagatcattggactggaaggtaaacttttacgcggtgacagatctgacttagtggaaagagcaaccaggctaaaaaataaatttgctcggagagttgctaaagatcaaatgtctctggttgaacaaacagtatacattcagattctttccgccatttgttcgagctggcatcagtgtatttatccagcaataataagtggtcaaagtaaagtagaaatcgatagactagttaatattgaaataattcaaccagtgcataaagctattgttcgttacgatagtttgattactactgagttggtatcaggaatgctttattttttgactggcttatgtcatgtatcgtgggggattaaatgttaa

SEQ ID NO: 244416 - DNA, 153 bp, Klebsiella pneumoniae; identical to SEQ ID NO: 161747

SEQ ID NO: 244417 - DNA, 315 bp, Klebsiella pneumoniae; identical to SEQ ID NO: 102143

SEQ ID NO: 244418 - DNA, 1032 bp, Klebsiella pneumoniae
atgtccaatttactgaccgtacaccaaaatttgcctgcattaccggtcgatgcaacgagtgatgaggttcgcaagaacctgatggacatgttcagggatcgccaggcgttttctgagcatacctggaaaatgcttctgtccgtttgccggtcgtgggcggcatggtgcaagttgaataaccggaagtggtttcccgcagaacctgaagatgttcgcgattatcttctatatcttcaggcgcgtggtctggcagtgaaaactatccagcaacatttgggccagctaaatatgcttcatcgtcggtccggtctgccacgaccaagtgacagcaatgctgtttcactggtcatgcgacggatccgaaaagaaaacgttgatgccggtgaacgtgcaaaacaggcactggcgttcgaacgcactgatttcgaccaggttcgttcactcatggaaaatagcgatcgctgccaggatatacgtaatctggcatttctggggattgcttataacaccctgttacgtatagccgaaatttccaggatcagggttaaagatatctcacgtactgacggtgggagaatgttaatccatattggcagaacgaaaacgctggttagcaccgctggtgtagagaaggcacttagcctgggggtaactaaactggttgagcgatggatttctgtctctggtgtagctgatgatccgaataactacctgttttgccgcgtcagaaaaaatggtgttgccgcgccatcatccaccagccagctatcaactcgcgccctggaagggatttttgaagcaactcaccgattgatttacggggcaaaagatgactatggtcagcgataccaggcctggtctggacatagtgcccgtgtcggtgccgcgcgagatatggcccgcgccggagtttctataccggagatcatgcaagctggcggctggaccaacgtaaatattgtcatgaactacattcgtaacctggatagtgaaacgggggcaatggtgcgcctgctggaagatggcgattag

SEQ ID NO: 244419 - DNA, 222 bp, Klebsiella pneumoniae
atgggatattcagctgctaaagtgtccactcatcttgagcttgagaaaaaccgtggttactggcgggcaaaagggtttgatcgtgatagttgtcaactgtcattatcgcgcggtgaagagaaaatagaacgcacgcgcggtcgctggcgtttctatgacgagaaccataaacaggtaaaggcagagccgatcctgtacactttacttaaaaccattatctga

SEQ ID NO: 244420 - DNA, 210 bp, Klebsiella pneumoniae
atggctttcattccaccaaccatcgacgacgttagacattgctctaacgctttatctgtagaccccgccgaaaccgacgctgcccgcgccattgctgaacactactcaaagatatccaatcaggagtaccgcatcacccaagacgacctggatgatctcactgacacaatcgaatatctcatggtcactaaccagccagactcacaataa

SEQ ID NO: 244421 - DNA, 852 bp, Klebsiella pneumoniae
atgataaattatgtctacggcgaacaactgtaccaggagttcgtcagcttcagggatctctttctaaaaaaagctgttgcacgcgcccaacacgttgatgccgccagcgacggtcgtcctgtacgcccggttgtcgttctgccgttcaaagaaactgacagcattcaggctgaaattgataaatggactttaatggcgcgggaactggaacagtacccagacctcaatatcccaaagactattttatatccagtgcctaacatccttcgcggtgtgcgtaaggttacgacttatcagacagaagctgtgaacagcgtcaacatgaccgctggccgcattattcatctgattgataaggacattcgcatccagaaaagcgcagggatcaatgagcacagtgcgaaatacatagagaacctggaagcaacaaaagagctaatgaagcagtacccggaggatgaaaaattccgtatgcgcgtacacggctttagcgaaacaatgctgcgcgtccattacatttctagtagccctaactacaatgatggtaaatcagttagttaccatgtgccgctatgtggtgtgtttatctgcgatgaaactctccgtgatggaattatcatcaacggtgaattcgagaaagcaaaatttagcctttatgactctatagaaccgatcatctgcgaccgctggccgcaggcaaaaatatatcgcctggcagatattgaaaatgtaaaaaaacaaattgccatcactcgcgaagagaaaaaggtcaaatcagccgcatcagttacgcgcagccgtaaaactaagaaagggcagccagtaaacgacaaccccgaaagcgcgcaataa

SEQ ID NO: 244422 - DNA, 1485 bp, Klebsiella pneumoniae
atggccagaagttgcgtaacggatccacgttggcgcgagctggtggcgctatatcgttatgactggattgctgccgctgatgttttgttcggcaaaacacctacctggcagcaggatctgattattgagtctgtgcaggaacagggtagcaagacatctgtttcgtctggtcacggtaccgggaaatcagacatgacttctatcatgatcatgttgttcataatcatgtatcccggtgcccgcgccattatcgttgcgaacaaaattcagcaggtaatgaccggtatattcaagtacatcaagataaactgggctactgccaccagccgttttccatggcttgctgattattttgttctgacagaaaccgctttctatgaggttactggtaaaggtgtatggactgtagtaccgaagggctttcgtctgggaagtgaagaagctctcgccggtgaacacgcagatcatcttctgtatattatcgatgaagcctccggtgtcagtgatagagctttcggtatcatcaccggtgctcttaccggacaggataaccgcatcttattactgtcacagcctacacgcccaagcggctatttctacgatactcaccataaactggccaagcgtcctggtaaccctgatggcgtttatacggcgatcacgcttaacagtgaggaatcaccgttggtaacgccagcatttatcaaaatgaagctggcggagtacggcgggcgtgataaccctatgtacatgattaaggtacgcggcctattccctaaatcacaggatggcttccttcttggacgtgatgaggttgaacgtgcaacgcggcggaaagtcaagattgcaaaaggatggggctggcttgcatgtgtggacgttgctggtggtacgggacgggataagtccgttatcaatatcatgatggtgtccggccagcgaaataaacgccgtgtaatcaactatcgaatgctggaatacacagacgttacagaaacgcagcttgccgccaaaattttcgcagaatgtaatcctgagcgattcccaaatatcaccatagcgatagacggcgatggcctgggtaaagcaacggcggatctgatgtacgagtattatggtattaccgtacagcgtatacgctggggtaaaaagatgcatagccgtgaagataagagcctgtactttgataaacgtgcttatgccaacgttcaagccgcagaggccgtaaaatctggtcgtatgagactggataagggtaatgaaactattgaggaagcgtcgaaaatccctgtagggattaactccgcaggtcaatggaaggtgatgagtaaggaggatatgaagaaaaaactcaacctgcactcaccagaccattgggatacatattgtttcgctatgctggcggattatgttccccaggatgaagtgcttagcgtcgaagacgaagcgcaggttgatgaagctctggcatggcttaatgaataa

SEQ ID NO: 244423 - DNA, 1194 bp, Klebsiella pneumoniae
gtgacctgggacgatcacaagaagaattttgctcgcctggcgcgagatggtggttacaccatcgcacagtatgccgccgagtttaatcttaaccctaatactgcacgtcgttatctccgtgccttcaaagaagacaccaggacagcggacagccgcaagccaaataagccagtcaggaagccactaaaaagcatgatcattgatcactctaatgatcaacatgcaggtgatcacattgcggatgaaatagcagaaaaacaaagagttaatgctgttgtcagtgccgcagtcgagaacgcgaagcgccaaaataagcgcataaatgatcgttctgatgatcatgacgtgatcacccgcgcccaccggaccttacgtgatcgcctggaacgcgacaccctggatgatgatggtgaacgctttgaattcgaagctggcgattacctgatagataacgttgaagcgcggaaggccgcgcgcgctatgttgcgtcggtccggggccgatgttctggaaaccactcttctggaaaagtctctttctcatctccttatgctggagaacgccagggatacgtgtattcgtctggtgcaggaaatgcgcgatcagcaaaaagacgatgatgaagggactccgcctgaatatcgtatcgcgagcatgctaaacagctgttccgcgcagataagcagcctgatcaacaccatttacagcatccggaataactatcgaaaagaaagccgggaggcggaaaagcacgctttatctatggggcaagctggcattgttaagctggcatacgaacgaaagcgtgaaaataactggtcagtgctggaagcagctgaattcatcgaggcgcatggcggaaaagtgccgcccctgatgctggagcaaatcaaagccgatctgcgtgctcctaagaccaataccgatgatgaggaaaggcaaacagccgtcggtggcccttctcttgaagatctggacaaagttgcgcgagaacgggccgccaaccgccgcgccgatgccgcattgtggattgagcagcgtagggaagaaatcgccgatatcgttgatacaggcggttatggagatgttgatactgaaggtgtatcaaacgacccatggctggaacaagacctggacgaagacgaggaggaagacgaagaagttacccgcaagctatacggggatgatgattaa

SEQ ID NO: 244424 - DNA, 453 bp, Klebsiella pneumoniae; identical to SEQ ID NO: 130125

SEQ ID NO: 244425 - DNA, 1044 bp, Klebsiella pneumoniae
gtgaaagccgtaattactccctttgtacaaaaagagcttggcgtcgccacattcaaagtggatcaggaagtcagaaagctggtggaggctggccgtaaatttattatggagccggtgccgcgtgagttaatcgagcacatggacgacggcctcgttgtttccgagcaaactatggcaacaaatgaggcgttgcagccgttttttaacagcgatgaactgtttcgccgtattggtggaattgacgcgctggtggcgtggttgcgcaggaaagaggggcaatgccaggccgcagatcgtagttggtgtgacaaccatattgtccacgctgaacgagacaatagcgcggtgttgttgtgctggcatcacgataaccattaccggatgcgtggttttaatgagctgaaagaaacgctgcataataatcgcgttaactggatactggatgtcgcccgtcaggaaatggggctttcagatggccatgatttaagtattcaggaactgtgctggtgggctttcatgcgcaacatgatgcacctgatgccggaagaagtttgccgtatatcaataaataagatgaaagccgcaacgcaggatagcggacctctgaaagaggcggatattcgcccgtatgacgatcgcgctacagcatatgttcagatgatggaagaacgcgccgcgccgatgcgtgcaaaagtatgccctgtggatgttgactccgaccctggcatggcgcatttcaaaataccaaaactgcaatcgctaaaattacctgagtacatggactttgttgcttcccgtccatgctgtgggtgtggagcggcgggagctggcgctcacattacgccttatatcgttcgtcatagtcgattatgcgcgcatgacatttacgcaattcctctgtgccagtcatgccagcgtgatattgagcgtgaccgcgataattgggagaagacgcacggtaggctggcgatgcatcaacgattgttctttgattacgcgcttggagtcggcgctatcacaagtcactcgtcgagtgttagataa

SEQ ID NO: 244426 - DNA, 180 bp, Klebsiella pneumoniae
atggcacgtaaatacaacaagttgtcccgtgaagcgttaaagatgcttcttgatggcgtgagtcgccgcgaggtaaagcaatacctggttggtaagcaagttggtgtcaggactgctattgctgtgttatgccgtcaggaaatggttgtgcttaaacagagaatgccgggcagcagataa

SEQ ID NO: 244427 - DNA, 381 bp, Klebsiella pneumoniae
atgaggcatatatcaccggaagaacttattgcgcttcatgatgcgaatataagccgctacggcggcctgcctggcatgtcagatccgggcagggcagaggccattatcgggagagttcaggccagagttgcctacgaagagatcaccgaccttttcgaagtctccgccacctacctggtggctacagcgagagggcatatattcaatgatgccaataagcgtaccgcgctaaacagtgcgctgctatttctacgccgtaacggggtgcaggtatttgattcaccagaactggcagaccttaccgtaggggctgcgaccggagagatatctgtatcttctgtcgccgacacgttacgtagattgtatggttctgcggagtag

SEQ ID NO: 244428 - DNA, 222 bp, Klebsiella pneumoniae; identical to SEQ ID NO: 130121

SEQ ID NO: 244429 - DNA, 1218 bp, Klebsiella pneumoniae; identical to SEQ ID NO: 31467

SEQ ID NO: 244430 - DNA, 507 bp, Klebsiella pneumoniae
ttgagtattttcaataaacacgcacaccaggaacgtccgtatatcgtcatagttgatattgatggaacaatatcagaggcaactgaagacagactgcatttgcttccgccaccaggtaaaggtgcattaacaaaggactggaacgagtttaatctcgcctgtgacactgatactcccataactccagttattgatattgtgcgccagttatttaacgtttacacggtctggtttgtaaccgggcgctgtgagatcgcaagggataaaacacgagcctggctgcggaagtacgtaacaaacggggctgagcctttgctatctatgcgtcctgccaccgatgacagaaatgacggcccagcaaagattgatctccttaagaaaattggtctaagtaaaatcgcgttcgcgctggaagataagattgaagtggcgcgtgttttcaggaggcacggcgtacttacgttaatggtcagggagtatgaaaacgcgcttctccatcaacaataa

SEQ ID NO: 244431 - DNA, 1263 bp, Klebsiella pneumoniae
atgagcacttcagcacaaaagcaatcaatcgaaaatgtatctatccctgatgtcctgaatgccggtatcccggccattatccagaacatccgggccgcgcaacgccgcgttagttgtgatgacctcacagcacgtttttttgataatgcggttcagtcagcggagatgcttcacgcacagcttattgatgtttataacgcagaagctgatagccataactctctggtagatgcagctgaaaatatgcagttggatctcggtctgaagggtaaagaaattgaagagcttcagctggaaattgaacatttgaaacgccagcaacaggacgcgatcgacgatgcgacgcatgatgccaaccagcgtgctgataatgccgaacgtataagcattgagctggaaacaaaactcaatgaaatgaccgcgatggttgaactgcggaactcacagatttcaacgctaaaatctcaatataaagagatcatgaaacttgatccttttaaccttgagaaacgctataacaaagctaaaagcgagcgacaggaactgcgtaagcaggtcgccgaccttaaccaacagctcaaaaaaactattaaagatgcaagcgaagcgcgcgtggcatttgctaataaaaaagcagaggttaccgcgctggttaatgagaatgccaaatttgcgacgctcaagaaggaaatgtatggcattactgagcgccgtttccctgcaagcaaacttcatccgacgttagggcaaatctccttcttcccgcgcctcctggcttatgggatctcatcgcctaaagagttcaataacgagcgtccttatatcgtttctaagctggactttgcttatcagttctgctgcgacatgggctatgccattgatatccggatcaacgaatggctgatgccaaacttccagccgttggccattttccgcgagttccagccggaaggttgggtagagttcttccatgaattgatctgtaaagagatggaaagccgccgcccggaactggtccgtcgagttgagtgggcgcaagaggttatgttggcagaggcagagctgccgttcgaaccggaatttattgataatctggcagctaaagggctgcataccctgtttgatgtggttacccgccgtcatgagcagttggttgtcgaattgggtttagaggaaacagcggcaagaagacttctcgatgtttgctatgcacgtagcgatgcatgggaaaaagagaacggcggcactatttacgttcgctga

SEQ ID NO: 244432 - DNA, 702 bp, Klebsiella pneumoniae
atgaagattgctttagttcttcgctctggtggtgactataacgcttccgatgtgcagtggctggttaatcaactgccaaaagactatgaaattatttgcctgacagacctgaagtgtttacatgtacctggcgtcaaagttatcccattgatcaaccagtggcaaaagtgccgtggctggtgggcgaaaatcgagttgttccgaccggatataaccgatgatctgttctatctggatttggacacggttattgccggtgatatacacccaatcctagagaatccaccaaccaacttcaccatgcttagggatttttaccatccacaatatcgtggcagcggtgccctgtggataccaaatagtgtaaaagcgcatatctggagtgcattctggcaagatccggaaggttggattgctcgttgtgttactactgaatgctggggtgatcaggggtttttgcggaaggttatgggtgatgatacaccagcatttcaggatctgtatccgggatggtttgtaagttacaaggccgatgttgtggaacctggttcgaaatatgcgagcgcgcgttactccagggggaatggggcattaccaaaagactgccgaataatctttttccacggcaaaccgcgacctcgcgaagtgtcagaggattggattccccttaccagctcgttttttgagcaagtatcagaataa

SEQ ID NO: 244433 - DNA, 678 bp, Klebsiella pneumoniae
atgatggcacccacaatttatcaccgtatcgacggtaccaaatacaggaatgtctgggttgttggtgatctgcatggttgctacaccagactgatgtccgaactccatcgtgtggattttgacccggcgcaggatttactgatatcggtcggcgaccttatcgatcgcggtactgaaaatgtcgaatgtctggaactattgcagatgccctggttcagggcagtagtggggaaccatgagctgttgatgctcgatgcgttaagtcctgatggcaacgtgaataactggctaatgaatggcggtcaatggttcttcatgctggacgctgatcaggaaatattagccagggcgctggtggagttggtaagacgactgccctatatcattgagttgaacaccgggcaagaaactatcgttatagcccatgccgactatccggataatgaatatcaattcggtaaggaggtgccgcttttcaacgttgtctgggcgcgcgagcgtatcagtgattcgatggatgatattggtggcgaaatttcgggcgcagatcgttttatctttggtcacactccggtgaaaagcccgaagacattctggaatcagcattatatcgacacaggtgccgtattttgcggaaacctgacattgaagaaagtgaaaggtgatggtgcagcatga

SEQ ID NO: 244434 - DNA, 627 bp, Klebsiella pneumoniae
atgtttcccaagaataaatttagaggcagtgatcgcgttattatcgtcggcagtggcccaagcgccgcaaactttgttgcgccgcgcggagtgccgattatagcggtcaatggggccatcgactggctgaaccgcgcttcttattttttcacacttgatccatcgccagacaatatgcggcgcgttggtcgtggccgccgtcgccgtggtgtttgttattgcatggcactacccgatgttaaagaacgtgaagtcagagacggcattctgtgcttccgtcgtgtggctgaacgcggcacagagccaaaaaatacgaattctcccgagtggtgggcgtggcgctggtccgcacatttcggcctttgcgaagatgagaatgaaattgccagcggcaatagtgcatatggtgctctgaacctggctttccatatcggattcaaacatgtagccctggtgggcgttgacgctacgcaagaactacgcgttcactccggcggcacgccaaaaaatctaagtcacctgcctttgttattccagtctgcgcgtgaacagattgacgttgtttcatgcgggaaaatgggaggtattccgcagatgactcttaaagaatggctgaagaatacatga

SEQ ID NO: 244435 - DNA, 579 bp, Klebsiella pneumoniae
gtgttgcgctttactgaggaagagtttcaggcttttagtgagcgtcgaaataaggggcggtccaggccaaaaaccaaaaaggatccattcttatcgcttgcgccggtaaaagaagtttctccacatgcgaaggcacttgcagcactggcaaagaacccagacctgcgcgacggaaattgcgagcacttcgagcaggttttcatttttgattacttcgaacgcaagcaccctgacatctatgagctgttgcatgcaacgcctaacggagggaaacgttcaaaagcaaccgccgggaaaatgaaggctgaagggcagaaaaaaggttatccggacatgagtctcgataaagcatgcggtatttatcacggcatgcgaattgagcttaaagaaccaaatggtaaagccccgacgaaagagcagatcgcctggatgcgcaggcttggagaggaaggttactacgtcgttcttgcgtatggtgcagaacaagcgataaccgccatcctggaatacataagccttaaaaagggtgaggctattgagcatgtattgaacggcgacaagtggttgtatgctgcttaa

SEQ ID NO: 244436 - DNA, 246 bp, Klebsiella pneumoniae; identical to SEQ ID NO: 102841

SEQ ID NO: 244437 - DNA, 261 bp, Klebsiella pneumoniae; identical to SEQ ID NO: 102840

SEQ ID NO: 244438 - DNA, 1218 bp, Klebsiella pneumoniae
atgccaactgaatatgctcgcgacaaccttggtcgctatcagactgatggattaagtgcaaaagactttaacaaggtcttcgatcttatccgtaaacagcagcgtcagaatcggcgaaacgcgcgacgtacactcaccccaaggattatggggatgcgtaaccgcgaacttgaggcattcctcagccttgggaaaaagaaagatggcacctactttacgcccgaagatatacgcagtttcaacacctcaaggcaggctcataaaaccaaattcaagagcacggtacccggcattacctatgctcagctggtggcgcagtccaccagcattgatataaaacgcgctaacaacaaagtttctgatggcacagggatcaaagccgcgacattcctcgggctaaaacacaaccttgcattgatatctgttaatgcctcggatgagtcggtccaccagcatcaccgtgtcagaattcgatttgaggaatgggataaagccgttgaggaaattgctgaagacggtgcgaaaaaagcccgaatcgctgccgatctctgcaagggccgggtatctttcgactgtgattgtggacgccatcaatactggtatcgttatatggccacggctggtaactatgctgtcgcgccgccaaaagagtatgcattccccaagatccgcaaccctgatctgactggtgtggcctgcaaacatgtgttgcacgctatgacgcgttttcagtctcccacatggcacaaggccatcattattgccctggaaaaagcagctgaacaggtagccttcggcgatgacaagcggaagacaacaacctatttcaaaggcgaactggctaaatcgctcgcgcgcaaccggacaacaacgacggatcaggctaaagctgcgcgtgagtatgagctgtatctgaaatctcaggatgcattaggcaaaaaactacgcgcaaaagatagcgccacggacaacgttcgccggttgttaaaaaaagctcgcaccacggcaaacaggaagaatgccgaactaaaagcatcgcgggtgagggaagcccaggctcgcgctgaagccgacgctctcaaaaaagccctgcaaacgcaggcgaacaacctcataaagtttttcatgagtcagggaatggacaaggccgctgccactgcgcaggcgcgaagcattcttgagacacaaattaacgaagcccgtaaacggaaaggataa

SEQ ID NO: 244439 - DNA, 729 bp, Klebsiella pneumoniae
atggctggtttctttgatgacatgtttgaggacacagaaccatcacaacaagtgactggtgataacctcccggacaccgaatcggatccggatattccaggcgaaggttctgaactgattgaagaggaagatattgatgctgaaatcgaaaccgatggtgttaacgttggtaatattgttgatcctgtggaggacaatcaccttcccaatctggatcacggcctgcttagtgattctggtgtgcgccaccgttatcaaggtcatgcagtttttaataaccttgtgcggatggactggctcaaagcaatcaagctagaccctgactcattcgatgcggttctgtatcgcgcaataccttacagagacaaaaatgcacctgaaacggcatctgaaataatagaaccgaaccaacgcatatatgactatcaggatccagaactgataacggccctcgactgcccggatgagatggacgccttctacgcgctatacgacggcagtgataatacgggaattagcgacagtgctttaatccttcggttggccgccgttaatgtgccagtgggttctatgctcgaatggctggaacagctgtcagacggcacaaccattcgccgcttctggtacatccataaaatattcaattacggcactgccagggtaggcagtttgttttattgcgtgccttcacgcgcctttgaagggaatttcatcggtgattctgaataa

SEQ ID NO: 244440 - DNA, 786 bp, Klebsiella pneumoniae
gtgattctgaataatcaggaatggctactggccatctttaagaaaaaaggtcttactccaaccggtaagctggaatttgccactattgatggcattgattcggcgctcgcacaggctttaaacgaagcattcgactcacaagttgtcagctttaatgatcgcactaaccagtcattcagggagttcctgaaacgcacaccaagagatcgcataacgctcggcacttttagtgatgtgaaggagtggttgtcgtcatttgaagccgatcgcgccgggcgcaaagatacagcctctgctggcccagtaaataagctggcaatgccgcttgtgaatctgtctcgttctcccgcgttttcaatttatgaaggtgaactgtgccgggataattacgatgaagggcatgtcaccaatgaaaatgatgagattgaagccctggtatcgactatccctttctcactggaatattcgctatggatcgccagtgacgagaaggaatctcttgggatggttacaactgcattagcattctggctacgaatgtatgccagcctcgggcaggcatctttcactcacattgccaatgtcggcggttatgagataccggttacctgttacatagaagggcaaaaatcaatcgcatttcaggatctgaccaccggcaccgccgacaacaggctgttcgcggttggattgaacctcaccgttgtggcggaacttcctatcctggcttatatgcagcaaaccaccggcaccataacggtaaaagcgaaaattctggaggaatga

SEQ ID NO: 244441 - DNA, 1017 bp, Klebsiella pneumoniae
atggccacaaagaccaccacagccccggaaactgattcaaaacgcactcagctattcctgcaatctgtttcaattgggcagaacgaaatccctcgcgaaatgatcgtaggatgtacctatgtcgaacctggggagctatctggtccccagcttatgctcatgatcagggattcaacggcttacgtggtcaataagctgggggtgaaatttggtacaatactgacagtttcacttggtgatccggaaggtcatggcggcatcctcttctcggaagagttctttgttcttaaagcgccgcgcaaggacgatactgtactgatttacgcgtttagtaacccggtgcggttattaaaagttccgtccaccagcgcacagtattttgttgataagccaccatcagccgtagtttcctctcttgcccctggtctgaaggtaaatgctgactcattcagaaaaacatccacataccacctaaatgttggagaaaaaccgaccaaggtattgcaggagatagcccgggataccggttctatgtgctgggcatccagggggacgatcaattttaaaagtatggaaaaaatggcaaacgccgctccatcgcttacttatgagtccgccaatcccaacacatccggatttacaattagtcagttcaacatcctgaatgccgattatgaataccagcgccgccacaattacagaatggccagttatgacatgaccaaaggtgtggtttactcaggtaaccaggaagaccccattaaatttacgagcaatcccgatcctaccgcgctggcgaactacaacaaattcattctcccccgcctcgatatgctggtggaaggaaatgccgcgctaactccgggtacgacgctgaaaattgtcgtgcataacacggcaggtgacggagaactcgatgaatctatccctgacaaaatgatagtgatgtccgtgactcatttcgaagaccgctttcgttttgtcagccgtgcacagttaggagtggtgaatgggtag

SEQ ID NO: 244442 - DNA, 633 bp, Klebsiella pneumoniae
atgggtagtttgacagggaagtatcgggctgtagtgataagcgtcgatgaccctaaaggtctgatgcgtacacaaatacgtgttgtcggcatgatggatgggttaccagatgcttcattgccgtgggcagaagctatattgtccaatgcaaacacgttttcaccatttctgcccggcgataaagtatggatagaatttccctacaatggggattctcgatggccattgataatcggttatgcacaggatgcatccggtggcgctcccaatgtgccgcctgaagcgtcaggacaaggtgaaggctatgtaccgcctgaagtcgaaggtgcaccagcacaaccatcaaccagcgccaaaaaagactttatttcgtcgcggaacggactaatggaggtccggacggcgggcggagcctgggccgttacgcacttgaaaagtggaacaacaatcgggttcaacgaggccggggagttatatgccatttctcaaggtccggcattcatctcttccgcaggaaatctcgatataaagtcaggcgcggatgtcgccctgaaggcggggggaagtatggcgatagaggccagcgggaatctatccataaaagccgctcaagtctctgttgacaaggcttaa

SEQ ID NO: 244443 - DNA, 999 bp, Klebsiella pneumoniae
atgcaatggaatgaggaaaagccgatgaacatcctgatcattgggcgaaaatttgaagctatcagtgatgtgaaaacatatacggaaatgtgggcttacaacctggcctgcgcctttagtgaggcaggggtaacattgcaataccatcgtccatattcccccggcgtcgaaagcccggaggattatgttgaagctgtgttgaccgctgcgacctcgtgttctgcgaaagccattttagcgccaggattgcggtattttactacggtgcccagggaaataggcgtgcaactgcgtcgtcgattcactggatgggtagcccaggtatacgacggttctatgctggattcggcaccagtcgatattacttttactgtccgcgatgatacctggcggtacctggataatccaggcaggttagagcgtcataatcgttttaacaaacatgttggatgggcagcgaatcaggatctgttccatctggaaaccaaaacagacgatgttctgcgtatttttgtagaccacgctgcatttgatgttagtggttttgattactccttaagtatccttatgaaccttcagcgtctgaccgttccgtatgaggccagaacgttgactgatgacggattggttaccattgatccggggaatatttcggtaactccatacaggcggacgccggtgccagcaaccgaatttgcagctgaattgcgtaagagtgacgtttttatcgttacgcatcccgaaagccttggattaactgtacttgaggcggcaatgtgcggggcgttggtattaacgcctcccgattgccttccgccagatcgcctggctttggtgaaccatatggttatcaagtcgcggattgattgggatgaggttattgctcgcgttgatcgcgtgaaaaatgctgaaaaggtccagtgtcacacctggtcggcaattgcggaaaagatgcttgagacgtttatcacgcagaaaccgtcgtgcggtaacggataa

SEQ ID NO: 244444 - DNA, 1365 bp, Klebsiella pneumoniae
atgtctgcatcccctcttgaatccatgccaaattcccttagtgcagaacaagctgtacttggtggcttaatgcttgataactgccgctgggatgaagtggcagatcgtatagttgctgatgatttttataccagtgctcatcgtgaaattttcagtgagatggagaggttattaagtcatggcaaaccgattgatttgataacacttgctgaagcacttgaacagaacggtaaattagaacgcgccggtggttttgcgtaccttgcggagatgtcaaagaacacgcccagcgcggcaaatatttgtgcttatgcggatatcgttcgtgaacgcgcggttgttcgtgaaatgatttccgtcgcaaatgaaatagctgaagctggatatgcgcaggatggccggggcagcaatgaattgctggatatggccgagcgccgcgtttttgaaatagctgaaaaacgacaaaagagcggtagtggtccaaaagatatcgccagcattctcgatgcaacggtatctcgcatagaagagttgtttcagcgaccgcatgatggtgtaacggggcttgataccggatttaccgatctcaataagaagacggcagggcttcagtcgtccgatctcatcattgtcgccgcccgcccatctatggggaagaccacgtttgcgatgaatctcgtcgaaaatgccgcagttcgtaacgataagcccgtattggtttttagccttgagatgccgagccaccagctgatgatgcgctcactggcttctcttgcacgcgttgatcagactcgtattcgaacagggcaacttaacgacgaggattgggcgcgggtttctggcgcaatgggtattctgttggacaagcagaatatttttattgatgactcaagcgccctgacgccgacagagctacgttcccgcgctcgtcgtgtttataaagaaaatggtggtttgagcatgattatgatcgactacctgcaacttatgcgcgtccccgagctgcaagataaccgaacgctggaaattgccgagatttctcgcttactgaaggcgttggcgaaggaattacaagtaccggtggtggcattgtcacaacttaatcgatcgcttgaacagcgtgcggacaaacgaccggtaaattcagatttacgtgaatcaggagcaattgagcaggacgcagacctgatcatgtttctgtatcgcgacgaagtttatcacccggatagcgaaatgaagggcattgccgaggtaattatcggaaagcaacgaaatggcccaattggcacggtgagattggcttttaacggccaatactcacggtttgataactatgctggtgctgactggcaagaggattattaa

SEQ ID NO: 244445 - DNA, 435 bp, Klebsiella pneumoniae
atgttcggtaaattgttcggcaagaaagtcgcttctgcaaaagtagagctgaaaaaagttgagaatcgcgatctgatggaggccatcatcggtggctgtttgttggtgtctgccgctgatggtgaaatcgaaaaagaagaaacagcgaaacttgatcagcttgtccgctctaatccgcgtcttagtcattttggtaacgaaattactgcaacaattacccgctttaccgagcaactggaagctggcttccgtgttggtcgcatgaatatccttcgcgaaattgaagatatcaaaaacgatccaaaagaagcggaagaagtattcgttaacatgctgacaattgcagaagcggacggtgaaatcgagccagcagaacacaaagtactggaagaagtaggccgtcgtttaggtcttcgtgtggaagattatctgtaa

SEQ ID NO: 244446 - DNA, 2019 bp, Klebsiella pneumoniae
gtgaaagagctgtgctatggatctgtttgcagtggaattgaagccgcgagtattgcctgggaaccgttgggtatgcgtccggtgtggtttgctgaaatcgagtcttttccatctgccgttcttgcgcaccgctggccccatgtcgccaaccttggcgacatgacaaaacttgccaaaaaagtcctggctggggaaatcgaatcccctgatgtgctcgtcgggggaacaccttgtcaggcattcagtatcgcgggattacgtggtgggcttgatgatgagcgtggcgcgctaactttaaagtatgtggagcttgcaaatgcaattgacgacaaacgggctgagtcatttctcaaaccagccgttatcgtctgggaaaatgtcccaggagtcttgtcatcggcagataacgccttcggatgtttccttgctggattggctggagaagatgtgccatttgaaccaggtgatcgacctgaatcaggaaaaagcaacgcgttctggcggtgggatggcaaaaccggttgccatgttccaaagtggccgcagtgtggttgtatttatggaccgcagcgaaaggtggcctggagaatccttgatgcccaatacttcggagtggcacaacgacgccgacgcgtgtttgttgtcgcaagtgctcgaacagacctcgatcccgcaacggtactttttgagttcgaaggcgtgcgccggaatattgcgccgagcagaggcgaggggaaggaaactaccagatatacttcagacatcgctatcagatcttgcgatgatacaaacatagttgccatggcacatgggcaaggaggggctgagataaaaaccgataattcggcaccaactttgacatgtaaccatgaagcaccaattgtattgctcggcgacggtagaatgcgccgtcttacccctgtcgaatgtgaaaggctgcaaggttttcctgatggacatacattgatccctacggaaaagcgtaaaaaagtttcttcagatgaactggcataccttcgcaaaaactctcctgatttgaacgaagaagaggctgcaatgcttgcagctgacggaccgcgttacaaagcgatcggcaatagtatggcgataccagtaatgcgctggattggcgagcggataaccaaggctgcatgtcggcagaatgaagggcgtgaaacaaaagagcgaaaagttaaaccagcggcagaattcgaacggtccatattcaaatgggctggtggaaaatttggtgttctggaacaaatctttcgctatttgccagaagggaagcgcctgattgaacctttcgtcggtggtggagctgtcttcatgaatgccggataccaggaaaatctgctaaatgatgtgaatgctgacctgattaacttttacaagactctgcaacgcgaggcgcattcacttatcactctggcacatcggttcttccaggactacaacacccaggagggattcctggcagtacggaatgcgtttaacaaacaagtctatgatgatttacatcgcgcagcggcgtttttgttcctgaaccgacattgttttaacggattgacgcgttacaaccaggccggtgagttcaatgtcggttatgggaagtataaaactccgtatttcccattacaggagatggaagccttcctcggtgcggaagggcggtctgagtttgtatgcggtgattttgcagcggtgattgaagctgccggagaaggagatgtcatcttttgcgatccgccgtatgaaccgcttccaaatacagagggattcacgaactattccggtcatgactttaagtttgaagagcaaaaacgcctggtgtctctgttgacggatgctcatcgtcgaggtgcaaaggttctcattactaacagtggcgcgccaaacatcagagagctttatcatgacagtggcttcagagtggaacatctttttgccagacgttctgtgtcttgtaagggggacactcgaggtgtagctcatgacgttttgggtatattgctctaa

SEQ ID NO: 244447 - DNA, 906 bp, Klebsiella pneumoniae
atgtttaagcactggaaaaacattactatttataaactttctcgtgaggcggatctgaccgacttagaagataaaaagaaaatgatccttttcacgccatgcggtagtcaggatatggccaagttcggttttgtatctccatttggtgataattccgaagttatcgctatgcatggaaatggttttatccttgttgaagcaaagcgcgaaacaaaaattcttcccccgccggttatccagcgagctattcaagaaaaaattgaaaaacttgagcaagaacaagcgcgtaaactgaagaaaacagagaaggactccctgaaagacgaagttctgcattctcttctgccacgggctttttcaaagttttctgttatccaggcgatctacgacggttcaactaaacgtatctatatcaatgccagcgcgcggcaggcagaggatatgctcgcgcttatgcgtaagtctctgggttctcttcctgttgttcccctgagtgttgaaaatcccattgaattaacgctgaccgactgggtacgtgatggtagtgctccacagggatttcaaatgggggatgcggcagaacttaaggcagtgcttgaggatggcggtattgcccgagtgaaaaagcaggacttgggaagtgatgaaatatccacacacctggaagctggcaagctcgtcactaagttggcactcgactggcagaaccgcattaaatttacactggaccataacttcagccttaccagcgtcaaatttgcggatgaattgcttgagcagaactctgatattgatagtgaagatgttgcgcagcgactggacgcagatttcttcctgttgaccagtgaaatttcgtgcctggttgatgctctggtaaatgcccttggtggagaggctaagcagtga

SEQ ID NO: 244448 - DNA, 285 bp, Klebsiella pneumoniae; identical to SEQ ID NO: 130079

SEQ ID NO: 244449 - DNA, 789 bp, Klebsiella pneumoniae
atgctggaaaaagactaccagttatccgcatataaaaaattggccgccgccggtgggatgaaaacacctggtgccataacatcggcacgaaacagtgctaacacagcaaaactgcttgcagaagaattgaccggattaattctggatacaattgtctatcccgacactattaccagctatgtttcaacgatcagaacaaccgcaaccggtttaacgaatattggagggctggcaactcagcacgcggacctgttggctggttatgctgatctgtcaatgctccttcaactcgatattggttgggatgtttactgtcgtgctaatgagcgagaagtttcagaactgccgatctctattgccattggtgatgtgactattactaaatcgcttgaggacgctgtaaacgcgcttaatacatcaagtttagtcgctgctatgggggagattaaccagacccttaacactggctcaggaagctcgtcaggctctggttcaggcggcggcactgccactcccccaccagcactaacagaagagcaaattgaatctctgaaagtagcaactgaacagtttggggttgttttcaaccagacaacagcacccacaactgcgttacaacagcagtatgaacgagcgaatgaaagcgccaacgtagccataactgcttataaccatgctatcggtaccgcgcttgcggaagcatcagcaaataaggccagcacagccagcgcaatcgccgctttggttcctgattctgttcttgatgaattaaacaaagcggcacagtaa

SEQ ID NO: 244450 - DNA, 333 bp, Klebsiella pneumoniae
atgaatcagaacaagccaagtatgctgacaggcaaatggaacgaaaagctgaagttcagaaacaacttgttgcggcgggtaatgttcgccagcgtattcctgctgacactcagcggttgctccgggagtcgatcagcgaatttaacgccgacgccgacaaaggttaaccaccctgccccaaaaagtgcatttatgtgcaggatgccagagtttagcagtgaatattttgatgatctgccagcgtatatcctcgatacagaaacgatgctgatggggattaacaggaagaatcgcaacgttaatgattacaaccgcgctatcagcggtaactaa

SEQ ID NO: 244451 - DNA, 393 bp, Klebsiella pneumoniae
atgtctgataaagtaacagtaaagcaaactatcaacaaagcgacttcaatctacaaaattgagcacatcactgttggcaagccaggatctgaacaataccgtcatgctttcgagcttgccgatcagcttggtttaaaacacccggattgcatcgagcatgtatttccgacctatgctgatgagcaatgtactcatgttcttaccgaagaggattttttcagcactgaagaacgagaaggcgttgatcgttgcattggtgtgatttgctcttcagtgagttatgagttattccctaatgtccatgaaaatggtggtattggataccaattcctgtacgaaggcgatgagcttaaatgttatgaacatggtcttcttatcgaaagcgtagaataa

SEQ ID NO: 244452 - DNA, 885 bp, Klebsiella pneumoniae
atgccggaagaaagtaaaggcttccttagcgttgaagaagttgcaggaaatacaggagaaatccacagcctgaagcccaataacaacagcactatacaacccatcgctttgttgcgtttaggtgtgtttgtgccaaccttaaaatctaccaatgtggcgctacgtcgcggatcgtcagttacaacaaacacaacgaacgcaactgaagaactatcaagcctcaaaattgttgagcaggaaggctatgagggaattgaaattcatggtccacgcctggatatggatactgattttaaggtgtgggtgggcataacctccgcgttgtttgactatgcacctgatgatgacggtataatcaccctgccattctccgagtttgccgatcgatgcggctatccacgtaagcgtctttcaaaggcgttccgtaaaagtattgatgactctctgacacgcattcagcagacagttgtcaaattccgcttcccggcggcaaaaggtcatctcaataacattaacgtcaacttgttggcatatagcagcctgaataccgagcttgatgttatcgagatccagccgcagaaacagctatctgaactttactatgttgactataagcgaatcctgaagctgaagatgctggataaactagggcgcaaagagacagccaaggtactgtatacattctttgaggctctacccgccaacccggcacctgtcagcattgagcgccttagagcgaggcttaatctcaaatcatccgttagcgtgcaaaatagcgttatcagaaaagccatgaaagatttggaagctattgaatatcttaaattttcagagataaaaaacggcaggaaaatcggcttccagatccataagcgcaatccataa

SEQ ID NO: 244453 - DNA, 810 bp, Klebsiella pneumoniae
atgcaagaagagaaacaacactacctctacgttctggtgccagagaacggagatacttttaaaatcggcatttcatgtggtccattggcacggtttaaagggctacaagtgagtcccgattttgcgctttcacgggtctatcgtggtacgcgtttggcaatggttaatcttgagcgggctttacacgcaacctttttcccctggaatgcgccgtgggagaaaagcgccggtggcgggcatactgaatggtttacacgagagtgtcttgataaggttttggctcatatcgaatatctaaatgatatgtggggagggattctcgagcgcatcaagtcgaatgatttacttcagcgtccagtagatgctgcttgctctttcgaaaaagagctggatgttacttctatcgtgactttcaaagatgacgcaggaatgagggacgtggcttatgtctccatatctggctatgaaccggacgcgatccgcgctcaatgtgaattgctgaaagcaatgtttatgcttcggactaaatatccctgggagacagggcgggtgtgcttccctatggaagagttaaccgccaccattgattcccagctttaccacgataatccagagaagttttttagccttttagccggtaatgggcttaactgtgtgtccgggctggggcgaagtagaatccaacatgcctcgctcttcggtcccttcttttacgatcgacacgggtactttgaggctgaacttccggcgcttacgcgtgctatagatactatcgatttcgaacgattattcgctgctcttagcaaataa

SEQ ID NO: 244454 - DNA, 1197 bp, Klebsiella pneumoniae
atgagtgattccagccagcttcacaaggttgctcaaagagcaaacagaatgctcaatgttctgactgaacaagtacagttgcaaaaggatgagctacacgcgaacgagttttaccaggtctatgcgaaagcggcactggcaaaattgcctctactgactcgagcgaacgttgactatgccgtaagtgaaatggaagaaaagggttatgttttcgataaacgccctgctggctcttcaatgaaatatgcgatgtcaattcagaacatcattgacatatatgaacatcgcggagtgccaaaataccgggatcgctacagcgaagcgtatgtgattttcatctccaatcttaaaggcggtgtgtcaaaaactgtatcgacggtttctctggcgcatgcaatgcgtgcccaccctcatcttctgatggaagatttaaggattctggttattgaccttgatccgcaatcttcagcgacgatgtttttaagccataaacactctattggtatcgtaaacgcaacatctgcacaggctatgttgcagaatgtaagccgtgaagagctgttagaggagtttattgttccttctgttgtacctggggttgacgttatgcctgcgtcgattgacgatgcctttattgcatccgattggagagagctgtgcaatgagcatctaccgggtcagaacatccatgctgtcctgaaagaaaatgtgattgataagctgaagagcgattatgactttatcctcgttgatagtggtcctcaccttgatgccttcctgaaaaatgctttggcctcggccaatatactgtttacacctctgccgccagcaactgtcgatttccattcatcgcttaaatacgttgcccgccttcctgagttggtaaaactcatttcggatgaaggctgcgagtgccagcttgcgactaacattggttttatgtccaagttgagtaacaaggcagatcataagtattgccatagcctggctaaagaagtgttcggtggggatatgctcgatgtcgtcctccctcgccttgacggttttgaacgctgcggcgagtcttttgacactgttatttcagctaacccggcaacgtatgttggtagtgctgatgcattgaagaacgcgcgaattgccgcggaagattttgctaaagcagtttttgaccgtattgaatttatcagatctaactga

SEQ ID NO: 244455 - DNA, 1002 bp, Klebsiella pneumoniae
atgtcaaagaaaaacagaccaacaattgggcgaacccttaatccttcaatattaagcggatttgatagttcttcagcctctggcgatcgagtcgagcaggtattcaagttatcaacaggtcgccaggccacatttattgaagaggtaatacctccgaatcaggtagaaagcgatacctttgttgatcagcataacaatggtcgtgaccaggcatctcttacgccaaaatcattaaaaagtatccgaagcactattaagcatcagcaattttaccctgcaataggtgttagacgggctacagggaaaattgaaattttggatggttcccggcgtcgagcttctgccatcttagagaacgtagggttgcgggttttagtcacggaccaggagatcagcgttcaggaagcgcaaaatttagcgaaagacgttcagacagcattgcagcacagcattcgagaaataggtctgcgtttgatgcgaatgaaaaatgatgggatgagtcagaaggatattgcagccaaagaagggctatctcaggcgaaggtcacgcgtgctctccaggcagcgagtgctccggaagaattagtcgcccttttccctgtgcagtcggaattgaccttttcggactacaaaacgctttgtgctgttggcgacgaaatggggaacaagaatttagagtttgatcagcttattcaaaacatatccccggaaataaacgacatcttatccattgaagaaatggccgaagatgaagttaaaaataaaatcctgcgcttgataacaaaggaagcctcactactcacggataaaggttctaaagataagtccgtagttactgaattatggaaatttgaggacaaggatcgctttgcaaggaagcgcgtgaaaggccgtgcattttcttatgagtttaatcgactttcaaaagagttacaggaagaactcgacaggatgattgggcatatccttagaaagagcctcgataaaaagccgaagccttaa

SEQ ID NO: 244456 - DNA, 1707 bp, Klebsiella pneumoniae
ttgagtaacttacgcgaataccagaatcgtattgcagatatcgcaaaacgctctaaagctgtgcttggctgggcaagcactgcgcagttcggtactgataaccaattcattaaagatgatgccgcgcgtgccgcatctatccttgaagctgcacgtaaagacccggtttttgcgggtatctctgataatgccaccgctcaaatcgctacagcgtgggcaagtgcactggctgactacgccgcagcacataaatctatgccgcgtccggaaattctggcctcctgccaccagacgctggaaaactgcctgattgagtccacccgcaatagcatggatgccactaataaagcgatgctggaatccgtcgcagcagagatgatgagcgtttctgacggtgttatgcgtctgcctttattcctcgcgatgatcctgcctgttcagttgggggcagctaccgctgatgcgtgtaccttcattccggttacgcgtgaccagtccgacatctatgaagtctttaacgtggcaggttcctcttttggttcttatgctgctggtgatgttctggacatgcaatccgtcggtgtgtacagccagttacgtcgccgctatgtgctggtggcaagctccgatggcaccagcaaaaccgcaaccttcaagatggaagacttcgaaggccagaatgtaccaatccgaaaaggtcgcactaacatctacgttaaccgtattaagtctgttgttgataacggttccggcagcctacttcactcgtttactaatgctgctggtgagcaaatcactgttacctgctctctgaactacaacattggtcagattgccctgtcgttctccaaagcgccggataaaggcactgagatcgcaattgagacggaaatcaatattgaagccgctcctgagctgatcccgctgatcaaccacgaaatgaagaaatacaccctgttcccaagccagttcgttatcgcggctgagcacacggtacaggcggcgtatgaagcacagcgtgaatttggtctggacctgggttccctacagttccgcaccctgaaggaatacctgtctcatgaacaggatatgctgcgtcttcgcatcatgatctggcgtactcttgcgaccgacacctttgacatcgctctgccggttaaccagtcctttgatgtatgggcaaccatcattcgtggcaaattccagactgtatatcgcgacattattgagcgcgttaaatcttctggtgcgatggggatgtttgctggtgctgatgcagcatctttcttcaaacagttgccgaaggatttcttccagccagccgaagactatatccagactccgtatgttcactacatcggtaccctgttcggtaacgtgaaagtgtacgaagtacctgctggtatttgtaagaacttaacgacagagaacattcagttcagctcgatggatgtgctgtgctacgtccgtgatgaaaatccgggtaaagcaggcttcgtgactggtgatgctgtcccggccatcccgttccagcatccgaccactccggcgctggtcaaccgtaccacgctgtggggttcggctatcaacgatatgcacccacgcaacggcgctgattacttcactcgtgtaacgctgacaatggccaaaaaaggcgggcttaacttcattagcggcgacacgattgatgccggtgactctgagtaa

SEQ ID NO: 244457 - DNA, 1590 bp, Klebsiella pneumoniae
atgtctcaatattcaattcaacagtcattaggtaatgcatccggcgtcgcggttagcccgatcaatgccgatgcgacgttatctaccggtgttgcattaaatagcagcttatgggctggtattggcgtatttgcgcgtggcaagccgtttactgttcttgcggttactgagtccaattacgaagatgttctcggcgaaccgctgaagccgtcttccggctcacagttcgaaccaattcgccatgtatacgaagctattcagcaaacgtctggttatgttgttcgcgctgttccggatgatgcgaagttcccgattattatgttcgatgaatcaggcgaaccggcttacagtgcgttgccatacggttctgaaattgaacttgatagtggcgaagcctttgctatctacgttgatgatggtgatccgtgtatttcacctacccgtgagttaaccatcgaaacggcaacagcggacagcgcgggtaatgaacgcttcctcttaaaactgacccagacgacttcgctcggcgtggtaacgaccctggagacacacactgtgtctttggcggaagaagcgaaagatgacatgggccgcttgtgttatctgcctacggctctggaagcccgttctaaatatctgcgcgcggttgttaatgaagagctgatttcgacagcgaaagtaacaaacaaaaaatcgttggcgttcactggcggtaccaacggcgatcagtcgaaaatctcaaccgctgcgtacctgcgtgcggttaaagtgctgaataatgcgccgtacatgtacaccgctgttcttggcctgggctgctatgacaatgcggctatcaccgcattaggtaaaatctgtgcagatcgcctgattgatggcttctttgatgtcaaaccgacattgacgtacacggaagcgatctctgctgttgaagataccggtttacttggtaccgattatgtaagctgtgctgtctatcactacccgttctcctgcaaagacaaatggacccaatcccgtgtggtctttggtctgtctggcgtggcgtatgcggcgaaagctcgtggcgtcaagaaaaactctgatgtcggcggttggcattactcaccggctggtgaagaacgtgccgtcattgctcgtgcgtcaattcaaccgctgtatccggaagataccccggacgaagaagcaatggtcaagggccgtctcaataaagtatctgttggcacctctggccagatgatcatcgacgatgctttaacttgctgcacgcaggataactatctgcacttccagcacgtcccatccctgatgaatgcaatcagccgtttctttgtccagttagcccgacagatgaagcatagcccggacggtattactgcggctggcctgactaaagggatgaccaaacttttagatcgctttgtcgcctccggcgctctggtggctcctcgtgatcctgatgctgacggtacagaaccgtatgtgctgaaagttacgcaggcggaattcgataaatgggaagtagtctgggcctgctgcccgactggcgtagcccgtcgtatccagggcgtaccgctgcttattaagtaa

SEQ ID NO: 244458 - DNA, 816 bp, Klebsiella pneumoniae
atgagcaaaaacttttttcaatccggggcatttttggggaatggactgtctcgtttcgctttgaactctgatcctgtgcagctgatggagtctgcccgagcaagcgctgaaccgccaacagatccggttattaataataatccggaaccggcggcacagactaacgataacgttccatctgcccaggctcctgagcaaatcctggaagggaaagacggtaaagaatggaccgtcgaacaggcgcaccagatgattctggaagctgcaaatcgaagtgctatgcaaaatgcgttgagtgatgcggccgacgccgttttcgcctgggctgatagcggtgatctgactttcgactcccttgatggtttcgttcaggctatcgctggtatctctgatgacgacgactccgaagttacagaagaacaggacgatgcctataacgaagcatgggcaaatgttgctgacttcctcgcagcatgcggtgtagatgatgacctgatcgaagcactggctgacgatgaagacgacgacgcagctgctgatgttggtgcctctatcgctggtttagatagcgacgaccgcgacgaactggaagcggcgtttgttgttgctggcacttctgatgaaatgctgactgaagcatttaagaaggttgttcgtaacggtgagatcaaactcatccgtaaacgcctgcgtaaaaaacgtctgactgcggctcaaaaatcggcgctgaaaaaagcgcgtcgaaaagcccagaccggcgcggcaaaacttgcccgcaaaaagtcaatgaaactgcgccgtaagcgccttggctaa

SEQ ID NO: 244459 - DNA, 465 bp, Klebsiella pneumoniae
atgaacatggcccagaattgggaagcgccgtttaccggtatgtccatgggatctgttgctggtgccttcagtggttttgcgcaggttggtactgaaacaacgtcggttgcccgttggaacagcttaatggtttgggaagggggaacaccgccgactttcacgctgccagtaactttcatcgctttgtttgacccattcacggaggtttcaggagctatcgccgcattgtcagcgatgattagcccggaacttaaagatgccagtattggtggtcgaatcccggagcgtgtgacgctaaacattggtcgccggatcaacatcattgatgtcgctatccaggacataagtttcgatctcgatgcgcccagggacagcaatgggcatttcctgaaaaacaccgtcaacctccagttgaccggttcttcgatatataacagctccgatattgttcgggcgttccagtaa

SEQ ID NO: 244460 - DNA, 510 bp, Klebsiella pneumoniae; identical to SEQ ID NO: 102816

SEQ ID NO: 244461 - DNA, 156 bp, Klebsiella pneumoniae; identical to SEQ ID NO: 23013

SEQ ID NO: 244462 - DNA, 246 bp, Klebsiella pneumoniae; identical to SEQ ID NO: 102814

SEQ ID NO: 244463 - DNA, 810 bp, Klebsiella pneumoniae
atgagcgattttactttttctggctatgaattggcctgctttgtaacacactccggtctatcccgtagcgccgggcatatcctgtcgcaatgtgcaaatctcgcggcaacaaccagtgaatacttcattcacaagcctcaccgcctgatcgcggcagaaactggttatagccaatcaaccgtcgttcgtgcattccgtgaagctgtaaacaaaggaattctgtctgtagagattgttatcggcgatcaccgtgaacgtcgcgctaacctgtaccggtttacaccatcctttttggccttcgcacaacaagccaaaaatgcgctgattgaaagcaaattaaagatctcttcagcggcaaccaaggttaaagctgttctcgctaagacattggctttatttaattttttatccacacccccatgtcaaaatgataccccctccccctgtcaggatgacgtggcaataaagaataagaagtcacaagttaaaaaaacaaaaagatcagtttccggcggtgccggaacgaccagactcaaaaaattgacttcatggatcgctgaggcaaaagcaaaggctgacaatctgcggttatccaaaaaacgcgctcaaaaacatgagttcaagcagaaggtagaggcggcagcgcggaaatatgcttacctgaagaacaagcgttctcctgatattggcggggtatcaaacttcgataatctgccgcattgcatgacggtaaacgaagctcttaatgcggttttagccaaaaataaagataacgaacaatggggtataccggcaggattcagagggtga

SEQ ID NO: 244464 - DNA, 339 bp, Klebsiella pneumoniae
atgctgatggatgcacctaaagtcgaattcgccgaacgcgttgctaccgccagcggggttctaatcggcaactatgccaaagtgctcggcctgggccaaaactatctcttcacctggttgcgtgataacggaattctgatcgcaaccggtgaacgcaggaacgtccccaaacaagaatacatatcccgtgggtatttcacccttaaagaaaccgtgatcgatacaagcaatggaagcaggatttctttcacgactcgtataaccggcaaaggtcagcagtggctgatgaagcgattgcttgatgctggtgtgctggtacctgtcgcggcaacgcgctaa

SEQ ID NO: 244465 - DNA, 1044 bp, Klebsiella pneumoniae
atgaaaaaacctctcgtcacccgtaatgacatagccgaagcgatcgccctgcatactgcctgtatgccgacacgggagatccccggcgcaattgccaactatttcatgataaccagacgtttttatacccgaacagataaggctgtgatcaacaagctactgatagccgagatcagggattatttgattgaacaaggacgtctacgttacgcaacagtggcagcagaaatgagaaaggaggcacatagaatgaccggtaataatttgaatgttgaaaaaacagcacctgttacgtcagctacgccagcaccagccgtgaatatcatccccaacaccggagacacaatcgacagcctgacactgttaaagatggtcaatgaagcgcgtaagttatgtggggaaccagaggttcggaacaacaaattcatcgaaaaaatactcgacgaattagaaggtgaggacggttacacaaaaagtgcaaccgtgccgccaggtggcggtacgcctatggttgtcataaccatgacctacaaacaagccctgcgagtcgccgcacgcgaatcaaaagccgtccgccgttcgctgatcgacaaactggaagaattgcagcaggcaaactcccctaccccatcgatcccccaaacattaccagaagctctacgcctggctgccgagttagcagaacagaaaatgcagctggaacaacagctggtggccgctgcccctaaagtcgattttgccgaccgggtatcagtggctaatggaatcctgatcgggaactttgcaaaggtcgttggacttaagcaaaacgcccttttctcatggttgcgccagaatggcattctcatggcttttggagcgcgcaaaaacgtaccgcgccaacagtacatcaacgccgggtatttcacggtgaaagaagtggtgctggatgatgaaaatggctaccagatacggctgacgccccaattaacgggtaaaggccagcagtggttaactcgcaagctacttgatgctggtttgttaaaaccagtagcaataggttaa

SEQ ID NO: 244466 - DNA, 648 bp, Klebsiella pneumoniae
atgagaaaactattactaccgttattatttatgcctgggactgttaatgcagcatcaagcgtaaaggagatttgtaccgattatacgaaataccttgggcacgtttacggatttgctgtcagtgaagacgaatccatgcgcaagaagttactgtcagatatgaagcgccttaaactttctgaagcgatggtgcagcaggaactgtataaagtcgcaaccaacgaaaatgctaaatatcaatattctcgcctattaaatcccgacgcaaacgagatcaatcgaagctctttcgattatatggtaaaggcatgcgaaaccgctcctgattttgctatccctagctggggggtgctggtggcgagcaatgccgttaataaagaagatgttggaagaaatggcattgactcaatcagaaatgccccaggaatgcgccatcaaaacgttcagggtacgcttgaagaacgggccagggggccgggtacaaactccccaatgggaaacctctccccggaggaattgcaagagtataaccaacggatggagcagtatgagaaagctgcacgcgaaaaaatggaacaacaaaaaaacggatctcttaatactttccagcaaggtttaaaagcgcttaatttaccctatgaatggtga

SEQ ID NO: 244467 - DNA, 477 bp, Klebsiella pneumoniae
atgcgcatcaaacgatttttactagttcttgctttgcttactccgttttcatcaatggcaaatgtaagcaaatggtcaaccggcgagactcatggtgttcgttcttatgctgtttccagcaaagataattatacgcttacatttgagtgcgatgttggatttaataatacggatcccaatcaagtaggaacacgactactcactctcatgaaaacagaacctggcggtgagtcatttgatgctaaaaaagaacaaataacgcttaaagttggtgatgatgaatatcctatcagttctatcggttcctctgtgggtgatagttactggtatggtttttggtcagatacccctgatatggaagttaaaacattcgatgcatacgtagacggaaaaaaaatcgcaacatttacgctacgtaaggccgcagagcttttcaacgcggcacctgaagatggctgcctgaagcgcgcaaaatga

SEQ ID NO: 244468 - DNA, 567 bp, Klebsiella pneumoniae
atgacaccacgacaattactcgaagacgtcaaatcccgcttcacacctttgattgcggatgaacctgccttactggaatccctgctaagaaaagcattgggaacctaccaggatagggcggggcacatcaagcggatacgcatcaccgttcaggccagtaaatcacttgcttgcccagctgattttcttgcgctcgtatcggttacagatcacaccggcgatcttgtctactccgacgtttacgatgggaatatcgagcttgaagatacccatcgagcggtatacccactgaatgtgtcatatctggctaatttgcgtgatatggatctggataatggggaagtgccacctgaaatcattgggttactttctgactatctggaagtgctaatcgcaatacctaacactgatcgcctgcgaagaatatctatcgcggggaaactcgatgccagtaatttatccgacgagaacactctgtatcagcgaaagctggatctggaagagaaaatgagcgcaacaagggcaattatcccgggaattgttcttttctcatccatgttgaagtga

SEQ ID NO: 244469 - DNA, 612 bp, Klebsiella pneumoniae
atggggcttaatcttgcttcagtaaagtcttatgtatcttcggcattaacgacgacattatttggctccggcgttggtgagcgggaagttggtaagctgacgtcaatcatcatgaacaaaatgctgttcgcgcaaggatggcagttctctgtcgaagttgatggactggagggagcagacttctttgccaaagatattacctaccacgattacagcatcgaatatgaaacgattaaaatcggcggagggaatatccttcagccaacggagcgttcgcctgggcagataacaatgatggtcagggataccgttgatggcctcgttttggactggtttaagacggcaaaaggtcgggtgatcaatccggacggtaccgggaatataccgtctaaatatttgctcaatgtgcgtatttatcggttgctgtcctccggtttaaccaaactggaaaatgagatgacggtattcccggtcactaccggcgatgtcacctatgcgcgggatcaggttacggaatttaagtcattcccaatgaccttcgcattgcacagcacgtttaaccaatcctcaagttctttagcttcccttctgggctttagtttttctctttga

SEQ ID NO: 244470 - DNA, 882 bp, Klebsiella pneumoniae
atgcttttacctcttttcccgctaccatcgcggccaactgaattgatccagttccgtcagccaaatattgctgatgcgatgcgtttcaactcgataacaccggaggaacaagaacaacagacaacggcgtatttaaaagtcttgctggctgaacccgcgaaatatgatcccctgacatggacggcgcaggaccggattaccgcgttatggtggatatttactggctcccgtgaaacaccggtcgagacattcacctacacctgtaaacattgcggtaaagagcattattacgattgcgatatgaatgctctggctgaagatatccaggtcctggaagtggaaccgttcattgacgatattgaggtgtctgtagagggcgtgccttatcaatggcgtatcgtgccgcttgatggttgggcaatggaaatgctggagatgcgccgtgcagcattgccacctgaagacgacgcggaattcaaagaagcgatcgttgatttgcgtttttgggaattcgcttatcagtgtgaactttataacgatgttagcggtactcgtgaagagcaggctgagcgtcgttatgaaacgatcaaacggatggccattgatactgaatttatgaagctggcggcacacatccggctggctcatgaaaagctcgaacatggtttaccgtgctacatcgataaaggcgaaatgcgtcttcgtctcccgccgcacaaatgcccaaaccaggatacaaaggagtccacagagggtgcgtatacccgtctgtgggtgccctttcgggctaccgacttcattccacaggtggggattgaaaagctatcagaccttagtgtccaacctggttttgtatgggggtataccgattcaggacgctga

SEQ ID NO: 244471 - DNA, 3393 bp, Klebsiella pneumoniae
atggaaagaaaaaacgccaacattgacgatgtgataaggacggttgaaaccgccagcgcaaaagagctggaagagcttgcaggtattcgggaagccgttgaagatttgaaaggggggcgagttgctacagttgatcctgtctctcgcagtgtgtcggcattaaatcgcacaatcgaaaattcccggccagactttgtggccaatgcgccatcagtggaccctattgttgaggcaatgaaacggcttaatttaggggacgtttctcgtgtagttcaggaggatgttgctctacaggaaccgcaggccaaatcaactacgcgaaagggtaaaaaacgacgcaagaaggctataacagaagatgtaaaggcgcaacggaccgaagcagccgaacacgctcgcgaaatgttcggtcaaaaaggcggtgcgcaaaaaagccaaaaccaacgcgatgcgcgtggtcgttttattggaaagtcagggagtaaggccgcagcggaagatgcccgtgctgaacgtgctgaaaaggctaggcgcaaagaggatgatgagcgtctaaatgctgaatcaggtttattaaaaaaactgtcaaaagtagctgaaggcataggtaacccttcagagactcgtgccgtcgatgcgttaggttatgccgttgctggtccattgtgggcagcagggaaggagcttggcgggatatcaaaagaagttggtggatcgcttaatggtgccagaaagtctattgccgatgtgattcgtggcaatgacgataacagccgtagaaaaggtttttttaggcgtaaatcgcaaaatagtgccgatgtcgttcaggttaacacccaaaaacggacggttcaggaacttcaggagcagaccagcgaaattaaagagggcaatgacaagattctccgcgcccttgatcagatagccaaaaacaccgggaaaaagaagggcggcttgctgtccaaactatttagcctgttagggaagggggccggtggcgtcgcgtcgttgttaatggggcgtggcatgctgaaaaaagctggagcactcgcttttggcgctctgggggcaaagaaacttgtaggaatgctacgcggtggtggcaagaagactctcgcccatgaaggcggagatttggctgcccgggcagcaggtaaacttggattaaaggcagttggtaaaggggcgttacgcgcaattcccctagtcggcacagtggctggaggtatttatgatgcggtaaccggttggaatgatacagaagcgcaacgtcgagcgtttgggcttaaatcaggacaagatccatcattccagcaaaaagccgcttatacgttagctaatgttcttgatatggggggactggtatctggtattagcagcgccattggtgaggttctcaaatcacttggatttgaggatatcggcaatatgttgcaatcattttcgacggaaagtattgcccaggccattgatagtgggattaccaacttagaaacatatatttctaaccttggcgacaccatttctaccaagttcgatgattacacagcaaagattggtgatgctgtttcagcatggtttagcgatacatctaataagctgcttgaaaagctggatgccatcaaagacttctttactgtcgataacctgaaacaggttttcagtgatgcaattgatagtgcaattgatttcattaagaacccagggaaacatattaaagaggcggctggtaatatttgggatggggttaaaaatttccccggtaaagcattagatgcagcggttgatgccgttaaaaatacccctgcggcaatgattgtatcaaaaatacccaatccgatcggcgaggctaatgcgaaagaaatcactccagagttaaaagctccggttaatagccaccaggagacatctgattctaaaactgaatccgatgccaaacagactaatattgttacccgcgtgataaatgcggcactggacacggcgaaagatagcaataaaacagttaaagaaactgctaatcagattatcaatgcaaatgccgtagaaacgggcaatagcgcgttgcagaaaattgataaagctattggtcaaaatagctcgtcatcatcgtcgcttaataccactggcaccaggaatgacattcagaaagctgcggatacctacaacaatggcaacttggatgtaaaagtcggaagtcttggcgctgaaggtaaggcaaatctcgataagttggctccgtattttgccgaactagagaataaatacggtcttccagaaggcactctttacgcgattgctgcaactgaatctggtggtaatccgtatgcaaaatcccaaaccggtgctctggggatgtttcagttcacggggattgctcgtgaagagactggcttagctgaaggtgaatcgtttgatcctgtgaaatcggcagaagctgcggctcttctcatgagcaaatatctgaagcaagccaatggagacttaaacgaggccatcactgcatataatgctgggtttggcactatcaataagtggaaaaaaggcacaggtgacttatcgaaagaaaaccgtgagtacgcgatcaaggtcaatactcatcgtgctcgctatttaggtggtgaaatctatacacctggagcaggagcacagggtggggcgcaatatggagtgaggggaccactgcctgataacgctgttatcgatcagtctactggcctggcgtttacccctggtgatagcccgtttgagaaaggcggtctggtagacaaaattggcaatgctgttggcgttaacgatctggtcaacaaattcatgaatggccggggtatgcgtcgggaagtcgttcagggaacgctcgaagaacgtgcacgagggaaggggaccgcaacagcagctggcaatgtgtatgttgatactccgatgccagttgaagaggcgcgtccggtggccagcaactcaagttactttgaccaactcggcgcacaaatggggattgatggactatttgataaactccgcaactcgccggggatgcggaaaaataatgcgcctgaaccagcctccacgtcccaggtgacgactgccgccaacgatttgcagcaaccaaccggtcgtatgcagatagacggacaggttattagtgaccttggcggctccggtgccaagccgacaatgcagttggctgataataccgtttcacttgatggtgaaacgaagcggctgtttgcgcagatgacctcattgcttgccaggattgaagagcacactaaagactcggcgaaaggccagggaactgtcgtaaaggtcagcacgcctcaaccgggcgttatgcgcacggtgccactgtcaattgatgatccgttgatgaatgactacgcgagagttgattga

SEQ ID NO: 244472 - DNA, 357 bp, Klebsiella pneumoniae; identical to SEQ ID NO: 17893

SEQ ID NO: 244473 - DNA, 1434 bp, Klebsiella pneumoniae
atgagtaaaacaacacctactaaagacagtattcgtgcagagtttgaagagcttgtcgagaaagattcattctggtcgaagtttgtcggctctcaatttgtctcgatgctgacattgtttattacccagattgtctacaggtgctttcagtatgccgatgcggcgctggctgaaggctttatatcgaccgcgacgcggcgttcttctatcctggcagcggcagaaacgaatagttacgttggtaccaagccaacaccgtcatcggggatgattgagatcaccgccacaagtgaagatgccccagcggtaatccccaaaaacatgcctttaatatctgacgaccagtatccttacatgactatggatgtatgcaggttggttgacggcaccggtacggtagaagtggcacagttggaaatccaggaggtgacatataccgttacggcagccaaagaatttctggaagtcgtgttatcaaaggctctcactgctgtctgctataagctggaagtattcgtgacgaccgatggtaagaccacgcagtggtcttccagcactatgttccggttagccggtagtaaaagccaggtctacgttgagttttataaaccatccgagcagttgggggttcgattcggtgatgggctaattgggcaaataccgccagaaggctcgaccattacgcttaaggtatggtgcaccaacggcgatataaccctggttgctggccaaaacctgacgcctgtcgattctgcggctaatttagctaatttgatttcagttaagacaacgacacctataaccgcaggtaccgatgccgaaacaacggagatcacacgtaaccgtgcacaatattaccttgcctatgatgatcaggtcgtatggggcggggactatacgtattttctggtgcgtaacatcccgggactgtcctgggtaaaggcatggggcgaaggccagcaagagaaattagatggtgcttataatgttcggaatatcaataagatatttatttcaggatggcatccaaacaaaagccagtcagagcttgaagaaatgatcctggctgcctttaagaaggtgccgaatgagttgaacaagaaattctcgtataaagaggtcagaaaactcccctttaagatcaccatcactgggcggatatcggcaagcctgaccattgagaacgtgactgatgagctgaagtcggcactggaaacaaaatttgggcgtgactcaactttctttgatccgaaccgtgtcggcaagtacatcctaatcaagaaaaaagacgtttgggcatttatcgaaacgctgggttatttccgcgacttttatctggaatttgtcgagtggaatgagtccaacggcttttacgatttcgtttatctggatacagaaaactccacctttaatatttcgtatgaggaggagtga

SEQ ID NO: 244474 - DNA, 837 bp, Klebsiella pneumoniae
atgcagcgttcctggtttaataaccggcttacatcagctaagcaaaagtcattactttataaatcattggctgatttggttcagtcaatgatggacacctttgttgacccatggttggagcgaattaccaaccggaagtctattttctccatgagcaaggaggatctggagactaggacaaatgaacttggccagttttttactatcagaacgtcgaattcatcttccgttccgatgttgttacaacagcggtttgatgagatccattttaagggtactgaacgccctataaaccagacaatttatcgcgaatttaacggtatatcggttttatgggatcccatatatgctccggtggactttgaacgtcatccctatggcacggtcctgattccagaaagcacactggaaaccaccggcggcacattcggcgagatgtttctgacttccagaggaatgatcagtattcccataaacgacctggcccggacaatgggtattactggaacgatagatcagtccgcaattacagaagaaattctcagaaagtttaatcagttcgtaaagcctctactgccactgcatatagtgtttgatgggcttacgctctatttgtcggttgttgtaaatgaacaggccgacatgatcactttgaatgagatttctgataccgaaaaagcattctgctggtttgaaacttcggatacaacttcgcttactgaagttacgtcgattaacgccccgatcactgcaacgccgggcggcactattgtgaaagcaacgcctacgtttgatcgcacccgcgcagatgatttgctgttggatagcgatgcgtga

SEQ ID NO: 244475 - DNA, 435 bp, Klebsiella pneumoniae; identical to SEQ ID NO: 102800

SEQ ID NO: 244476 - DNA, 315 bp, Klebsiella pneumoniae; identical to SEQ ID NO: 141638

SEQ ID NO: 244477 - DNA, 195 bp, Klebsiella pneumoniae; identical to SEQ ID NO: 141639

SEQ ID NO: 244478 - DNA, 192 bp, Klebsiella pneumoniae; identical to SEQ ID NO: 141640

SEQ ID NO: 244479 - DNA, 558 bp, Klebsiella pneumoniae
gtgctgggcgtctgctccgcactggcggtaaccaccaaactggaaaccgccttcgtgatgaccattgcggtgaccctggtgacggcgttctccagcatgtttatctcgatgatccgccaccatattcccaatagcgtgcgcatcatcgtgcagatggcgatcatcgcctcgctggtgatcgtggtggatcagctgctgcgggctttcgcctatgagacctccaaacagctgtcggtattcgtcgggcttatcatcaccaactgcatcgtgatgggccgcgccgaagcctacgccatgaagtcgccgccgctggcgagctttatggatggtattggcaacggtctcggctatggcgcgatcctaattatcgtcggcttcctgcgcgagcttatcggtagcggcaagctgttcggtatcacggtgctggaaacggtgcagaacggcggctggtatcagccgaacggcctgttcctgctggcgccgagcgcgttcttcattatcggtttgctgatctgggccctgcgtagctggaagcctgagcagcaggaaaaggagtaa

SEQ ID NO: 244480 - DNA, 1239 bp, Klebsiella pneumoniae; identical to SEQ ID NO: 136737

SEQ ID NO: 244481 - DNA, 264 bp, Klebsiella pneumoniae; identical to SEQ ID NO: 17947

SEQ ID NO: 244482 - DNA, 330 bp, Klebsiella pneumoniae; identical to SEQ ID NO: 102901

SEQ ID NO: 244483 - DNA, 444 bp, Klebsiella pneumoniae; identical to SEQ ID NO: 17949

SEQ ID NO: 244484 - DNA, 603 bp, Klebsiella pneumoniae
atgacgaaaaataagtatgcaacggtcgattttgaccaggttaatgaaaaggggctgaaatcccttatcgcggcgatcaataaaaccggtgttacggtaattgaggttgactccagcaaccgcgcaacaacgaaagatggcgttaaagttaaaaccgcaaagctggttcttaacgacggacaaattcttgccatacaggtaaacgatactggcgatatatcgtctgtgaggctgaatggaaaagctattcctaacgctcagtcgccggatatcaagacgcttggtaccgtcatggggcaagcggcccgcaaaaactccgcaaaattccagaaatcactgatcgccaaagcgaaacgtgttgccaatccggtagacaagaaaccggcagtaaaatccaactttcagcgcctgcaagaggcaaaacagcggaatgctcaggtggttgccgcttataaatcagcgcagaactcggtgtctttcaatcaacagcagatcactgatttgcgggcgaagctggataaggagacaggccgactcaataacgaaaaggcccgaaatggcgaactcaaacgccgtcttaagcaactgaaagcaggaaattaa

SEQ ID NO: 244485 - DNA, 1920 bp, Klebsiella pneumoniae
atggaacagttcaatatcaataaaggggtgacgatcaagcctgggcttgacgtgcttcccccgccagtgactgatgatgaatatcgcgcattaatggccggtgaggaccgctatctgatgacggaatccaacaccctggaggaaatcgaggctacgttcttctatgacacgccgatccactggtgtgctacggatttactggaggcgattagttctactcgtttgcagttacaccggaccatgcaggcatttgtccgggcattgaaccagaagctgaatggtaccggaatctctgcgggcagtgataaaacgggggatgtggcccagagcggcgcgcgcgcgatcggcggcgctgaaattggccgggcacgtaacgttaacgggctgccggtcctgccagccattattccgctcagtgatggtcagactatcagcattctgtttcatagcccgacagcggaaaaccggatcaccaatagcgatacgctggttgctttccagttcttactgaataaaaaagacgttactcacaccgttgctccgatgagtggacgtgatatgacgctggcgcaggtcaccatgaaacttgccaaccttgcagagaaaaactcggcaaaattccagcgtgcgcagaagaagaaaaaagccctggttgatgaaataacccaactacaggctgacagtgaccagaaagaggatgccatgagcgacctcgcggatcaggtggcagcggtagaagggcagaaggtagatctggagcagaaaattaacgctgttgcatcggaagcggattctctttatgaagagaatgagcgtttgcagacggagattgatcagctcaatcgcactggtgggcgcgaaaccattgctcctgcggggatgacaggtggacactctcgcgcgatgacggatcgccttgcaagtatcaaaaatcgtatgcatatgaacggggaagtgacgctcagtaatggtgcatcaatgaagcaattcattgaggacggtgaagggtatatccagttaaccgattcggatggcagcgtgtacatgatcaaggctaaatccatacagggtgtggacatggcagatgcgatcggcaagctgtttaaagcctataaagcgggtaatgtatcggaatacctggtccaaccagaagaacataaaccggaaaacgtcgaacctgaaccagcggaggataccggtagctcttcgcctgaaccagaagtctctataggtgcatatcgatatgccctgcaaatgcgtccggcggcccctggcgcaatacctgaaggtaacaaagcaattctgccacgccctgatgaaggtgacccgtattatgaatatgcacgctacggcattgctacttacgataccccgctttctgatcagcaaatgagcgagtacgacctgaagttattgcctcgcgaggattctttcgacttcctggcgaagacacttactaatggtccatttggcaaatatgcacaaaaagctctggagcaggccaccagctcaccagacgagttccgcgtaatgctgaaaactcagtttcaaaaaactttccccaatattgcgtttccgggtggcgctggcaccgagaaaatggtgcagagcatgatcaatgcattgcaggccgaagtcggtgagattactcagccagaaccggccccggcacagcctgatgaaacggttagcgaagcagatgcagaggctaataaagccattgaatatctcaataacgtgatggatatacaaagcactgacatggcggagatccgtaacgcccggggcaatgtccgggaagcgattgcagcccttcaggctgccggacgttttgaggaaaacgaagagctggttaacggcgcagctcgccacctggctgatctgttggtagcaatccagaaagcgggggtagcggcatga

SEQ ID NO: 244486 - DNA, 366 bp, Klebsiella pneumoniae
atgacactatcagctattgagttaatggatctcagcgataagttggatgctctgatgtccaaagcggcgaccgcgagtggcatggagttgctggatatcagcgatgaaattgaccagatcatgcaacagatggggtacggcgcgtccggcggtggtagtggcgaggaaaaacaaccttcggaacatgatggtgtgccaaaactggttgctgatttcctggctgataaattcgtcgatcagagcaccgatgcatttatcggtaccttgcaggatttgagtcaatatgttggcacatacatcgacctggaccaggttaaacagcacactgcggcatggatagccgccaacattaaagaggcagcataa

SEQ ID NO: 244487 - DNA, 2988 bp, Klebsiella pneumoniae
atgagcttaagcgatcaggtggtaatggccaccagcatagaaacgctgatcgagctgctaaagaacctgcccgattatgggcgggtttcgtatgtggtgacagcgaagggagacgaggtaaaaacagcgtttgatatcgtcgatgcctcagctcttttggtatccaatactctggatgggaaaattaatcctgactatccccaggaacttcagccgcgcgaccggacccgcgcatccagccttcttcaggttaaccagatatccaaagatttgcggcctgctcagcttactgattccggtttatccagccatggtgcgccgataattggtgaggacaatgccgttgagtcaggtaatggacggaccatggggatcatcaaagcctatcaggacggcaatgcggatcggtatcgtgagtacctgattgatcatgcgaccgaattcggcatacgacctgaaaaggttgaatcaatgacggctccggtactggtgcgccgccggttaaccaaggttgaccgcgttcagtttgccaaggactcaaatatttctgatcttcaggaaatggcagccagtgaaaaggcttttgttgatgccgacagcataacaccggcgatgatggcgctttttaacccgtcagaaagcggagatctgcttagccgcagtaatgacgcgtttattcgcggatttatgacgcaagttggtgccacacaggcggctggccttgtaactgaagatgggcgaccaacacggcaacttgtagaccgtatacaaaacgcgatctttgccaaggcatataaggatgcgcgcctggtaaggatggttgcagaagaacctgatccggacatgcgtaatgttctgacggcgcttaatgcggcagccaatgattttgtccagatgcaggctttatcaggagaagcgcacaagcaggctgtgacaactattgttgatggcattgagacagcggatagcctcgataaaaaggcgctggcggcattgaaagatgcggtagacctggtaaggcaatcgaaggagtcaggccagcatattaccgatgttattgctcagggggatatgttcagcgaaacggccccggaagtgaaagcactcgcgttgttcatcgtcgcgaataaccgtagcgcgaagcgtatggcctccgcctttaagttgatggctcaacgtatcaatgatgagttacagcaccagggccaggcgctgggggatatgtttggcggtggtgatgtgtcgttacaggatatccttcgccaggtgtctcaggaactggaaaacgaaggcatgcaagggatatccggcggtcttttcgagtccgtttccggcggtagttacaatggtgttgctccatataccagtttgctattacatcgggcatccggtatcaaagacattattcatctgatcaggctgctttcccgtacagatccccaggatgaacagcttgtacaagtgcttgcgcattttgttcgaatgcctgttgccgacgtgaaaaaatggtgccgattattcggtatcagcaattcgttacttcgcggcttgttaaatcacgcatcctcccttgggcgcgatggctttgacgagatagcgcaggcgataaaaaacggagatatgccaccagctattgactggttttccattcgcccaaccagggtgaaagcattccttagcgcggcgcattcggcatcaccattggcagaaatggttcagaggttgtcgctcatattcacagaccataccgcgttgggtgatctgactctggacgagatgaaagaagcctccattcagtgggccgatcaacaaaatgaggttaactctgacttcttgccagcattcaggaaggccgttagtaaagctgatgatgcccgtggaattctgagggtatttaaggcattgcaaagtcaggttaataaacatgtcggtgatatcgatggggtaacggcggaaggcagggatatccttaaagagcacggcataacgccagagtttattgatgagatcaggactgatatgcagcgtgaggtcgtatcgtccctgcaaatcgtagccagagcgttggcggatgctaatccgaagagtgcggccattgttaaccgtgttattggtgatattgaagcatcggagggcatgggggcgctgaaactcttcctttcgcgagcgtttaatcctaacggcaatattctccccggcattattggtgaggctaaaaagtatgtcagcgaagaagaacttgagcatcttgaccaactacttaagcgattctcatataacccgcagacacgctggcaaatgaatcagcaaagtatgggttcggtccacgagaaagtgttatctgccatgaacagtgcgatcgccaactcatccgtatctgaagaaaaagctcttgagtgggccgactcttttatcacggaagaagtggaagaagcccgcgctggacagaatggtgggatagacctgcgcaaggaacttgctgatatttatcgcctgaccggcggtaaaatttcgaccttatcaaaggtggttcaccaccagggaagggcatatgcaaatattaatggtgttgttgctgtcaatttgaacgatgaaaatgcaagtgcactgtggcacgagctgggtcatcatcttgagtacagtaaccctggtttgttagagaaagcccggtcattcctgaaggccaatgttgaaggggataagccatctttcgttaatatcggtgggcgtggcaagcctgaatggtgcttcagatctcgattgagtaatatttatatggcgaaggtatacccgccagcctcagtaagtaacaccgggaaaattcggcagaaatcaccgactatttccaaaacgtcagcaacggaagtattctctatggctcttcagttgtatcatgacaaagaggccgctgccgcatcactgatgaatggtgacggattgctggaactgttattaggtgtggcaaaggagctaaataatgcagattaa

SEQ ID NO: 244488 - DNA, 309 bp, Klebsiella pneumoniae
atgcagattaaaatcgcagcgccattaggcggagatgccattatcgaatttgatgataatgaagaagtttccgggcgtttaagcattatctccggtgacattaccgaggacatgatcgctgaagccatagctggggcaaatcccaatagctatatgggattcgttaacacccttgatgctcccgcaagtgatgttctccgaacgctgcatctttacgctggctggtttgttgattggccagcagtagatggtggcgatgaggacgacgacgatgattttggtgatcatgtagaccagatcgtatattga

SEQ ID NO: 244489 - DNA, 1095 bp, Klebsiella pneumoniae
gtgattaatcgtatacagaatgaatctgcctggttagcactgatagaacggtataaagacaattgggaactggcagcaaaagagttgcttgatattgagttaacacctcatcaagcaaaaattattaacgcgataaagaacaccggagccaaaatcactgccaccacaccacatggtattggggaaacctctattgtggcagtgattagcatcctgcaaacaatactgtattcgtgttcccgtacagtggttgtttctcctgcgattaacgattgtcgaaaaacaataattgactatatgttccgttattgggagcgagttacccaaaaacacccttttcttggcaattatttcagaatacaccctgacaaagggttggtgcatatcagtgaaacatggggatgcgtctatataacctattgtctgaataacgaagagtctctggctggttttactggaccgcacgatcttttcatcgttattaactcggcggaaatcagcgatcgcgctcatgcagtgataactggcaatttaaccaattatgactcgcgcctgctgttgctgtcgaaaccatcggaacgcgagaaagggtacttttatgattcgcatcaccggttggcccatagtaaaaacaatcctgctggttttttcacggcgataactctaaacacagaggattcacctctcgtttctgaagcatatcttgaattcaaagccaaagagtttggtgggcgcaatagcgatgaatatcgccgattgatcttggggaaattccccgggattcgggagttgatggaaaagtcatctgttccccgtaatatgcacttcacaatgactgacggtagtaaatgggtagtgcctacgatcgtgatcgccaaacaccatgcgaaacatcacgctcaaaaacacaactccagcacattagactggctgaaggcctatacaataccgttattctcggcaaaccataacgctataactgaatgggctaaacaaatcccctggcaggatgtggctgaagaggcatttgtcgaaaaaccaccaagagatatgcacgagcactgttggctgacatcagaaaagagtttctcgtga

SEQ ID NO: 244490 - DNA, 789 bp, Klebsiella pneumoniae
atgacagcacaaaatactaaaaccattcaataccgcctacgtaatggccagagtgtcgaagtgaccatcaataatgatggagtacctggcgaaaaggtttctatctctgatctggctatcgaaaaaaccatcatgtgccaccttggctttactgaagaagtgagcaaaaagcatggtgtagcaatctggagcgcaatggatactggtatgcgcaaattcattactgctcgtaccccagggatgaccatgatggacctcatgcagattgcgccgctgtttgaatgtgagcctttagatgtattcagcaatccagctatctgccagcagttatatggtgagatgaaactcgcggttacccccattgtgctgcatgaaggatcgcttgctggcgtgtggaaagtagagcgtatttcaagctacatgcctttccatgtcaacggcgtaatcactggtgaaaatcaacctgtttccgttataaagtcagacctcaagcgcgcaattcttgaagcaagttgtcgagttgtcggcctgggcaaacagtcttatgtttccttcccggctggccctgaaggcccggcagaaattctgattatggatgccgatctgctatggcaaatacagtttctgattggcaaaagcatcatccgcgctgaagaactcgatcagtacattacctgcacgatgacggatgaagtcaaaagtgtggctatagccaatgcccggaacctatgtcgtgctgcattaacagaactgcaagaaaacaccacggaagaggtggaaagtgattaa

SEQ ID NO: 244491 - DNA, 489 bp, Klebsiella pneumoniae
gtggcacaacgcggtgtaaacaaagtcatcctgattggtaccctggggcaagacccggagatcaggtatataccaaatggcggcgcagtcggaagactcagcatcgcaacgaatgaatcatggcgcgataagcaaacgggccaacagaaagagcaaacagaatggcataaagtcgttttgttcggaaaacttgctgaaattgcgagtgagtatttacgaaaaggttctcaggtctacatcgaagggaaacttaaaacccgtaagtggactgatgacgccggtgtagaacgttacacgacggaaattatcgtcagccagggcggcaccatgcaaatgatcggcactcgccgcgacgattcacagtcctcaaatggctgggggcagtcaaaccaacctcaaaaccaccagcaatacagcggtggcggcaaacctcagagcagcgccaataacgaacctccaatggactttgaagacgatattccgttttag

SEQ ID NO: 244492 - DNA, 558 bp, Klebsiella pneumoniae
atgaagggaaaaacagccgcaggaggcggtgcaatttgcgctatcgcggtgatgattaccatcgtgatgggtaatggcaatgtgcgaaccaaccaggcggggcttgagctgattggtaacgctgaaggttgccgacgtgatccatacatgtgcccggcaggggtatggactgacgggatcggtaatacacacggggtaacgccgggtgtgcgaaaaacagaccagcaaatcgccgctgattgggaaaagaatatcctgatcgctgaacgctgtattaatcagcacttccggggcaaagacatgcccgataatgccttcagtgcaatgacaagcgcggcattcaatatgggatgcaatagcttacggacctactacagcaaagcgcgaggcatgcgagtagaaacgtccatccacaagtgggcgcagaaaggggaatgggtgaatatgtgtaaccatctccctgatttcgtgaacagtaacggcgtgcccctgcgaggtttaaagattcgccgtgaaaaagaacgccagctttgcctgacggggcttgtcaatgaataa

SEQ ID NO: 244493 - DNA, 1020 bp, Klebsiella pneumoniae
atgactgatgttttgaaaacggtcactgaccgcttttgtctctatagtaatgctagaaaaggtcgccagaacgggcgacagtatgtattaagcgcggtaaagaccatgcttgaaagcaaggaaactcaggaaggtttacgccttggtgagcttttcggctattacggtcacggtcgccgacagctgaccggcaaactggaagtaccagaaaccagcgtgatcatggtggaaggtcgcccggtcgttatcgacaatgttccagcttgccgcacagtagctatatccgttgacgacaacggcatcgttacccatacacaggaaattcttaacacagagccgggtaaaattgtcgccgcgatgatcgaaagccgagctggtggctggagctgggccactggcgggcgtgagtccgggaaaatcgctgtaaccaccagcttccatggtgtggattatgtgacaacgccgaactatatcagtctggatcatcctgccagcgccggaatgtttgaaagcgcggattctaaatctttactggcagagtccctggcggcgcatgggtactccgacgagtcagtgcaggccgttatatcccattacggcaaaatggctgaactggaaatgatggtggaggcgacagagcgtacggcagaactggaaactgcactactcgaaagccagggccgccacctcgaagcaatggccaagatcgcagatgctgaagcgcgaatcgctttgctggaggaaacagcgggtatccgcgacgatgtgctggcagcaatgcaagacgaactggataacctcccgatcttcgtctccgccgcccaaaaagacgcattccgcctcaaagaacctggtgatgcaaaaatcgttgccacacttttcgaatctctgatcaaagttggcgcacgcaacttgcctgtcaccaagaaaattaaggaggttccgcaagcggctaacgtccaggcaccgcgtgagacaagcatcatcacgtttaataattcaatcaatccgtttaaataa

SEQ ID NO: 244494 - DNA, 1710 bp, Klebsiella pneumoniae
ttggcagacaataaaatcacgctatcctcggtcaggaaggcgctggcgggggtttttaaagacaacggagaacgggacaacatcctcctgtccgcgctggctgtgcacggcggaagtgggtatttgttttctcgcgcaggggcaccggtacaactgtccggcttcttaggcggcaaaccgggcgatagtggcatggctggtgatgggctggtggatgggagtcgctttatctttgatgaagttcaactgccggaagaccgcttgcaacgctatccgctactcgaagaaatggcggtttacagcacgatcgccaccgctctgaacatccatattacgcacgcgctctctttcgataagaagaccggacaaaccttctctatcgtgccggtacacaacggaaacgatagtgactatgacgccgcgcaggggttgtgtgacgagctgatgaacgacatcgggcgaaccatcaacaaagaggtcgccgggtgggcatttatcatgtctgtatttggggtggcttatgtcaggccatacgccaaagaaggcatagggatcacgtcttttgagtgctcctattacacccttccgggcttcatcaaagagttcgaggtcagcggtaacctggcgggatttagcggcgattatctgaaggacgcgtcagggaaaatggttttcgccgatccgtgggccattatccctatgaaaatcccctactggcggcctaagtcaaaccttatgcctgtgcacactggccataaagcatacagcttgctggataatccggaagagcgcacgccgattgaaacccagaattacgggaccagcttgctcgaatacgcctacgagccgtacatgaatctgcgttcggcgatccgctcactgaaggcaacgcgttttaatgcgtcgaaaattgaccgaatcatcggcctggcgatgaatagtctggatccggtaaaagcagccgattattcgcgcaccattactcagacgcttaaacgagcagctgacctgatggaaaagcgcgcacgcggcgcgaataacatgcctacggtgaccaataccctgctgcctattatgggcgacggcaagggacagatgactattgatactcagaccatccaggctgatatcaacggcattgaagacattctcacctatatgcgccagctggcggcagcacttggcctcgattacaccctcctggggtgggcagatcaaatgtccggcgggcttggtgaaggtggattcctgcgcacggcaattcaggccgccatgcgcgcctcatggatccagcagggcgtagaagagttcattcagcgggctatcgatattcatcttgctttcaagtacggcaaggtatacccggaaggtgatcgcccgtacaaaatcgaattccactccgttaataccgctctgcaacaagagcacaacgaaaaccgcgactcgcaggcgaactacgccaccatcgttacgcaaatcctcgatgccgtcagcaataacagcgtcctcgccaattccgatgcattcaaacgttacctgttcagcgatgtgctggagattgacgaaaaaatctctgaagcactggtgaacgaactgaaagcgaaaagcgaggacgacgatcacctgatggattccatcatcaaaacaccgccacaggaactggcgcaaatccttgaatcggtctttaaagagggaaacgagaatgactga

SEQ ID NO: 244495 - DNA, 6768 bp, Klebsiella pneumoniae
atgaacaagctatctatgggtgtgtttcgctgttcaagtgtcagcgaaatattgaaatacattagggcaataacatctcaccgagcgccgattaaatacggcgtggaaaaggtggaaggcaaaagctatgaccgactgcgccgggaggcgaatcagaaggcgatagatttgcttaattcgctggtggacggcgcgacactgacagatgaacagcgccagatcctggccgggtacactggtgaaggcggcattggcgggtccgtctccgaatattacacaccaaagccgatcgctgaaggtgtctgggagatcatgaagctctacggtgcggacgtaggtaacactctggaaccatcggcgggcaccggcgtttttaatgagacaaaaccggttggtacggtgatgaccgcgactgagatcagcagtgtttccggtcgtataaaccagctgttacatccggaagacagcgtacagatttccccgttcgaacaactggctgtaagcacgcctaacgattcattcgaccatgttgtgggtaacgttccgttcggcggtcgtgataacacacgcaacatcgataagccttacgcagaagaaacggacatggggtcttacttcatgctccgcatgctggacaagataaagccaggcggattcatgtgtgtgattgtgccgccgtccattgtttcaggttcaaacatgaagcggttgcgcctgcgcctatcccgtaaagctgaatttcttggcgctcaccgcttgcctaccggtacttttgacgcaaacgggaccagtacggtcgtagatgtggtgctgatgcgcaaacatccggcagagatggctgagaaaatccccctggtggatgaaagcactcttgaatcggcaaatgtgctttggccaacgtttatttctggcaagtggtttgaaaaggacggccgccggtttgttcatggtacccaggaaaagggcttccaggggcgtattgaggttcgtgccgacgggcagattgataaccaggctcttaaagcgaagctgattcatcgtttcgaaagtcgtatcgactggtctttgctcgatatggctgaaccgtcaccgaccgcagatgttgttgatgaaggggaaatgcgcctgattaatggcgtatggcaaaaatatgctggtggtcgctggattgaatctgatgcagggaaggagctgaagattgatgttgccagttatggcgcggacagctgggaggctcttcagcgaaacctgactacaacagaaggccgtctcggtatgacatttacccagatggcaaatgtccgcgataagtacaccacatcaatcagcgacgatatggtgcagctggtggactggattaacagccagcctgaaaaataccgtgaacgcttgtatcgcggggcgatgattggccggatgttaattgaatatcaggacatgaaggccgccgggcatagtgctgaacaaatcgaacagcagcgcctttctctggtatcccgtttgcaggcagagattgaccgttttggtaaccccggtcgcggtccgatagcgaaattatcggggagcggtgcgcgcgcctggtttgctttccgtggtgcaattaagctggatggcactatttctgacgagctgacaggaaaactggttacgcatgattccagcgccagttatgactccaccagctatcaggacaccctgcgttatctctacagtgatctcactcgcgatccaatccagctcgatgatttccgccttgcgtttaccggcgaactgccagccagtgatgacgagttgcttaatttattggccagcacccctggcattgcggtttcaccgtatggcgggattgttccgttcgcccgcgccaccagcggcgacattaacgagatagtggcaccaaaacaggaattccttgccacactccccgacggtccagtaaagaacaacgtccttaatcagctggcagcgatcgaagagaagcgcatcaagacgccagcagagaatatccgctttaagctcaatagccgttggttcgaccgctccgtcattctggaatttttgcaggaaaacggctatccggatctgcgctatgtgcagtcagtgcagctggaaggcgacgaaatggtttctgacacctatcacggtggtgatggtctgttcgtcgggcaccgatacggtgtcgtccagcgcaaggataaagaaacaggcgagatccgctacgagtgggaccgtaaatcgggtgaaaacgcgaccgggttcccggcacagctggaaaagtatctcaatggtgcgcgtatcggtggcaaagatagcgcgacggcgaacggctaccgcgagcagatggcactgcttgaggaccagttcaataagtggatcaagacgcacgatcgctacgatgagctggttgccaaatacaacgatgtgttcaatagcaatatcccgtatgagcactctggcgatccgcttggggtgaagggattaagcggtaagcgccagccatttgattaccagaatagcgaggtgagacgactgtccgaagatgggcgcggcatcctgggcttcggcaccgggctgggtaaaacgacgaccgcgctggcgcttgaggcgttcaactatgagaacggtcgctccacccgtactgcgtatgtagtgcctaaatcagtgctggaaaactggtattacgaagcaaaagagttcctgagtgaagaggcattcagtaactacctgttcgtcggtcttgatgtgctgatggatggcgatcagattcgccaggtgccggtgctcaatgagaacggtaaacctgttcttggtactgatggcactccagttatgcgcgatgctcttaagctggcagatgaagccactatcacggcgcggatgaacgcgatcccgcactcaaattaccgtgcagtcgtgtttaccaaagaacaatacgcccgcattccgctacgtgatgacaccgtagatgagcatgcacaggatatgctttatgacttcgttgcagccgggcgcgtagccagcgcaatggactccgactcccaccgcaaagaggccgcgcgtcgccgggtattgtcggagtattcagataccggcaccgaaaaagcagagaagtatccgtactttgaggatatgggcttcgatagtgtgatcgccgacgaaggtcacaactaccgcaatagctataaaaatggtcgcgaagcgtcacaactggcctatctgcccaccagcgcggtggcgcaatcggcgcgagatatggcaattaaaaacgcgtacctgatgaaaaagaatggcgggcgcgggccggttctcctgactgcaacgccagtcgttaacaccccgatcgatgcatacaacatgctttctcatgttctgccgaaggaatactggcagaacatggggatctacggtcctgatgacttcgttaaattcttcggcaagaccaggctggaaacggtacagaaaattagcggtgaagttgaagaaaaaatggcgctggtgggctttgaaaaccttgatgcgctgcgcggtatattccatcgctgggtaacgcttaaaacggcggaagacgttaaggataccgtggagatcccggagctggacgaacaccagcaggatgcaccacttactgaagaacaactggcggcgtatgaagaattgcgtcagcaggcggaagcggcggccaaagccaacaatggcgtaacgacctcggtcaatgaagacggcgtgattgagcacgagaaagcccgtccgatcttctcaataatcagggatatggaccgcgtatgtactgacatggacctgtactatcgccggatcacctatcgtttcctgccggagtacgccgatgcggtgcagcagctggcggacagtttgcctaaacaagccaccagcgaagacgacgacagtgatgattcaatcacgcagcaatcgcaatactccctgatagataagggcgagtttattcagttgcaggttccggaagcgttcgagcaggaagtgaataagcgcctggccaggtttggcattgacgaacagaccgtaactcaccccgttacgccgaaatacgcgaagctgatcgccacgctgaaggagtttttcccggaaggtaagcaaatcatcttcaccgatgaaaaaacgcagcaccagaagctcaagcgcattatctgcaatgctctaaaccttgaaccttcaaaggtggggatcctgaatgctcagacggttgccgaggcaggtaaaaccggtaagaaactgaaagcggttaaaccgccgaaagagctaccggatgaaccaacagatgcacagatagcgaaatacaacgagcaaatggctctgtatgacgcctatatcgcgcagcaaaatgaaatgtcgttgggcggtctggaaaagattgcagccgacttccaggagggccggactccgatcatcatctgcaacaaaaaggcagaggtgggtatcaacctgcatcgaggaacgactgacatccatcatctgacgttgccatggacaccagccagcatcgcacaacgtaacggtcgcggtgcacgagttggctccaaccgtgcaagcgttcgcgttcactactactgcggcaaggggtctttcgatgaataccgactgaagacgctgaagcgtaaagcaggctggatctccgatatcctccgttcagataagtcagaaatggagaacgccgacgccaatgacatgatcgaaatgcagatgtataccgcgaaggatgacggcgaacgtctggcaatgatgcaggttcaaatggataaggcgaaagctgcgaaacgcgctcgccagaaagaacaggctactatcgaccttcagaactacatcaaggcgcagcacgcagctggtgaggatgtggaggtacttaccgctgaattggagcgaagcaaagcggaacttgaaaagaccaccgccgaggtagctaaattcaaacaggcggtaatggccaaagcagctgataacgcagactggaaagcccgctggggtagcgtccatcacacagaccgtatgttgttagcacagtatcgcgcgtcgttgaaaagcgccattcagcgcaaggctaatatctctcaggccatctcccgctatgagaaattattgaaccgtactcagaaggccgcgacggatatcaaacgcctgcgcccgctggtggaggatgcaataaataaaggcattctggatgttgatcctgatctggttaaccatgcgaatgagttccttgttatcggcgatcgctcatggcgtgtaggccaatactatgattgtgccggtgatatcgttcgcattaagtcgctggacttcgacagccagcgcgcagacgtggagatcatctttaccttcaaaggcaccaaatcgggtaactgggatgtgaagacgctggataaacaggttgatgtaactcccgatgaagatgctgttatgcagaaaatcagtggtggcgtctccatcgccgggattaacgacatcatttcctgtgacgatttctaccgtttccagcagcgcggcatgatcaaaatcactgactcatacggcgttcagactacagagtcaggctatagcatcgattttgttggtacctatacggacccactgaagcatgcggtttacccggatcgccgtgacggcgcgctgaagtcgtcaattgcaaaatgggtgcttggtatgatgtcggaagggaataaccgccagatccgttcggcagaaacattcctggttgaactgtttggctccaattatggcgatgtaatcgcgtcatacggagatacgctatcccctgaagcaattcaggagaaaatagcggatgcgatcgccagaatgccggaaaaaacaagccagggggctactcgtaacggggattctgaacttgaagtcaccaatgccattttcggtaccaatgagttccgggcgtcagattatgagatcaccacagcacagtttggcaccattggcatttacagcaataaagccgagatcaagcaggcaatggacgcagcaagcgcgcgcatcgcagcagaacgggaagccaatctgaatcatgcagtcgccgcgctgactcaatcgtgggtaacagcaatcagggaggccgccaccacagggaaaatcacacctgcaatagcggatgtcgtaaacgacggctctaaatttatggatgcctatcaaatggatgcggtgaagttgccatcagcctatggtcaactcagctatcgcatgacctacaacctggtatcaatgttttccgaccttgccatccttgggctggtggatcttaacgaggttacgccggaattgctcagcatgcgcaagaatcatgtggagatattgcagagaattaacacggttcttgccgggcgcaccgatgaagagaaacaggccgacgctgatcggataaacctagcccttggcaacatcacggaggaagagattgccgccagaaacgagaaacaagaagagttatcatcaatacagggtgatgccaccagcatagctcagtctcttggtctgaattatcgcgtatccaccgccgacctgaagatgatgtacgcaccaaaattcgccgctggcgaggtatttgggcttcaggaagcctcaggcatgaaaggcgttcttttccgtgcgaaagacgcaatcaaggcgaaattcggcgctcgctggctgccagcgaaggcgaagaacagcgatttcccgggtaactggtggattatcgagacaaaacacaacgtggcggacgttctggccgtcatccaacaatacgcataa

SEQ ID NO: 244496 - DNA, 375 bp, Klebsiella pneumoniae; identical to SEQ ID NO: 130137

SEQ ID NO: 244497 - DNA, 1305 bp, Klebsiella pneumoniae
atgagcgagtatatagaaattgcctatgcagcagctacacataggctgtgctttcttacaggcactggattttcaaaggctgtttctgatgataaagccccaagttggcaatctttattggagcaactgtgcggtttattgaaggatggtgactcactcaaagaggaattatttcctgatggaaaagcaaaagaccttagccttgaagaggctgctcaggttattgcactaaaatttatactttcggggaaaaatatttaccaggagattgagaaaatcatagcctcaatcgaacttgatccatcaattgaatatattcaagactttttcaaagaaaacacatttaaagtaattacgacaaattatgacaagttagcagaaaaactggctggagagaatcgaacgtgtacaatcacccccggcctgccaattccaaaatataattgtgaggttaaagtctaccatgttcacggctctatagactccccatcagatatggttgttactagcgaggattatttcagatttataaatggtaattcttacttttcaaataaactaagcacagttctacatgaaaacactattgttattcttggctattctctaagtgacgcgaacctcaaggcgattataaatgaatataaggtattttcacgggacaacgtaatgtcctccaatattttccttatttcccgaggaaaactattgcaacctattaaagattactatttttcctgctttgggattagggttatagataaaacagaggtgtctgatttctttagaaaacttaacaagaaaattccagaagcaaaaaaaataaaagacaaattgaggcactcaatcaaatcggtaataaaaaacggaagagagtataaaatagagttcttgaagttagaggattctttttatcatatcatttcctccatttcatcatctggatatagctggaatgatgaaaaggtattaaatgttttttgtgatataatagataaaaaaatagatcttactaaagagtctggcgcatgggagcagtatgaacacctggcaaaatggcttatttatttcggtagtttatttgaagtaaaaggaaccaactttgagaaaaaatacatacatgcggttgaacactcaatgacttatatgaataaaccttacgaaacaggctactcatggcgagcatatctagcctggaaaacaaaatggccttcactgacagcatctaaccgctctcttattaagagtaagatggaagaaatcccgctacaacagattcacgatattatatctaagtttatatag

SEQ ID NO: 244498 - DNA, 642 bp, Klebsiella pneumoniae
atggataagaaaatatgcgttgtttcgatgagcgtcggcaaaccggcgtcaatgactgctgcatggatcaacaacgagctgataatggctgagcggaccagctaccctgaacgccgccgcgacatggaactccagctgctgcgcgaattgcgagaaaaagaggaaaagggttttatcgtgctggtggaagaggaaaacagctttattactggtcgagttggccagcgtgtaaggttgcgcgatcccttcatgaacggcaggccggtactgattgaagcaatgcagatttacaaggagctggaacgccagaaagcgatcaagttaccgcgcaaggaatccggcaaatacatcctccaccaaagcatcttcgattccgaacacgataaaaaaggcgatgaatttttcaacatcaactggagcgaaataacgacagagcatgttctgacgttactatgttgctttgcgacggaatacaacaacgttgccagcgcagactacatcagggcaatggctggagaagttgaggcacgccaggaaccatcgttactaagccctctgattaacataattcgcggaacccaaacgctggcacaaaaacaggtgcctaagggagtattaacaggaaaaggaaattatctataa

SEQ ID NO: 244499 - DNA, 906 bp, Klebsiella pneumoniae; identical to SEQ ID NO: 141637

SEQ ID NO: 244500 - DNA, 2118 bp, Klebsiella pneumoniae; identical to SEQ ID NO: 141636

SEQ ID NO: 244501 - DNA, 708 bp, Klebsiella pneumoniae; identical to SEQ ID NO: 141635

SEQ ID NO: 244502 - DNA, 222 bp, Klebsiella pneumoniae
atgagcggcatccagaaggcgtccaggcagaaggacatcattcacgcggtaactctgaccgttctgtgtggtcacggtgaggtaatattgatcgtcaaactgcctatcggcaccgatatgcacaatgttggacgtgtcgatccagcacaggtttgtgccttccacaggatgaagaggtttgattcggcctttcagccagagtctgtacataaatttgtgtaa

SEQ ID NO: 244503 - DNA, 222 bp, Klebsiella pneumoniae
ttgaacactttccccctgcaaatttcccagaattcacgtagcgacgccatcgggaccgggcgcgtgacatatgcctacttcgattatgccgatgcgctggcgctgcgggagatggccagccaggctgatttacccaaatacctgctggccccggaggtgtcggtgtttctgcggtatgtgccagacctgcgccaccctctggaacacgggcgcgcgtattaa

SEQ ID NO: 244504 - DNA, 612 bp, Klebsiella pneumoniae
atggataatgcgatattaaatagcgaacttatagccatacaggcaggaaacattatcgtttataactatgatggtggtaatcgggaatatatttctgcatcaactgaatatcttgctgttggcgttggtattccggcaaattcttgtttggatgctccaggctcacataaagcaggttatgcgattctccgttcagaggatttaagttcatgggagtatgtgccagatcatcgtggcgaaactgtctatagcattgacactgggaatcccgaagaaatcacggtgttgggtgactatccggaaaatacaaccactatcgccccgctaacaccatacgacaaatgggatggagagaaatgggtggttgatactgaggctcaacatagtgcagctgtagaggcagcagaaacaaaacgtcagtcattgattgatactgcgatggattccattagtctgattcagttgaaattacgggctggacggaagttgacgcaggcagaaaccacgcagcttaactccgtgctagattatatagacgagctgaacgcgatggatttaaccacggcaccagatctcaactggcctgaaaaacaactttctacagccagttga

SEQ ID NO: 244505 - DNA, 327 bp, Klebsiella pneumoniae
atgcagaatgctaacaggaatgaatgggttgattacgccaaaggttttgggatagtacttgtagtctatggacatatttcaagaggtttatataattccggaataataagcgatactaaatggtttcattttatcgattctttaatatattcctttcatatgccgttgttcttcttcctttctgggcttttcttaatgaaaagtctgcaagttcgcggtcttccatactttatttttaataaagtagatactatactttatccttatcttatttggagtgttatacaaggcctgactgaattcttactgtcaaaatatactaactga

SEQ ID NO: 244506 - DNA, 207 bp, Klebsiella pneumoniae
atgaaactctcatcgctggccagcggcatcggctttgcggaactgacctatcaggtacggcagattgagagctataacgcgcacgccctggaggcgtttgccgtcggcaccgcgctgtacctggcgctgggggtggcgatgggcgtggcgctcacgcgtctcggcccgggaagaaaactgcaacggagcgcccgacatgaacgctaa

SEQ ID NO: 244507 - DNA, 180 bp, Klebsiella pneumoniae
atgaacgctaatctggcggtgatcgccgataacctcgattacctgctgtggggccgactggcggagggccagcccggcggcgtggcgctagggctttacgccgtggcaggagctgcgctttatcctcctgccgcaggggctggccaacgcctggcagccgattgtcggccagtatcttaa

SEQ ID NO: 244508 - DNA, 1107 bp, Klebsiella pneumoniae
atgaaaattcgttcacaagtcggcatggtgctgaatctcgataagtgcatcggctgccacacctgctcggtgacctgtaaaaacgtctggaccagccgggaagggatggaatacgcctggttcaacaacgtggaaagtaagccgggcgtcggtttcccgaacgactgggaaaaccaggaaaaatggaagggcggctggatccgcaaaatcaacggtaaactgcagccgcgcatgggcaatcgcgcgatgctgttgggtaaaatcttcgccaacccgcatctgccgggcatcgatgattactacgagccgtttgattatgactaccagaatctgcataacgcgccggagagcaaacatcagccgatcgcccgtccgcgctcgctgatcaccggccagcggatggacaagatcaccagcggtccgaactgggaagagatcctcggcggcgagtttgaaaaacgcgccaaagatcagaacttcgacaacatgcagaaggcgatgtacggccagttcgaaaacaccttcatgatgtatctgccgcgcctgtgcgagcactgcctgaacccggcctgcgtcgcgacctgcccgagcggcgccatctataagcgtgaagaagacggcatcgtattgatcgaccaggacaagtgccgcggctggcggatgtgtatcaccggctgtccgtacaagaagatctatttcaactggaagagcgggaaatccgagaaatgcatcttctgctacccgcgtattgaatccgggatgccgacggtgtgctccgaaacctgcgtgggtcgcatccgctatctcggcgtcctgctatacgacgcggacgcgattgaaaacgccgccagcaccgagaacgagaaagatctgtatcagcgtcagctggacgtgttcctcgatcccaacgatccaaaagtgatcgagcaggcgctgaaagatggcgtaccgcagggggtcattgaagctgcgcagcagtcgccggtttacaaaatggcgatggactggaagctggccctgccgctgcacccggaatatcgcaccttgccaatggtctggtacgtgccgccgctgtcgccgattcagtccgccgccgatgcgggttaa

SEQ ID NO: 244509 - DNA, 402 bp, Klebsiella pneumoniae
gtggaaagcctgcgtattccggtgcaatatctggcgaacctgctaaccgcgggcgatacccagccggtactgctggcgctgaaacgaatgctggcgatgcgccactataagcgtgcggaaaccgttgacggcgtcgtcgatacccgcgcgctggaagaggtggggctgagcgaagcgcaggcccaggaaatgtatcgctatctggcgatcgccaactacgaagatcgtttcgtggtgccgagcagccatcgtgaacaggcgcgagaagcgtttccggagaaaaacggctgcggctttagctttggcgatggctgccacggctctgacagtcagttcaacctgttcaacagccgtcgcatcgacgccatcgacgtgaccagcaaaacggagccgcacgcatga

SEQ ID NO: 244510 - DNA, 312 bp, Klebsiella pneumoniae
gtgaaagcgttttttcctgccgtccgggagtttgtctacaaccccaacgttaaaaacgctctggtactcaaggcctacgacattatcagccaccgccgtctggagtttgacgccgggcacaccgacattgcgcagtcattcatggcaatccgtcgcgccaccaccgccagtggcaaccgcccgacgtatgaagccagccgcagcgaagaaaccagccacgccgatctggcgtgggcaacaatgcacgcactgtttaacgaaccactgcagggcgagtccgccaataccagtaatattgtggagattttttga

SEQ ID NO: 244511 - DNA, 1146 bp, Klebsiella pneumoniae; identical to SEQ ID NO: 154444

SEQ ID NO: 244512 - DNA, 1077 bp, Klebsiella pneumoniae; identical to SEQ ID NO: 106122

SEQ ID NO: 244513 - DNA, 1791 bp, Klebsiella pneumoniae; identical to SEQ ID NO: 106123

SEQ ID NO: 244514 - DNA, 198 bp, Klebsiella pneumoniae
atgaaagatagaccgcatgacgtggcgatggccgagcacttccgcgcccatccgacgtatgcagcggagctgcttgctgaagtctgccgcgaaggcaaccctgctgagctagccattctgttgcgacagatggccacagcctcggaaggttgcgcgaggtcggatgacgccgatacagggcgcgctttatttcgctga

SEQ ID NO: 244515 - DNA, 1158 bp, Klebsiella pneumoniae
atgagtaaaatattcaaatccatgataacagttgcaggcagcaagaaaatttctgacgctatagttaacggggatagggttattttcgctcaaatgtccgtaggtgatggcggtggtaatgcaacaactcccgatgaaaaccagacctctttggttaacgagcgcttccggactcagcttaacagcctgaagctgtcagataccgaaaatatcattatcgcagagatgataatcccgccagaagtgggcggatttaacatcagagaggccgcgctgtttgatgatgccggtgtgtgcatggcggttgccaacgtcccggaaacctataaacccgctctggcagaaggttcagggcgctttactatcctccgcatctggctggcggtcagcagcaccgaagcggtagagcttgtcgtcgatccgggaattgtgctggcgacagtcgaagatgtgattaacgctggtaatgaaatcaaagattacaccgatgagcagctgagcgaacatgcgggctcacgaaatcaccctgacgccaccctgaacgaaaagggatttacccggctgagtaatgccattaacagcaacgaccaggataaagccgccaccccgctggcggtcaggctggctattgaagcggccatcaccgccgcctgggagatagacaacccagtcggcacggtgaagttttacgcgcagaacatcaacccaaacgagcgttatccgtggtcacaatgggtttacaccggcgagaataaaacaattcgtgtaggcaaagcggatggttcggacgttggtacgaccggcggcagcgataccgtcacgctccagcgtgctaacctgcccgccgtgcagattgacgtgagcggcgaaaccagcgagcagccagaacagcagctgaccacgaaacctgctggcaggcacaaacatggcggcgtaccgagccgggacaatccgtgggagattggcggcgatatcagccagcgctttaacccggcaaacctgggcgatactgacgaggcaccggaccatgagcataatattgatattccaccccacggccataccgtgacaggcaaaaccgacaacctcggcgagggtaaatcgttcagcgtggttgaggcccacaccctgctgatgtgctggagccgtgttgcctga

SEQ ID NO: 244516 - DNA, 2211 bp, Klebsiella pneumoniae
atgacaatggaatcacctgaaatccagctcaaggcgctgaacaatgctctccgtcgtttacgtggggcctgttccgcacttgacggcgaggagcttgatgagaaattacttgtggtcatgcgacgactgctgcttgctgaggtgctcgccgatacttggattgtggcgataggcggctcgcaaggggcgggtaaaacgacgctgatggcgagcctgtatgacctgcatcatgacagtagcggctggttacgcagtaatgaaggacgcggcgagaaaatgccgatactgatccttgagagtactgagactaaagttgcgcagggatatgtacgccgcttggttaaaactgataatgatttgacgctggaggatgaaagtgttgatgccagcgcgtttcagcgcgcggtctgcgatcctgatgccgaggatttactgccggtgctgaaagtaccgcagcgttattttacccgcaataatcaagcctggttactgctgcctggctatgaaaaacaagaacgagagaatcgtgaatggcaggaactgatgcgtcaggcgatgattgctgcaggcggttgtatcatcgtgaccgatgagacgcgactggccaaccaacagcagctcgacattgtcaaagatatgctggaaaaagagcttaagaattgtaaaccttatattgtcatatccaagacagaggcgtatcgccataattcgcaacggcaagctgaattaagaaaaagcgcggctgaaaccttcaatgtcgctgccgaaaatacggataacaacattattttaaccggcaccgacgatccgcaatatataacagaatggatgccgcacctgcgccgcgccattgacgaccttaacttttccggacaaaccaaccgttatctccagttaacccaccttaccgggattgtcagtaaggatctgccgcgcgtcatgaatatgatccgcacccagtcacgtttgtattaccacagtgataaaggcggccaggacgatggcagccaggtgctggccgaagtcttggaggtgtttgacagcgccgcgcaggagctgcgggaagagcacaccgaaaaggtgaaaaagtgcgtcgcgagaacctttgccacggcgaagctgattatggacagcacgctggtcaaggagcatgagggatttgccaactgggtatcgaatgcatttgataccaccagtgagacaaaaggcaaattgcagaaactggttcagggttcatggcaggacgcatcagctgctttcttcgccgactatgtgaacagcctgcaacaattaacagcggcgaaactcaagcctatgcccatgccaaacggcaacgatcgcacaaacttgcctgcctcaccgaagctggtgaagctaatagcacttggctatatggatagcgctgggaagcccgtgcagcacgaacagttggatgctgaaaaagtaagcaatatcagaatgttgctaaaccatggtgtcacgtcgaatgcgcagaacagcacggcggggaataaacagttcaggaacagtgtggcattgatcccggtgctctcgctggagtacacccgtcttgtctacgccatgccagaaatttgcagcgagcttcggccctacgtcacgcttgagccggaagggggcgagatatccgcaggtaacgtcgcggcagaaggggttcaaaccctcaacgcaggggttgaccttggcaagacagcaataaaatcgctggcggcggtgctggcgattgacgtggtcagcgacggcgattccgatatcctcggcgcgctctttggtcaggatcagccttccactgacccgacgggtttacctgttccccccgcgccggtgatgatgcatcctgctgccgttgcggtaaccgccgttgtggcggcggcctatgttaccgcagctgcggtaacgcgaatgcgcaccttcgagaaaaaagcgagcgcccaggcacacgccatgcttgccagcgttcatgaccatcatgttgagcatttacgcaatcggttcgatgagacgatgaacgcggcgcgtaagcggattagtgaaaccttacgtgcgcgttatcacatggacgaaatgctgatgcgcaaggatcggttggctaaagccattgccgatgtcaatgccctgattgacgatctgcgcaatgaactgggttcatcggcttcgggtctgcaagtgttaaacaccagccgcggtgagtga

SEQ ID NO: 244517 - DNA, 1932 bp, Klebsiella pneumoniae
atgacgtacgggaatgttatcgattattggcagcggctagaatcacggcagtcggagtgggcttttcgcgcctgggagcggctgattaaaacattgagtcctgatgttcaggaaagaatacagctcagggaaagcgatgcagatccgtacgtggtcatctttggtaagacccaggtcggaaaaaccaccttactgctcgacctgatgggcatcgatcttcaacagatggcaacgctatcgcaggtgctgcgtggcgggcgggaagccgggaaatctgccaccgccaccgccatggagtatcgccgttcaccggacgcacgatggggattgtctgtgcaatcggaaaaacgctggtttacctctgacgacgcgctggcagaggcattagcgcagctgagacaacatatggaacggggggaactggttgtcgattccccctgtattgtgcatattccggggcgttttttcaggctgcaaaccacgggtgcgcccggcgtgcgtattctggatctgccgggcgataatcccgcgaatgcacaggagcaaaagcatgtcaatcaaatggcgaagacctatcttcccttcgctgatttggtgctgctgattggtcgtggcgacgatttgagcttcctgcagccggacgttatcacgctgccgggcattgaggactggcaggcgatgccgtaccggtttcgcatcgtgaccacctattcctactcagcccagtcggtgaagatgctgattcgcaacgatccggcttccgatatcacgcagttacgtcagcgccttattgaacagatcgaacgctttaaccgcctgagcggcgcggcgaaagatctgaacctctactttccactcgagtttggcagcagctggctcagtatggcggaaaacgatagcgccctgtatgcccgcgttgcccccatagtcagcagcttgcgtaacgaactgctggaacagattgcggcatcgaccagcccgctcggacggctgcgcagtaccctggatacccacctcagcgttaaatatattcaggagaaaaaaacatcggcaatcgaaagagaactgttggggttacaaaaacagcaacaagagacagaaaatacactgaaggtctgggcaagcgcggtgactcagacgcaggaaaaaataaaccaaacggacaaattattaaaagataacgcgttatctgccagccaacggcttattgataaagctgtagaaacggtagcggtattaaaattacagggagattacagtagcaaaaaatgcacgactttacaccgtatgattgccgattattgcagtgaaattaaaacgatccagttggctgtggcaagtcagtcgccatactggcaaaaagtggcccgcaagaatattgaacctacccgccaagcggtgcaggatattcttgatgaaaacttcagcgctattcgctgtacgctcaatgactattggatcgacacctatcttagttcggcgaattatttatctgacaaaaacagcgtcatccatgccgctgatagagccaaagcggaagttattcgtttgtggacctcacgatggaaggctgccgcagagaacgtctggaatgaatacaaaagcgaactcaccaacgaggggatgactcttgatgtattgcgggaagagcagaataaatccctgcggcagaagacatcacttgagcaacagaccgcctcgctcgaggacgagttagtgaaaattgccacggattcgcaggaggatcttgctcgttgcgagcagtttgttcactttcttgatgaagagtatctcaacaccttaaatgagcgcttggattcggcttttagggaacgtgacgactgtgatgcgctattacaaattttatcctgcgtagcgttgaaaaatcagcgggaagatttaatgaatttaactgaaaagtattccaggtga

SEQ ID NO: 244518 - DNA, 966 bp, Klebsiella pneumoniae
atgaatgtgaccagtgaaataaaaaataaagaaaaaacgctcgccgagttaatggtaaaaatcctcaaggaacctctcgatccccttaagggttcggtaaaaaaactccatgaagaggttctggacactaaagataaggttgaagaaatcaatgatgccattaatgcggtaggcgcaaacaccgaagaaatcatcaatccgctgaaaagatcgttacgtgagctgcgagatgacgatcttcctgggattataagtaagctgcgggagtttatttcgactcaggtagaagaaaaaaaacaggatatttgcaccgcgcttagcgaacaatcggtgcactatgatagccagttgaaagccgcgaccggtaaggtctgtgaaaaactgtcagatgttcttggacagcaaaatgagagtgtccaaacggtaatacagcagtatcaacaaacgggtatcgacagcgctgaggctttgttgcagcaacttttggctgctaaccgctccctggaggcgaatgcaagcgagcaacggtcgacgcgagaacgtgaccagcggttggctgaacggctggaaagtgtcatgcaggtccagcagcaaataaagcattctataagcgaacttgaccagcagttcaagggcgtgagtcaaggtgtgcaaacggcgcgcaccacgctcgcggaacggcaggaaagcgatcggagggaagtgttaaaaggccttgaaacgctgtccaccgacgtccaggcagcactggtgcagcatctgatcccgccaacccaagctattgagtctctgcaaaccagccagcaggcgttgaccgaggcggtgagccagcaaaagagcaatctggaggcgcaaattgccgcaagtcagggtagactccgctacgttgtcatcatttttgccctgtttgctacctcaacgctggcgtatatcggctatgacatctggaaaaatttagctccctga

SEQ ID NO: 244519 - DNA, 795 bp, Klebsiella pneumoniae
atgaaacgaagaacgcgcatttactacccgccagaacagaaagcgattatctcggacagatataagcagggggattccctgcatgatatcgccagaatgttcgacagatatcattcttctattatgcccactatctaccagacaggcggctaccgccctcccgtgcgaaaacggcaccgattagcgctttcgctcgatgaaagagagaagatatccagagggctggtagcaaaactcagtatcaggaacatagccgccaaattatcacgagcgccctcaacgactagccgcgaggtgatgaggcacggaggtgccagacaataccgtgcagcaaaagccgatgctactgcgtgggaaaatgcgctgagaccaaaaccttgcaagataattgaaagccccgcactgtgtaaaatcattgcagagaagatgcatcaggactgctcgtcggaacagatcgccggttggctgaaacgctgttatccggataatcaggaaatgcatgtgtcacacgaaacgatttataaaacgctttttatacaaacccggggagcattaaaaaaagagctgcagcaatgcctcagaagcggaagagccgtgcgtagctccagaacgtcatcgcttaaagggaaaggattagggtcaatcccgaacacgatacctatcagcgaaagaccaccagaggcggctgacagagccattcctggctactgggaaggtgacttgattcagggctcgaaaaactcctatatcatcaccctcgtagaacgtcattcccgtttagtgatgctggcgtaa

SEQ ID NO: 244520 - DNA, 867 bp, Klebsiella pneumoniae; identical to SEQ ID NO: 204247

SEQ ID NO: 244521 - DNA, 1461 bp, Klebsiella pneumoniae
atgcaccaacatattacggataaatcttttcaagctttttttacagacgcagatgaccttagaaatacaatgattagcttgttgggggacgtgtctaatcaaaatgttattgaaccttgtttcggtgagggggcatttataaaaaacctaatcggaaagcctaaaaatatcgatgctattgacattgacgaaaatcattttttaagcgacttgaaaataaagaactgtaattattttcacgccgattttatcgattattttgttcagccaaataatcgtaaagtgctactccctaataccgagtatgatgcaactatttgcaacccgccttacggtctgaagttcacacaagaatatagaaaaataataaaaaaagcattccctaatgtgtatgctaaggaatcttacgccttatttttttattttacattgaagaccttaaaaaaaggagggcgttatgttttcattatccctgataccttccttacgagtacgaatttgaggtatatgaggcatttcatacttcaatcagctaaaccaagtcatatcattcagtttaaaagtagacgatttggctctgttaacttcggttatagcaatatgtgcattattgctggtaatgtggggtctcttggtactgattgcgaagttaattggatcgatgccgttgactcaaatcaacctctcttacaactattggaaaccgataacacaattgttcgtggtgattattttattaataatgtggacaaagcctggattagtccaaaattgtttgaatcaattaagatatctcgagaaactgtaactctgggtgagattgcagaatgtaaaacaggtatttatacaggtgataatcaaagattttgtggatatgactccgaaaatgcgcctaaaagaattaatggtcacccagttgattggagtctagtaaatctaactcccactgatcttgagaaggagcatggtatagattcaaatatagcttatgtaccttttgtccgagggggacatagaaatgtctttgaagctacaaatagctgtattcgatgggataaagaagctgtcgcatattattataatgataagaaagctcggcttcaaaacaaagatttttattttaaaaagggaatcgcaatacctatggttacctctggtaagttaaccgcttcagaaatggataactgcatttttgaccaaggtgttgttggtgtttttgccaaagaggcaagctaccatgattttttattgatttacctaaaccacccatttgcaacagaacaaaagtccttggtatcacctggggctaataactctgcaaactatttgaagcggattaacattcctaagttgaccgaaactgagttgttagaagcaagcaaaatagtcgagttagcgaaagttcaaggatgggaaaaaacagaagacaaaagaaatgattttatttcctccgtcttttaa

SEQ ID NO: 244522 - DNA, 552 bp, Klebsiella pneumoniae
atgacaacttatgctttctttctagaagaattatctgcagcagaaatgctgaaaggattactgcctcgattacttccggcagatgcagacactcgatatattgtatttgaaggtaaacaggatctagaaaagaacttggagaaaaaattaaaaaactggatgactcctgatactatttttgtagtcattagagataaagatagcggagatggtccaacaattaaatctagactgtctgatatttgctcaaaggctggtaaaacagatgttttaatacgcattgcatgccatgagcttgaaagctggtatcttggagatttattgtctgtcgaggaagctttaggaatcccgcggctttcccgatctcaaaataatagtaaatatcgtaaccctgatcgacttggtaacgcagctcaagaattggtatctctgacaaaatacgcttatcaaaaggtatctggatcaagagcaataggcaagtgccttagaatcactggaaatctttcacacagttataatgtttttatatcaggtctgcaaaacagaatttaa

SEQ ID NO: 244523 - DNA, 1200 bp, Klebsiella pneumoniae
atgttaattgaagccataaaattaaaaaatttcaagtcgttccaagatcttgagatgaacaatatccccaaattttgtgttattgtcggggcaaacggcgtaggaaaaactactctttttgatgtgtttggctttctgaaagattgtcttactttcaatgtgagaagtgctgttcagaaaagaggaggttttgaagaatttctgagccgtggagtggatgttaccgaccggacaatagagattgaagtaaaatttcgtattgaaataagtgggtatgaacgattagttacttatattctaaaacttaaagaagattctaggaaaaaagtttatgttgaaagagaaatcttgagatataaaagaggttcctttggctcgccttatcactttttggacttcaccagaggccatggtactgcgattgttaatgaagatgatttcagtaaacaagatgaagaactaaacagagagactcagcagcttgattctgatgatgttttagcaatcaaagggttaggtcaatttagtaaatttaaagcagccagtgctttcaggcagttaattgaaaattggcatgtttccgactttcatatcaatgcagctaggggatcaaaagatgctattggatatgaagaccatctttctgcaactggcgataatttacagttagttgcacgaaacatccacgataattatcctgaaatattttctaaaattattgactcaatgaaacatagagttcccggagtttctgatgttaaaccgataagcactcaagatggtcgtttattattaggttttcaagatggaagctttgcagatccctttatcgatagatatgtatctgatggaacattaaaaatgtttgcatatttagtacaattacacgatcctgagcctcatccattattatgtgtcgaagagccggaaaatcaactatatccaaaactgctagtagaattagcagaggagttcagagcctatacacagagaggagggcaagtatttgtttctacacattccccagacttcttgaatgcagtaaatattgatgaggttttctggttaactaaaaccaatggatatactcgtgctttcagggcttcagatgatcctcaacttgtagcctatatgaatgatggagataaaatgggatatttatggaaacaaggatttttcccaggagttgatccgcaatga

SEQ ID NO: 244524 - DNA, 894 bp, Klebsiella pneumoniae
atgaatttcaaaaacggaggacaagcagtcataacgcgcatgcttgaggcgtatggattcaagacaaggcaagctctatgcgagcagttcaacgtatctgcaagcactatgggtacgcgctggatgcgtgacgtatttcctgctgactgggtaattcagtgtgcaattgaaacgggtgcatctatcgaatggctctcattcggaaaaggcgtaccattccctcagaatacagaggcatcggtcatgtcaaaggcaactgcaccaaaggttcagtatgttccccaaatcaataatcaagagaaccctattgggaacttgctgaattttgattcaggcggacgtgatgcaatagaccggctaatgaaagcgtatggcttcaaaacaagacaagaacttgccgaccatttgaatgtatctaaaagcaccatggcaaacagatatttacgagacactttcccagctgattggatcataaaatgctcgttggaaacaggaaattctcttttatggctagccactgggcaaggcagcaagcacagttctctcacaacattggtaaaagagctgcctaaatttcatctcaatgcaggaaaaatggttgagtgtggttcatatattttcgatacgtcatttttacctgctaatctttcagcaccaattgtcattcaagacgggttgatgacatacatttgtgatcaaaacattactgatgtattggatggacactggctcatcaatatcgatgaaacctattcaattcggcatattacaagactacctaagaagatgataaaagtatcatcctccataaatagctttgaatgtggtttttctgatatcaattttgtagctagagtttatttattcatttccagcatcaataaaagcaattaa

SEQ ID NO: 244525 - DNA, 480 bp, Klebsiella pneumoniae
atgaaaaaatatctaatctgtttgtttgtttttttaacatcctgctcttcaggtaaaatagagttttatccaagtggggggcggttgaaaaatgccaagatagggacgttttatcagcaaggtttggttatgagatttcaggggagtggagagcttatttcttttatttcaagtaattttagagcaaaattaactcctgataattccggtctggatatagaaccaagctttatggggaatgaaaaaaatgactttaacaaaggtagcagccctaacgaacttgtaataagtggagtgcccagaataaaaggtgtgataaccgttgaaatagttgcaaaaacatatgcatctatgtattcaaaatcacaggtgtttactaaaaaatatcaaataaatgttgatcatgtctttaatgatattaaagtagacaatgtggtcgccggtattacaatttggaggggtgatatcgagtggttttaa

SEQ ID NO: 244526 - DNA, 2070 bp, Klebsiella pneumoniae
atgaaacgcgccccttttctcaacaagcagtctcccgagcgcacgctcgaggtggtgatcctggccggaagcctggcatgggagacctcacgcgtctggcgaaaagatcccgaccgggaagatgatattcctccggtggtgctcggcccggatgaactggccgatctggacaacctgaccattatcaggcccgacacgctctacgtccgtgtacttcgtaccggcgatatacgcgaaaaagacctgctgaaaatcgccgtaaaactggcacacgcgggtgtgcagacggcgcggctgatgacccccgacggtgagttagtggagaactggaccgggcagcttgaacgcctgcggcaggaaaggccttccgacatcctgccggatcacttccgcctcgatgaagaggcactgtggtttgacaagttcaccgaacgccgcgacggcgaaagcgacgtccagccccagcgcatttgttcccctctgcgcgtcaccgccatcacctgcgacagccatgatggcagctatggccgcctgctggaatggcacaccaccaccgggcagttacggcgctgggccatgccgatggcgatgctcagcggcaacggcgaggagctgcggcgcattctgctggagaacggcctgacctacatctccacccgccccgccctgcgcagcctgctgtgtgagtacatctcacggtcactccccggacgccaggtcacctgcgtgaagaaaaccggctggcacaatggcgtgtacgtgctcccggatgaagttatcggtcccggtggcgacaatgtcatccttcagggcagccactatctgaccggcggctttgcgcaggcagggacgctggcagagtggcaggagcaggtcgccgcactctgtgcaggcaactcacggctggtctttgccgtctgctgtgcgctggccgccccgctgctacgcctgaccggaacgggcggcggaggctttcatctgcgcggtgagtccaccgacggcaaaaccacagtgatgaaggtggccgcctccgtctgtggcggcacggattactggcactcctggcgggccaccgggaatgcgctggagggaatcgccagccgccataacgacgccctgctgccgctcgatgaactgcgcgaagttgacccgcgtgaagccgggatgattgcctatatgctggcgaacggccagggcaaggggcgcgcccgcaccgacggcgaggtacgtaaccgcagacactggacgctgctgctgttctccaccggggagctgtcgctggcagaacacaccgaacgcgccggggagcgcctctacgccgggatggacgtgcgcatggtacaaatccccagcgacaccgggcagcatggcgcgtttgagcagctacacggctttgccagtggccagcagttcgccgatgctctctgcgaccgggtggcccgcttccacggcaccgcctttcgtgcctggctggccttactcacccacgacctggacgccagcaccacgctggcaagagagttacttcgccgctaccagaccgccctgatgccggacaacgccggaaaccaggtgcagcgcatcgtggcccgctttgcgctgctggcggtggccggagagatagcgacgctgcagggcatcacgggctggcgggaaggcacggcgtatgaggcggtgcagatctgcctgcacgcctggctgaacgaacgcggccatattgccaaccaggaggatgaaggtgtgctggcgcagatcaagcggttcgttaccgcgcaccagtacagccgttttgcctcgtgggatggcccggaccgcccgctgaatatggtgggctttcgccgggtggaaaaagatccgctgacgggtgaagagcacacactgtttcacatcctgccggagggctggcgggaaatgtgccggggattcagtcccgccagagcggccagattatgtctggaagcggaatgcctgctgcccggcagcgatgggaaataccagtcgcaggttcgcctgccggagatcggcaaagccagagtctaccggctcatctcccgcatcctcagtatctga

SEQ ID NO: 244527 - DNA, 657 bp, Klebsiella pneumoniae
atgggggaagtgatctcgatcatcggccgcagcggctcgggtaaaagcaccctgctgcgctgtatcaatggtctggagggctaccaggagggcagtatcaagctcgggggcatgaccatcaccgatcgcgattcacaggcccgggagatcagccgctccatcggcatggtgttccagaactttaacctgttcccgcacatgacggcgctggagaacgtcatgctggccccgcggcgggtgctgaagaagtcccaggcagaatgccgggagctggcgcagcggatgctggagaaggtcggtcttggcgaccgtctggattactatccggccaatctctccggcggccaacagcagcgcgtggccattgcccgggcgctggccatgtcgccgaaagttttactctgtgacgaaatcacctcggcactcgacccggaactggtgggtgaagtgctgaaggtgctggagcaactggcggcggaaggtatgacgctgatcctcgtcacccatgaaatgaattttgcccgcgaagtgggcgaccgcgtggtgtttatgcatcagggacgcgtctgggagcagggcgacagcaaaacgctgttcgccagcccgcagaccagcgaactgaaacagtttatctcctcggtgcgcggtcttaactaa

SEQ ID NO: 244528 - DNA, 612 bp, Klebsiella pneumoniae
gtggcaaagcaaaagttcaaaatcaccaactggcccacctacaataaagccctcatcaaccgtggctccataactttctggctggatgatgaagctattcaggcctggtatgagtcggcagcgccttcttcacgaggcagacctcagcgctattctgaccttgccatcacgactgtgctggtcattaaacgcgtattcaggctgaccctgcgcgctgcgcagggctttattgattccattttttctctgatgaacgttccgctacgctgcccggattacagctgtgtcagcaggcgggcaaagtcggttaatgtcagtttcaaaacgcccacccggggtgaaatcgcacacctggtaattgattccaccgggctgaaggtcttcggtgaaggcgagtggaaagtcaaaaagcatggccaggaacgccgccgtatctggcgtaagctgcatctcgccgttgacagtaaaacacatgaaattatctgcgctgacctgtcgctgaacaacgttacggactcagaggccttccccgggtcttatccggcagactcacagaaaaatcagggcagcatcggcagacggcgcttacgatacccggctatgtcacgatga

SEQ ID NO: 244529 - DNA, 1404 bp, Klebsiella pneumoniae; identical to SEQ ID NO: 138599

SEQ ID NO: 244530 - DNA, 1092 bp, Klebsiella pneumoniae
atgaggggatctctcagtacccagctgcagtctgatttcgccaccggcgcggtcagccatacgctgctgaccggcgtggactactcgcggatgcgtaacgatgtggatgccgactacgggacggcggatcctatcagcatgagcaatccgcagtacggcaatccgaatattcaggtcaccttcccgtacgcggtcctcaaccggatggagcagaccggcctgtacgcgcaggatcagatggagtgggataaatgggtgatgaccctgggcggccgttacgattacgccacgacctcaacgttaacccgcgccaccaacagcctggcggagaatcacgaccagcagttcagctggcgcggcggcatcaactacctgttcgataacggcatctctccgtacttcagctacagcgaatcgtttgaaccggtatcgggttccaacagccgcggccagccgttcgatccgtcgcgcggtaagcagtatgaagccggcgtgaaatacgtgccgaaagatatgccggtggtggtcaccgcggcggtctatcagctgaccaaagacaagaacctgacggctgatccggctaaccaggcgttcagcatccagaccggcgagatccgctcccgcggccttgagctggaggcgaaggcggcggtgaacgccaatattaacgtcaccgcggcctacagctacaccgatgcggagtacactcacgatacggtgttcaacggcaaacgtccggcggaagtgccgcgtaacatggcctccctgtgggcggattataccttccacgaaaccgcgctgagcggtctgacgattggggctggggcgcgctatatcggttcaacggtcagctactacaaaaatgacaccagcaccggtaagaaaaatgatgcctttagtgtggccggttatgcgctgatggatgcgacggtgaaatacgatctggcgcgctttggcctgccgggatcgtcggtcggcgtcaacgtcaacaacctgttcgaccgcgaatatgtctccagttgctacagcgaatacgcctgctactggggtgccggacgtcaggtcgtcgccaccgccaccttccgtttctaa

SEQ ID NO: 244531 - DNA, 135 bp, Klebsiella pneumoniae
atgagctccttttaccagagcaagttaaaactgcaagagctcttctcgcttggtctcaacaagaactggcctccaaagcaaatgtggcaacatctacacttgcggattttgagcgtggctttcgtactccagtag

SEQ ID NO: 244532 - DNA, 336 bp, Klebsiella pneumoniae; identical to SEQ ID NO: 139380

SEQ ID NO: 244533 - DNA, 1524 bp, Klebsiella pneumoniae
atgggtatcattatttgcctgcggttcggtatccgaatcggagtcggagtcactgtcggaatccgaatcgctgtcagagtcggagtcggagtcggagtccgaatccgaatcactgtcggagtccgaatcgctgtcagaatccgaatcgctgtcagagtcggagtcgctgtcggagtcagagtcgctgtccgaatcggagtcactgtccgagtccgaatcactgtcgctgtcggagtccgagtcgctgtcggagtccgaatcggagtcgctgtccgaatccgaatcactgtcggagtccgagtcgctgtccgaatcggagtccgagtcgctgtcggagtcagagtcgctgtcagagtcggagtcgctgtcggagtcggagtcgctgtcagagtccgaatcactgtcggaatcgctgtcggagtccgaatcactgtcggaatcagagtcggagtcagaatccgagtcgctgtcggaatccgagtcgctgtcagaatccgaatcgctgtccgagtcagagtcgctgtcggaatccgaatcgctgtcggagtccgagtcgctgtcagagtccgagtcactgtcagagtccgagtcgctgtcggagtccgagtcgctgtcggagtccgagtcgctgtcggaatcgctgtccgaatcggagtcactgtcagaatccgagtcgctgtcggagtcggaatcactgtccgaatcggagtcgctgtccgaatccgagtcactgtcagagtccgaatcgctgtcagaatccgaatcgctgtccgagtcagagtcgctgtcggaatccgagtcgctgtcggagtcggaatcgctgtcagagtccgagtcactgtcagaatccgagtcgctgtcagagtccgaatcactgtcagaatcggaatcgctgtcagagtccgaatcgctgtcggagtcggagtcgctgtccgagtccgaatcactgtcggaatcggaatcgctgtccgagtcgctatccgaatcggagtcactgtcagagtcagaatcgctgtcagaatccgagtcgctgtcagaatccgagtcgctgtcggaatcagagtcgctgtcggaatcggagtcgctgtcagaatccgaatcgctgtcagaatcggagtcgctgtcggaatctgcatcagcatccgactcaccgatatcacttcctgccacgatattaatcgtcagcgtagccgttgccgtatcaccatccgcatccactatcgtgtaggtaaagatatcggcctggccaacagcatccgcatcgccagtcgccttgtaggtatagctgccgtccgcatggatcgtcagctgaccgtaaagaccatttatcacaacacctgcagccgtcacatcaagcggcgtggtctgcacgctggaggcgattttgcttaccgtaatgccatcaccggtgtctgctacatcaccccctgcatccgcaaccagcacattgccggcaattgccgtcgaggtgtactgcgtagaatccgtgattgtcgcctgggcaaccgacagcagattcgctga

SEQ ID NO: 244534 - DNA, 720 bp, Klebsiella pneumoniae; identical to SEQ ID NO: 139639

SEQ ID NO: 244535 - DNA, 1164 bp, Klebsiella pneumoniae; identical to SEQ ID NO: 226549

SEQ ID NO: 244536 - DNA, 1032 bp, Klebsiella pneumoniae
atgagtaatatgaaattaacggcggctccggccagcgagggttcctccttcttcgctaatttgcggcataaaatgccgaaagataccggcatctttgtggtgatgctggtgattgccctgacctttgaaatcgccggctggtatgttcgcgaccagtcgttcctgctcaataccaaccggctggtgctgattgtgctgcaggtggcgattatcggcatcatcgccgtcggcgtcacccaggtgatcatcaccaccgggattgacctctcctccggctcggttattgcccttgcggcggtggtggcggccagcctggcgcaaacctccgatagcctgtcgccaatgttcccggcgctggtcaacctgccggcggtgatccccatttgcgcggggatcggcgtcggcctgctgtgcggcctgaccaacggtttcctggtgacgcggaccggtatcccgccgtttatcgccaccctcgggatgatggtttcggcgcgcggtctggcgcagtattacactcagggcaacccgatcagcttcctctccgacagctttacggcgataggccagggggcgatgccggtgattatcttcttcgtgatcgccgccgtgtttcacattgcgctgaagcatacccggtatggcaaatatgtgtatgccatcggcggcaacatgacctcggccaaagtgtccggcatcaatgtgaataaatatctggtgatcgtctacaccatcgccggggcgctctccgggctggcgggggtggtgctggcggcgcgcgtcagtagcggccagtcgagcatggggatgtcctacgagctggacgcgattgccgccgcggtgatcggcggcagcagcttaatgggcggagtggggcgcattaccggcaccctgattggcgcgatgatccttggcctgatcaaaagcggttttacctttgtcggcgtcgatgcctatgtgcaggatattattaaaggcatcattatcgttgcggcggtaaccatcgatatgcgtcgcaaccggaaaaaacactaa

SEQ ID NO: 244537 - DNA, 774 bp, Klebsiella pneumoniae
atgagatcaaaattattaagtatatatgtcaagaatataggatgtatcgggcctgagggtgttcaggttaagcttgatgatatcctttgtcttgttggccccaataactccggaaaaacaacgatactcagggcttacgaactcgcatttaacccaatttctttcaatattagtaatgaccgatgtaattgggctactgctgaacaaccgtctgaggttatccttgatgttcatattccagaaggaatgggaaatgtagatgaaaaatggaagattgttgatggcgaaaagaggatagtcagaagttcatgggtctgggatgaaaccggaaaggctataaggaaaacatgggatcctcaattagataattgggcacctgatgggaaggctggtggagccgataatgttttcaaatctcggcttccaagaccaatgcgtataaaatcattagatgatgccataacgacagaagaagtattgcttacccttgccttaagccctttagtaaaggaaattaagacactggaaagtgataataactctcagatatcgaaagataaagcggctctggcagctactgttaatgcactggcaggacctcatcaggaaagaatttccagcatttctcagcaaatacaatctggatttcaaagtatctttccagggcttggcgtactactccatgtagaaatgattccacctgaactaaaaattgagaatttgctcaagcaaggatccggattattggttgaagaagctgctggccaatcctga

SEQ ID NO: 244538 - DNA, 816 bp, Klebsiella pneumoniae
  misc_feature (759)..(768): n is a, c, g, or t
atgtatcaaacacaaattagaatttggttcaatttcatatccaaggataagcatcatatgttagggacaatgtctaattcatatgatttttttctttcaatgagtgaaatatcttttgctttagacccaaaatatgaatttgataaagatataggatgtgtgttatcgctaataaaaaacaccaaagagcttagatttagaattaaccaatacattaataaatataaaaacaaatccccaagcttgaaccgattaaacactttcattaacaaccttgaggaaaatgaacatttttatctgttaccagcgatagaaaatgttagtcagacacaattaattaaattacatacttctctttcattagcccatcttgataaagtaagtaaagatgtcaatattgaattttttaattctaacttcagcgactttatagatcaatattctatgcatgggattgatcctaagggagtaaaaggaaaaataaagattggagaagggtttaaagctaacagagtgtgtagattttgtaataataaaaacgactctcctccaacattttcaaaagaagctcatgccatttcagagtctcttggcaataaaaaaataattctcaatgaagagtgtgatttttgcaatgaatatttcgatcagaatattgaaagagatattgatacatacttgaaattatattcatcattttttagaattaaaaacaaagacaacaaagtttctaaaatcaaaggaaaaaacttttctttnnnnnnnnnnttaataaaactattgatgggcatgaccgacatgtggatttcgttttag

SEQ ID NO: 244539 - DNA, 1869 bp, Klebsiella pneumoniae
atgcacgcaattcttcaacagtatgtccaagatctctctgctcaatttgaaattgaagctgaagagtcgaagctatttgaatatttttgtaactatgtcatagcatcaaaaaaatatttgggtagattcaatccaatcgacatcaccacacaagaagatgatgcctcattggatggtgtgatatttatagttgatggggaattgatatataatgttgacgatgctgaggcagcatttaatacttacaaaacatcattacccgttgaaataattcttacacaagcaaaatctggggaaagtttcttaaagagtgatatatcaaattttaaggtaggtatagaagactttctaagtttagaacctaaacttccaaatggcatttataacacccaagcaattgaaattcttaagttaatttttaaaaatgtcaaaaaaatacataataaaaaaccttcgctaacgataaacttttgttctagtgggacatataatgcagagagagagatcgaagcaacgttagatataatcaaacgtttttgcattgagactgactatttcagcaaggtggaagttaaaccattaggtagaaaggagttgatggacttatggatatcgctcacagaaaaaaatgaagcggaactgcagttaattgactacatcggtattgaatccatgccgggtattcctcaatcatatattgcgactgttaaagccaagcacttcattgaaaaaatagcaatggatgaagacggaaagattaaagagtctgtttttgaagaaaatataagggcttttcttggtggtgagaataaagtaaataaaaaaatctcagagacaataacagacgatgaaataaaatctaagcaattcccagttttaaataatggagtgacaattatctctccagaattgtctattcagccgaatacaaaagtgataaaccttactaattaccaaataataaatggttgccaaacgactaatacgttgcatcatcactataatcaaatcaatgatgatgtaagattaatagtaaaatttattgaatcacaagatgcagatgttgctagtagaatcattgaagctactaatagtcagtccgctattgagggagaagcttttttagcgcttaaagaaaaagcgaggatggtacaaaagttttttgacctaaagcgtaaggacgatacgttagagagtctatattttgagcgcagagaaaatgaatatcgtggtcacgatatccaatcaacaaggatttatgatatcaaagaattagctagatgttttatatccgtatttaaggccgatcctcataatgccgcgagatatgtgaagaaagttttgaatcaaaaggcatctggacaaaaaaaccctgaccaacaagtggcagaccaacaagaagcggcagaccaacaagaagtggcagaccaacaagcggcagaccaacaagaagcagcagaccaacaagtatctgaaaaaaaagaagatgttatatttaacccttcagacaacgagtgcgcttacttcgcttctgtttatatacgctataagtataatacaatgattaacggtaaaagagaaaatgcgcaaagatataacaaataccggtggcatatcgcaatgctgtacccttgggtggttcacggtaaagtcgaaaaaatagaaccaaactcaaaaaaaataaataactactgcgataaaataatcaaaagctttaaaagtgatgcttatattgcacatttctctaaatgtcaccagattatagacgcagtagttaatgacagtaatggtgatgtgacagatgaccaactgaaaaggtctagatttacatcggcattgatagataaagcacgaaatctacttggttaa

SEQ ID NO: 244540 - DNA, 918 bp, Klebsiella pneumoniae
atgaacaattcacccgtcttgaaattacaagacatggcaagttccagtgttacagatattgaagaattgcttctcagagcaaaaatgatatctgtgaaattaaatttgcaagacatagcagcctggcttgaacatgagcttaatggatatccatctaacaatctccttcctgactatcgcattataaagaatgctccggtaagagctttcaacccttatgcagggtggattccatatcagctaggtaatacaactggacaatataaagagatatatgattctttaactacaatccacatcaacaaccccgtatcaatgctcatagaatacgctaaaagtgatagcactctatatagtgacatgccagagttcatgactgatttattacaaaaggctggaggttgtgactttcgcatggcttggaaaataaaccctgcgcaaatcactaagattctctcaaatattaaatcaagaattctggattggtctttagcgcttgagagcaatggaattcttggagagggactattgttttctcaggaagagcgaaaagaggcagcggcaatgactgttaacaatattaataactttaacggcaacgtgcataatgctggtgctattggtgctggtaacacaggagatattcaccaacagaacagtattacttcaggtgattttaactcccttgcgcgtcagctaaaagagcacgggctggatgatgctgatgtcatagaactggagcagcttgttaaacagactgataaaccgacttcaaaaggtgaagttgaaaagggctttggggcttggattggtaagattacgggaaaggctttcactggagggcttaaaatcgctggtgcagtggctcctgctgttcttaccaatgcgctttgccattactttaacattcctgtctga

SEQ ID NO: 244541 - DNA, 2784 bp, Klebsiella pneumoniae
atgacaacaactaatatggaacagctagaaggaatcatttccaccagcatcaatagaggtttcccggaagagccgccaactgaatctgagttcgaagaaaaagctttagaattgaggcagtctcttcagaatgtatttaatgtaagtgatcttgaatttgaagcgataaaacgtaggctgaaggcaaaaattgttatacaaatggatgttggtgtagcgattttggataacaaaaagcctcatcagtcatggcttccagcaagacgcgctgagttagatttctttttctggcaaagatataaaagatacctagaagaagttaaaggctggaatccacgtgtaacaggcaatctggaacgtgtatcggatgaaattgttgacttgcttggtaatcccaaaagcgaaatgccctttcagcgcagagggttggtactaggtgatgtacaatcaggaaaaacatcaaactatactgcaatatgtaacaaagccgctgatactggatataatgtaatcattgtccttgccggtacaatggaaaatttgcgtcagcaaactcaagagcgtttagatgctgagttttcaggaagaaagagcgagtatctcttagacccaaaacgtgatgccaagaattactcagttggtgttggtgttggtagatatggactggataaaagaatcgaatcctttacatcagttataaaagattttgataaaaatatcttaagccagcttagtctttcattagataacgtaagtgcgacagttgtttttgtaataaagaaaaacaaaaacatattaaataatttaattcgttggctacaaacgaataatactgataacgggagtgttataaaaaaatcacttcttcttattgacgatgaagctgataacgcgtcagtaaacactaatgttccagaaaaagatccaacagctatcaataaatctattcgtaagttacttaagctattccatcaagcctcatatcttggcattacagcaactccatatgcgaatatattcattgatccggaagatgaagatgaaatggctggggatgatttatttcctcgtgactttatttatgctctttctccgccaacaaactatattggggcaaaagaaatatttggggatgaagaagagatacctgcccaatacaaggatgtgcttaatcctatagattctatagaaatggatgcttttcttccattcagtcataaaaagtggcatgttgtgacagagttgcctcccagcatgaaagagtcaatagcatactttttattaatcaatggaattcgtgatattagaggggatattcggaaacatcgtacaatgatgattcatgtcagtcgattcactgatattcaaaatcagattcgtgatttagtaactacatgggtattgcaaatacgttccgatttgcaaaattatgcaagtctatccgaagaaaaaagtagtcaaattaatgggataaattatctcaagaaaatatgggagaaatacggtctttcagagaaagcgagcaagggaactcttccaataacgtggcatcactttctctctgagtatctttttaaagctgtagctccaatcgatgtaagggctgttaaccaaaagagtggtgctaccggattaaattattttagccacaaagatgatggtttaagggttattgctgttggtggaaatagtttgtcccgaggtcttacattagaaggattgtgtgtaagttacttttatcgtcgctcacagatgtatgatacattactccaaatgggaagatggtttggctatcgtcccgactatgatgatttgtttaaaatatggataagcaaagaagctattgattggtatggatatataacagctgcggctgaagaattgaagctggaaatagcccgaatgaaatatgcaaatcttacgcctatggattttggcttaaaggtacgtcaggaccccgcctctttaattgtcaccgcaagaaataagatgagatctgcaacacctgttagtcgaccaattactatctcaggacgattactggaaactccccgcctcaaatctgatcaaatgtctttaaaattaaatgaaaaagtatttaaagattttattagtcaactgcctgaaataggtaaaagaataccgcgtgatgatgcccgattcttttggtcggatgtaagcaaggatgaaattgaattattacttcgtgaatttaagacacatccatggcagcttaatttccaaggtgttgctatagcagattttattagagataatgaaaatattggcaattgggatgtttttattgctgagggtagtggtgatgaattttacaaacttagctgtggtgatgaggtcttagaaataaaacctgagtctcgtgcagtaaaagcaacgagcacccaaataagtatcagtggtacaaaagtacgggtcggtgctggaggggctgctaaaattggtttgagtgacagtgaaaaggagattgcagaaaataatttcagaaaaatcaaaccgaatgctcgtcacattccagataaagcatatcttgagattcaaagaaagccaattttaatattacatgttatttcagttgataagaatgcaaaagataacaatggtaatcttcgcagtcaaatagaagctgatgttaatgttccagaacatatttttgctttaggtattggtattccttctaatggtgaagagaaaacagcaagatatatggttaacatcgttgaatttcgtagcttttatgactttgacgaggatgaagacgaatga

SEQ ID NO: 244542 - DNA, 633 bp, Klebsiella pneumoniae
atgagtgagcagcgaacgcctccgtcacgcccaccacagggaccgattggctggctgctgtcgctgatcgggcggctcatcgggctggttattggcgcgctggtgctacgggtagtgctggaactggcggggctgtatttctggtggccgcatgagggaagcgagcatgttttccaggtgatgaggcgggagcaggtggaactggttagtgctttgcaatcgcatccatcggggaatgacattgtgatactgctggaaaaaggggcaactcgcgtacttatggtcaacaggctcctgcaaaaaccgctcaccgccctggcttacacgctgctgagttttatgttgcgcctgacatggcttgccgccatgctcccactgatttgcctgtgtgttgtaatcgggctgaccgaaggtctggtacaacgggatttgaggcggtttggctccgggctcgaatctacattccttcaccgttatgtcatcaggtccggcagttcggtcgccacaacgctttgggtgtgttatctggcgcagccgctgttcttgcctgcaatgctgattttactgcccaccgctttatggtccgggataacggtatggatggcagcagggagttttaaacggtggttataa

SEQ ID NO: 244543 - DNA, 1494 bp, Klebsiella pneumoniae
atgaccgccaacagctatttcgagtacgtgctcaccctgctcggctggctggtgaacaacggcgtgtggcagacgctgaccgccaccgggctgttcgccctgcccctgctggcaaaactgattaccctgtggctgaaagcgcgcggccagggggcggatgaaggcaacgtcgcccgcctgctggtcgtctgggtggagcactcgctctacagcgccctgctggtgatcttcttcgcgggtgtgccgttcctcaatgtagatatcaataccattacatacgacagccagcgcacaaaacagtgcggctggtcggtggtacagcccggcgattccggctatgcgccgctgatcaacgaacttagcggccagagcgcctcggtgccggtgtggtggtacttcactcacgcgctcggcaaaggcatcaccagcgctgccgtcgcggtattgccctgcaaaccggatttgcgccagttgcgctttgaggtgcaacacacccggatcgccgatccggcgctggcgcaggagctacaggatttcgttaacgactgctatggaccgtcgcgcgcacggctgaaaaagctcggcagcgatatcagtgaggagcaaagccgggaagtggactgggtgggatcgtctttttacctctccacgccgggctattacgaccacgatcattcccgttcaccgcgcgccgcctggccatatgacgccagccgcgacgacggtctgagcgatacgggtggcggaggctatccagcatgtaaggagtggtggtccgatggtgaggcggggctgaaaaatcggctgctgaagcaggtcgataccacgctctggcaacggctgcaaaaactggggcagtcgaaagacgagtacgaagaagcggtattgcgctcgctggtgagcccgcgcaatatgcaggtatcacagggtgggctggtatataacgggtttggtgggaatgcgggagataacttgaatgcatcgcaagcgttaagccggttggggagtatcgccggaatgtcgatttccagcctcgctttgttccctgctttcgacagcgtgcgccaagcgctgccaatggtacaggccttcctcgaaatggcgctggtcattttgataccagtagtcctgttattttcggcatgggagattaaaactgtcatcacgctgagctttgtgcagttcgccctgttctttcttaccttctggtgggagcttgctcgttggctggatagctggctgatggagataatttatagtgagaacggcgcttcacatttcaacctgtacggcttacagaacacttctgatgatctgatcgtcaatatggtgatggggacgatgtttgttgtgttgcccgcgttctggctaggaggactgatgtgggcaggggtgagagttggcggtgctgtggctagtatggtgtctactggtctgggggatattaaaggagcaggagggaaagtagggagcgtattattcaaacgcccctga

SEQ ID NO: 244544 - DNA, 753 bp, Klebsiella pneumoniae
atgaatataaataaaataatcacatacaaaaatatacagcaagaaaatatagagtttgttgatgctgcaattaaagatctttttataacagcatcaagagatgtaattgctctttgggtaaaaagaatagatgaaaggatagtgaaaaataggggcttaaaattttggtttatgagaaataatgatgaatatgcgtcaggaaccttcctttatagccattgcactctttcagcagtaaaatcaatatacttactattcgatttcataaagtcggatgaaggacaaaaagcttggatgtctttgattgatgcttatgattatattgatgttgcaaaaatattcttaaataaatataaaatacaaagcgaaggacttgatgcctttactcatcggatagaatctttagaaaaagtgattttccctacccatcatttgtttttaagcccaggagccaaagaaactctggggaattgtaatatttgtggtagtgattactttgagtgtgagtatattgaacgggaaatatataatggtatgctttgcttgcgaattaatagaaagatattagaggccaatcatatagctttagtagaaaacccaagggataggcggtgcattattttaacgattcaaaatactgatggaactaaacttgaaatattcagccgtaaaagaaagattggtgaaaagaacgctgatgaaatgactttgaatgcaattatacataattttagacagccagtgtttaattga

SEQ ID NO: 244545 - DNA, 210 bp, Klebsiella pneumoniae
atggaaattaaaacttcagattttggaatttctacaaaagatgttcgcaaagtattagttctccctaatattggcttaggtagcgaaaatatttttagcacagattctattagttttattaaatatctaaaaaaagaaattgatttggagttttatcatcaaccagaaggattttgggaacagtaccaaaagcatggagataaattatga

SEQ ID NO: 244546 - DNA, 768 bp, Klebsiella pneumoniae
atggttgattttggatttttatctgattatatgcgcgattaccaagatgactatatattgatcggtggtaatgcttgtgcattaaattttaaagaggagggttcttctttcagggcaacggtagatttagatgtcgtcctgattattgaaggtgataatcagaaattttatgaacatttgagagcttatttatcagagcatgattatatcgggaaaacatataatggaagtaataccggagggtcatcttatcgatttgttttaccagaagataatgttaaaagtgatttacctaagcaaatagaattgttcactaggaaacctgattattttgatacttctaagtcatctaagcctcatattacaccaatacaagttgatggtaatatttcaaatttatcagcaatccttctggatgatgatatatatagttttatacggggttctaaaatatcaattgatgatgttagcacagttaatttagaatgtttattggggcttaaatcgattgcatggcatgcaaatcaagagttgtttgaaaaaggtatagtagaaaatgaaattacagtgtggaaacatgctgctgatattttaagtatcgttggtattattgaggataagcaatatatttatcctagtgtaatctttgatagcctgcaatattcaaaacagagatttaaagaatctgatatatataagcatatcacggtttctcaagatgacgtagaaaatgcgatccactttatcgaaaacaatgttactaaataa

SEQ ID NO: 244547 - DNA, 1080 bp, Klebsiella pneumoniae
atgaaccagataatttctgatgcggtttactttattgagcacgaattttttatcaatgcatccataaaggatgacattagcgatattcttccttttcaattaaagaataaagcacatgcttatacagttctaatagaggggaaccccttcctgtttataactatccaaaatgatgaagttctaagtgttaatagccaaatccatttcaaaagactacatgcaaggctgggttatccaattgttcttgtagcaagaaatctaaagtataaaacgagaaaagaactaggcgattttcttgcaggatatattatacctggcgagtttctttcgataccttcaatgtttatcaagaaaaaggctaaacctttcgaacttgaaaatactattgtcgataatgaaaagccatttggtgttattccatcgtatataataagttattacttatcaggttattatgacgattggtttaatagttttgatattatgagcattttcgatgtatctaaaatggctatatcaagggccttacgtgagttacagagtaatggactgataattcaagatggtaaagataggtataagtcctataggtttattattagtaaatatgatatatggaatatttacaggcacagaataaccccactatcaactggtttcattcccgtttctgtggatggtctacataatagaaagtacttcgcctccggcgaaactgctcttagtaattattctgatttatcaccaccgaacaaagaacaattggggatttatctaagttcgaacgaacggtatcttcgaactatttcacctgctacaattgaaggtgaatcattgttcaaagctattggattattgggagatagtagtaataacatcggtattgaaagctattactccgacggtgaagcgcttgttcaggtttttccatatgagccggttattataaacaattgtttaaatgatgtttttcttgctctttcaaggtttaataaatttgatgttagagtaagagcatcttatcaagagcttgagaaaaaaatatctttaaatctatctggtaatgaaaggaatacatga

SEQ ID NO: 244548 - DNA, 471 bp, Klebsiella pneumoniae
atggcggccatctgcaaggctctggatgaatgtagcattgagcacccggtgttttacgaagatgaggttgatattcatctcaatcccaaaatcggtgctcactggcaggtacgcggacagcaaagacgcgtggtcacgcccagacagaatgaaaaatattatctggcaggtgcgttacacagcggtacaggaaacgtcagctacgcgggcggcagcagcaaagattcgtttttgtttatcagcctgcttcaacaccttaaagcgatgtaccgccgggcaaaaacgatcacccttatcgtggataactacattattcacaagagtgaaaaaacacgaaactggctgaaagcaaatccaaaattcaacgttgtttatcagccagtttactcaccatgggtgaatcatattgagcgattatggcaggcgttgcacgatacgataacccgtaatcatcaatgccgttcaatgtag

SEQ ID NO: 244549 - DNA, 462 bp, Klebsiella pneumoniae
atgactattgagaataacgtgaagggactttccaaagccgaggtgcggaccagtctggagcaatatggctataacgtagtgagtaagcagcctcctggccagttgcgtgagatcctcaatcgtctgtggggtcctataccctggatgctcgaaattgcgctgataatcgaagtgtccctagggaagacgattgaacccgctatcattgcaggatggcttgctttcagtgagatccttggcggcattcaggaacggcgcgcacagtcagcacttgacctgctgcgtagccggctgaaagttaatgccagtgtatgccgtgatggcacctggcgcttgataccagcccgagagcttgtccccggtgactttatcgccttaacagcgggggacctggtccctgccgactgtgtgattgatgagggaacagtggaagttgaccaggcggccctgaccggggagtag

SEQ ID NO: 244550 - DNA, 390 bp, Klebsiella pneumoniae
atgagtgcagatgcagtccagactttagccgctttaagattatattttccagtcgcatccaaagccagtgccagacgtttctggcacaaattacttgccccccaactggcgcagcatcttctttccgtggcgaagaaatcagacattaaagcggcgacattacatcatgtcacctccggttatcttcccggaaaacgattatctcaccatcatcctgagttaaccaatatgacacatcctcagtgtctcgagctactggactcggaagaaaatctgagagcttttcttcatgaaaatatggaagagttaaaaaaggtctatgtcgtactattaaaatgtgaagagcctcatgctcatcatatttcccttcatgcacctgagattgcctga

SEQ ID NO: 244551 - DNA, 195 bp, Klebsiella pneumoniae
gtggataatcccatccttcagaaaaaaatcattatttttattgtcatcctgtgggtaatcaatgaattcagggccagcgttctgaccccgctattgaagcagctgatgtcaatgaacgccatgaatggcgctatctcagatatgggttccggactatacaagtggcagcgacagtgtatatcttcgttcagctga

SEQ ID NO: 244552 - DNA, 978 bp, Klebsiella pneumoniae
atgaagattatcgcctccattgcgcttttaagcgcttgcccatgtgtgaggctggcggcagtgccgctgaccttttccgaaattgccctgaatgccgctgggccaaaaggtcctttgcaaggtacgttactcactccagatgcaaaaccaaccgctgttgttcttatcgttccaggctccgggccgaccgatcgggatggaaacaacccgcttggtgtgagtgcatcgccttaccgacttcttgctgaaggcctggctgcaaaaggctttgcaacgcttcgtatcgacaaacgtggaatgttcgctagcgcaatggccgtagaggatgcgaatgcggtgacgattgctgactacgttgacgatgttcaatcctgggtaaaagtgcttaaaagtgagatacacactccctgtatctggattttagggcacagcgaaggaggcatagtcgcgcttgcctcggctcgagaagaggatgtgtgcggcgtggttcttatcgccacgcccgggaggccgctgggcgaggtgctgagggggcaacttaaagctaatccggaaaacgaaatgttattaaagcaggcactgcaaataattgatgctctggagaatcggcggcgggtcgatattatgaatatgcatccagccctgcaacagctctttaatcctacggttcagggatttttgatcaatgcattttcatataatctggcccatctcatttcgaacatttccaggcccgtgttagtgctacaagggcaacgcgatctccaggtagaagaaacagatgtaagactgcttaaagccgccaatcctcaatcgtccctggtgatactgccaagtatggatcatgttatgaaagaagtggcttcggacgatcgcaaggcgaatatcgcttcatacgctgatccagcactccccttagctcccggtttaatcgactcgattgagcatttcctgattcataattcacattttccgtag

SEQ ID NO: 244553 - DNA, 885 bp, Klebsiella pneumoniae
atgtccgattttagacagttgaactatttcttgaccctggccgaatgtctcaactacggcaaggcagcaaaagtacttaacatttcgcagccacctttaagtcgacagattgcttcactggagcatcaactcggtgtgaagttatttaatcgccatcactatggtgtctcactgacggaagccggcaggatgttctacgccgatacccgtgcggtcgtcagtgcgtatgaacttgcctgccgaaatgtcagaaaaatggctaccggcgaaaagggtaagctgtcagtaggttttatgatgcacgctgcgtactctacacttcctgaactcactaaacaggtgattacgcaattccccgatttacatctgatattgcaggaagtcacaccggctaccctggtcgatgccgtgctggaagcaaaatatgatgtaggtctggttttcaatccggggccggttcgtttactacaatgtctaactttgcatcgtgaaaacttgtgcctggcagtcaatgaaactcactctcttgcagatgaaaaaaaggttggcgttgatcgattaaaaaacgagccaattatcgctactccacactcggttgcaccagtattaagagatatgatcgatctttacttgcgccagggagggatcgagccttattaccgactagaaacgcagttacaacagactattatcagcctggttgctgaaggcattggtgtggcaattgttccagaatcagtaaaaaaattacattatgctggcgtaaaatatcttgaacttgagcagagcccagctatagaacaggttatcatctggcatcaagataacagtaatccagccctgaattcttttacacgtctggccagagcgatagctgaaagatag

SEQ ID NO: 244554 - DNA, 900 bp, Klebsiella pneumoniae
atgctggcacaacaaaatatactggcactactgcatacgtttgaatgcgcggcacttcatttgagtttcacgcgggcggcgaatatcctgaaccttacccagggagcagtcagccagcgcatacgtcatcttgaagagatgctaggatttcgactctttattcgtttaacgcgtaaattgcagttgacgaacgaaggtgctcggttgctgagtgttttgtcgtcttcactaaagcgcattgacgacgaaatagaagacatccgcgtgcaagggctacgcggaacgttatcggtaggattgccaccaacattttcctttatctggctaatgccccgtctggaagaattcgccctgcgttggccaaatctcaatatcaattttcgagttcgtgctggactgattaatttcaaccatgaacgtgtggatatagcaatctactacggcatgcaaaaatatcctgatctttattgcgagcggcttgctgatgagtggctggtacccgtttgcacccctgctctaagtcaacgaatcagacaggataacaattggtttgaaaaagtacggtttattcatgcttctgaatccgttgattcgcaggatacattctccgaatggcgagaatggtgttccgcaacccaaactgagctacctcttgaaaaaaacttcatgagcttcaataactgccatatgtcgattgaagcagctctcacagggagcggtatagcgatgggtagaaaacaactggttaaaaagtacattgctgagggaaaacttaccattccgtttaacaaagaggtacaggctaagcgcggatatgatttgataatgcctcgcgagaaccgttcaaggccgggcgttaaggcattaactgaatgggtacgaagtataattaatgaataa

SEQ ID NO: 244555 - DNA, 1320 bp, Klebsiella pneumoniae
atggaaggtttgaagattgttgttataggtgctggctcaagctatacccccgagctaatggaaggaattattaaacgccggcatgagttcccggtgcgtgaaatttggctggtcgatattgaagacgggctcgaaaaaatggccatcatcgctgggctgacacgcagaatgttgaaaaaaaatggtctcgatattaccgtccatgaaacgctggatcgtcagaaggcgctttctggcgctaactttgtttgttcgcaattcagggctggatgtctcgaagcgcgcataagcgatgaacgtatttcattaaaatatgacatgatcggtcaggaaactaacggactgggtggttttgctaatgcctgcagaactattccaattgcactggaaatcgcagccgagatggaaaaactttgtccagacgcatggttgctgaactttacaaatccttcaggcatggttacggaagcgatacttaagcattcctcggtgaaaacagtgggattgtgtaatgtgccggtaattatgcagaaaggtattgccggtatgttcggcgtagaggatatcaacgaatttatcatgcaggttgcggggctgaaccactttatttttgcccgacatgtctggtttaaagggaaagatattattccggacataatcagcaatattgagcagggaaatgatccactgattccgaaaaacatccctccgtttaaatggccggcaggaatgctcaaaaacatgaggatgctcccatgtccttatcatcgttactattatatgagcgatgatatgtatcgccaggagctcagtgaagcaaagggagaaggtacgcgtggtgaagtagtgaagcagcttgaaaaagaactttttgatatttaccgcaatccagatcttgctgaaaaacccaaagctcttgagggccgaggcgggcaattttactccgatgctgcctgcgaattaatgagcgcaatttataatgataaacgtatcattatgcacgttaacacgcgtaacaatggcgctatatcaggtcttcctgataactgtgcggtagaagtgagttcgatgatcaccagctcaggtccgataccgctcaatgttgaaccattcccggacgacattatgagccaaattcagctgatgaaaacttttgagcagctgactatcgaagcagctgtgaccggggacagacatacagcatggcgtggattagtaataaatccgttaattaagagcggagcatcccttgaaaaagcattggatgaagttattgaacataaccgggtgttgatgcctgcattccacacatctaattaa

SEQ ID NO: 244556 - DNA, 582 bp, Klebsiella pneumoniae
atgatacatttagtggatgatgacgaggcggtaaccaattcctgttgttttttattagaaagccagggttatgttgttaaatgctggaaccagagcgagcaatttttgcgtgaagctccgctcgcttctgtcgggatagcattgctcgatatgcgtatgcccggcatagatggccatgagttgttcagattaatgcgtgaagaaaatagttcacttgctgttatttttctgacaggtcatggagatgtccccatggctgttaaagaaatccaatgcggagcagtagatttcctggagaaacccattgctgccactgttctgcaactggctataaaaaaaggttacgagcactctgccagtctggctattacaaacgatctcaggaaacgtttcataaagttaacaccaaaggaaaaaacagttgcccagctggtttactccggtttattgaataaagatattgctgaacaaatgaacattgcattacgcacagtggaagtccacaggtcacgagtaatggaaaagatgggggtccataattttgccgatttcttaaggcgaatgagtatcataaaagaatga

SEQ ID NO: 244557 - DNA, 1749 bp, Klebsiella pneumoniae
atggaacgcgtagcaaaaatcctaatattattgctaattacagctcacgccacctgcattcacgcagctgactggacagtcggcattctggcgttgcgtggtgaaaaagaaaccttacgtcactggcaaccgctggttgattcgcttaatagcgcggttacaggtgctcactttcacctgttgcctctagatctcaacggcatgcgcgaggcggttaacaatggaactatccagtttgtactcaccaatcaagcgcagtttgtgcaattgaacagcagcttccatttacgctggctggcatcgctgcgttcagatacatctgttaacagcatggcggcaggtagcgcaattctggttcgtcaggatagtcctttccatcacgcgcccgacctcgcaggcaaaacacttggtgctgtcgacgagcaggcttttggtggctatttgttagggtatcgcgaactgatagacgcaggcttacaggtagatgaacaggctaacatcagatttgtgggctttccggcagatgccctgctctatctgcttcgcgagaacgtcgttcaggctgcaatagttccggtttgcttgcttgaaaatatggatagagaggggctgatcaacaaaaatttgttccgcgctctgcttgaaaaggagacatcatttccttgtatgaccagtacggctctctatccggactggtcatttgccgcaatgcctggggtggatgataaaattgccgatgcagtagccagagatttgctcattgcgactcagaccagcgctttgcgctggggggcacctgcgtcgacaaggcaaacggaatcgctgttacgtgaggtgaatcgtcatcctgaacaacagcgtttttggcaaaacttggtcgactggcttcatcagcacaaaattgcgcttggaacgatagtgctattggcaatattactgattgctaactacgcctgggtcatgatgctggtgaaaaagcgaggcaaaagacttgacgcggtgaatcagaagttaaggaagcagcagcatgcgcttgagcaggccagacagatgagtgtgctgggagaaatggcctctggttttgcgcatgagctgaatcaacccttgtctgctatacgtatgtatgctcagggcgggatgaactatctttcaagagatacaaacaatataacacttgaaaaagcgcttacccatattgaattacaggcggagcgttgcggactcatcattaaacacctgcgggaatgggctaacccatccgaacccggcagagaagtagtgtcatcttctcctgtcgatgtaacccacaccatcagacatgttctggcactcctgcaactcaacaacgattctcccagaatcaaaatacatatcaacagtgctcagggctgcatgctattccttccgccagttctgcttgagcaagtcctggcgaatgtcattctgaatgcagttcaggccggcgccagccagttgtggttcgatttcaggagtgaagggaagaaaaaatgtattattttgcaggatgatgctggcggtatttcttctgagcagttttcagatctctttgtcccattccattccagcaaacaagcaggaatgggattaggccttgtgatttgccagcgcctgcttcgaaaagtaaacagtgatattagcgtgagaaatgactatgcaccggacggtagtgcaggtgccgtggtaacattaacttttccagacgatgaacaaaatgggattgctcaatga

SEQ ID NO: 244558 - DNA, 750 bp, Klebsiella pneumoniae
atggacatcagtaagcgacatttttttcaaaaactgggcgtagtcacggccggagctgcattattgcctctggcagaagcacaaatctcctttagcccaaagcgccacggcggttcagatgcacatcgctatgccatgctaatcgatctgcgtcgctgcattggctgtcaggcatgcacagtgagttgtaccattgagaaccagacgcctgaaggggcttttcgcacaactgttaaccagtatcagattaaactcacagacagcgaaatggtcacgaacgtcctgctgcctcggctctgtaaccactgcaacaatcctccctgtgtacccgtctgcccggtgcaggcaacatggcagcgcagggatggcatagttgtgattgacaatacacgctgcgtgggatgcgcctattgtgtacaggcttgcccatacgatgcccgctttatcaaccatgaaacccagacagctgacaaatgtactttctgcgcacatcgtctcgcagtagggctgctgcccgcctgtgtagagtcctgtgtcggtggagcgaggatcattggcgatttgaatgatcccctcagcaccttaagtaagatgctcgcctcatatcgtgaggatataagggttctgaaacctgagaacaacacccaccctcacgtcttctatctgggactggatgacgcttttgtttccccgcttcagggacgcgcacaacctgcgctctggcaggagatagaatatgatcatctctga

SEQ ID NO: 244559 - DNA, 1014 bp, Klebsiella pneumoniae
atgatcatctctgaagtgctggtacagccacaggcgataacctggcttccctgggccgtacagtattttttctttataggtatttcagcgtgtgcggcgataattgcttgcgttgcccgatggataaaaagttctcatagcgctgtcttcgagcggcacagcttgttcattgccttgacctgtggcattacagctcctctagcgttgactgccgaccttcatcaaactgcccggttctggcatttttacgcctggcccaccccctggtcatggatgccatggggtgcactcttcttaccattatttacgttgctgaccgggatctggtttgcactctttcacctgcgcaacgtcacggagcgttatacgccctggatgcgctgggttgcacttgttacagcgctgacggctgttggtttactgctttataccggtcgtgaagtgtccgttgttcgcgcccgaccagtgtggtttagctactggtatccgataattatgttcattagcgcaatgagtgcgctgctcgcatttctcactatgtcaatccgggacgatagtgcactcactcggttgctggcgaaatatcagatggcaatcctcctcctgctgggatgcatcgcgcttgcgtggtatcacggcgactccttgtccggtgtagcgctacgtcagcaatggcaattagcgataggtgggcaggctggcatgattatggccatcgtaatgtggagtgtcgcatttacgacgtcattctacacaagccgatattcacctccggtcatgattttactgttcaacgtggtcattgttgccggattgtgctggcttctgcgctgggagttgcttattggggggcaaaccataccaaaatataacgccctggagaatcactacgacttaccattgggcactgatggtttgctggcgattgtgggcacatttggtctctggttcggcctgatggttgtggtcaaagaatgtatcaactggcttacaaggaggcttaagaatgcctaa

SEQ ID NO: 244560 - DNA, 3075 bp, Klebsiella pneumoniae
atgcctaatttttcccgtcgtcaatggttaaaaataggcgttgccgtggggggcttcgctgcatttggggtgagttaccgcgatgtcgcgaaaagagcggtggatgggctggtaaacggtacatccggtcgtgtgacccgagacaggatccatgggaactcgctgcaaccagaaggtgtggcggataatggctggcagcctgatcccaatcaggctgtatcgatgacgcagtgtttcggttgctggacactctgcggaatacgggtgagagtcgacaagaagacaaacaaggtgcttcgtatcgccggtaacccatggcatcccctttcatacgaacgaccatttgacataacaatgccttttgccgacgccatgctaaaaatggccggagaaagcggtttgcagtcacgatctacagcctgcgcacgtggtgcaacgttgctggaaagtctgaacagcccactgcgtattctcacgcccatgaagcgtgccggtaagcgcggcgaaggaaaatggcaacgcatcagctttgagcagcttattgaagaggttgtggaaggcggagaccttttcggagaaggccatgttgacgggttacgggctattcgcgatctgaagactcctgtcgatgcccttcatccctcttatggccccaaagcaaatcagttactggtgactaacacaagtgatgagggcagggatggctttttacgccgatttgccctgaacagcttcggttcaaaaaattttggcgcacatggtgcttactgcggactggcatatcgtgccgggtcaggggcactaatgggggatttagataaaaatccccacgtcaaaccagactgggagaatgtagaatttgccttatttatgggcacttctcctgcacagtcgggaaatccgttcaagcggcaggccagccagctcgccagtgctcggacgcgtgaagattttaactatgtggtggtctctccggcattgcctttgactacggttctggccgacgatcatgggcactggcttgctatcaaaccaggcagcgactctgcactggcgatggcgatgattcaatggataattgataacgagcgctttatggaggattatctgacgatcacctgtcgcgaggccatgttgcgcgtgggtgagaaaagctggaccaatgctacctggctggtcatcgtcgacgaaaaccatccgcagtcagggcagcaccttatgctatctatgttaaatggtgtaaacactgttccggacgaggtgctggttttaaataatgccggagcggtagtgcccgtaagtcaatgcgattgcgggactctgcttgtcacgcatcaggtcaggctgcacgacgggtcgacagtattggtgaaaagtagctttcagtgtttgtatgattccgccagacggttcagcctggcgcattacagccagttatgcggggtgtcagaaaaagacataattttgctcgctaaagcgttcaccgcacatggacgtaaggccgctgttgtgacacatggtggaatgatgtccgggaatggtttttataacgcctggtccgtgatgatgcttaatgtgctactcggaaacatgagcctgagtggtggggtatttgtaggtggaggtaagttcaacggtgaagttaacgggccatgttacaacctggaacagttcccgggcaaggtgatgccaaaaggactcagtatcgcccgcagtaaggccgactatgaaaagtcggatgaatataagaataaaatagccagcggccagtcaccatggcctgcaacagccccgtggtacccttttgttgcagggcaactgaccgagcttctcccctcagcgctggaaggatacccctacccgttaaaagcttggattaccaatatgaccaaccctctttatggcgtccccggattgcgcggggtcattgaggagagtcttatcgacccattgcgcctgcccttatttatcgccattgatgccttcatgaatgagacaacggccctggcggactacatcataccggatacgcataacttcgaaagttggggctttagtgcaccatgggggggagtggcaagcaaaacgtctacagcgcgttggccagtcgtctcctctatgacggccaaaactgcgcaaggcgatccggtgtcgatggaagcattctgtattgctgtggcaaagcgtatggcactcccgggctttggggaagatgcaatacctgatgcccagggggcattacacgcattaaactgtgccgaagattattatttgcgcgttgcggcgaacattgcttttaccggacagaagcctttacagccagccagtgaacaagacatcacactttcaggcgttaagcgaattcttccgtcaatgcaaaaaacgcttaagacacaggaaatcttgcctgtagcgtttctgtacagccgtggaggacgttttgcgcctgactcatctggtcgacaaagtgaagcagtcggcgtcgaatggtcaaaaccactgcaaatctggaatgctcaggtggcagcttacagacatgctatgaccggtgaacgatacagtggttgtccgacttggtatccccccagactggcggatggcagggcactcgacgctatttttcctgagtcacactggcctttaaaagtcatgtccttcaaatcgaatcttatgagtagctccacgacagtgattgaaagattacatcacgtgaaacctgtgggaatggtagctataaatcccaaagatggtaaacgtttcgggctggagcatggagatattgcaaggatcacgaccccgggggggagtatagaggcccaggtcagcgtacttcctggtgtgatgtccggagtaattgcaatggagcatggctacgggcataaagagctgggtgcacgtcaacactggcttgatggtgaacctatggcgcttaagccgtttgtagccagcggagtaaatcagaatgacatcggttttgcggatccgaccagaagtattcctggtgtctggcttgactgggtaactggagcatcagtgagacagggaatacctgcaacaatacgtaaagttgtataa

SEQ ID NO: 244561 - DNA, 1137 bp, Klebsiella pneumoniae
atgaaaggaatgcagaagatcaagagaggtaagagcttcgctggtgttgtccaatatgcattgaaaccgggagcacaccacaaaagtgatccagtcgtcattggcgggaacatgttaggtgattcagcccttgaactgatcgctgaattcgatagcactaagcatcttcgccaggatgtcgcaaaaccagtttggcacaactcgcttcgattacccgatggtgaatcactaacggctgaacagtggtcaagcatcgcagatgactatatgaggagaatgggattcagtgatactcaccttcgttgctatgtgcttcatgacgacgatggccagcatatacatatcattgcaagcaggatagacctctatgctggtaagctataccttggcagaaacgaaaacctcatcagcacccagatcattagtgaactcgaaatcgctcacggtctgacagcgaccaagacagcaccttccattgcaccaaagcaaccgaagcggaagagaatctctcgaaacgaacaaatgctatcggctcggactggtgctccatcccctaagcaagctctccaacagatacttgataaaagttttgcagatacacctgatcttttaactttcataaaacgactggaagaagccgaagtcggctggactgctaatattgcttctaccggtaagatgaacggcttctcattctcttaccgcgatatagctttcaaagcttcgcaattgggcaagagctacagttgggtaaatcttagtaacaggctcaactacaacccagaccatctagaagctcttcgagcgacaaaggaagctgtccctgtccctgtccctgttcctgtcgaacagattgccagagcgaatgtgcgaagcgaaagcataggcgacaaaattgctcaaatcgaactgcgattcagagaaggaagacgaaacgaaatcgcagagaagattcttcaaaaaaacgcagtacaacagcaaaagcatctaaggtttatcggctggcttccatttcttagaaggtttgcagagcttctccgaaggtatagtaagtccattcttcacaaaacccacacacacttctcaaaaattcatgtaatgcaacctttaaacaaggcgagaaaaattcgtttataa

SEQ ID NO: 244562 - DNA, 294 bp, Klebsiella pneumoniae
gtgtacttttccttcccttatgatttagattggctaatgctaaatgaattctttgaatataacaagaaagttaaagctgcaatagcttcagttttgaaaaaagaagaaaaagatattgatattagtaagtttgatgacttcgagaagtacttttggtaccgctacttatttttaggaagaggtaagccattatcgcataattatgttctatcaaaaatggaagacgataagttaagagataacagtcctgaagttctcaatgaacttatcgaaacagtaagaggtcttctgtga

SEQ ID NO: 244563 - DNA, 207 bp, Klebsiella pneumoniae
atgaagctggttttaaataacaaagatcttgatccactgaaaatagaggtggtaaacaataaaaagttaccaactattgaggagagtatggcagatgggaaaaaccaagcctataaaataattcaaaccacaaagagtcagttaacactggaagttattaacgaaataggaaacaattttaagtttaacatgcacaaagcaaactaa

SEQ ID NO: 244564 - DNA, 195 bp, Klebsiella pneumoniae
atgctgcgatggaaaccaggcaccattctactttcagatttcgatatcaaaattggccggctgtcggcaagcgtacgtaagcggaccctgacccagtccgatgttgtgcgcgcatgcgatgaagcagataacgcgatagccaggatgatgaggaaagactatgaccagagaaaacgatctccttaccgacgatga

SEQ ID NO: 244565 - DNA, 222 bp, Klebsiella pneumoniae
gtgagtaataagacaatccgaacccacaccgaacgtcttgagaaggttatcgagcagggcgttgaactgcgtgatgagatgcgtagcaagatagctaaccttgagaagatagtcagcgcccagaaagctgaaatcatcaacgccacccgcgccaaggatctctacaagcgacggcttgccaactacaagcgcacactagtagcagagcgagagaagcggtag

SEQ ID NO: 244566 - DNA, 363 bp, Klebsiella pneumoniae; identical to SEQ ID NO: 225386

SEQ ID NO: 244567 - DNA, 861 bp, Klebsiella pneumoniae
atgagaaaagttggaagtacaacagataccgctgatgctaatggcgaatatactaatggtaacgttgctaacggggtatcgccgacgattatcaacgctgaaatgcttaatacatttcaaagagagttggttaaccttgttgaaggtttaggatacacattaaaccctgatgacgactcacaaatattaaaagcaattaatggcgttattagtggccgcctattgggcgtgccaagagttattaccagcagtggaatgtttacaaaatcatctggtgcaaaaaagtggcgcattcgggtgttaggtgctggggctggtagttctgcagcaccggcgaccggaaatggggaagtttcgataagcaatggtggcggcgccggggcgtatgccgaaggtatttatgacgtatctgaattaacgtcagcaatggtaaccattggtactggtggcgttggcggtacagcggcttcactatacggaggggatgggggggcaacctcagtaggagcacttatctccgcccctggcggtaaatccgggttgccagcagggccagctaaccctccgtttcagccagttgctaatacgaactcaaacagcccctctgggtggaatatcgtaggtacatctggtgctggttctgagcctgcagttgctgtatcaacaatttatgcagtggggtcacgtggagcaaatagccctcttggggttggcggggcagttccggcaataaatacacctgcaaatactggtggcggttatggttctggtgcatctggttgttcaaatggaccatcccaacccgtgaaagctggcgcggcaggtcgtgacggaatagttattattgaagaatattcatga

SEQ ID NO: 244568 - DNA, 213 bp, Klebsiella pneumoniae
atgcacctgattgtcctgggcaccttctcccgcgttcaggtcctcagcgttaaggtcttcgacgccagcgccacccgcgttcaggtcctcagcgttaaggtcttcgacgccagcgccacccgcattcaggtcagccaccagcaccgatttagtttctttcgccatatcacaccaccgttgcgcaaagggacgcgtttacccggcttggaataa

SEQ ID NO: 244569 - DNA, 405 bp, Klebsiella pneumoniae
atggatcagtatggtcagaatccgtttgcgccaggcatggaaagtgccttgtttgttccggatcagctcatcgccgggacgctccagctggttaccgataccggcattatcaccggtgggacctataaacgcggaacggtgctgggtgtggtcaccgccagcgggaagtataaattgagtgtgaaaacagccaccgatggcagtgaaaagccggcggcaattctggtcgatgacgttgatgcatccaccactgaccagaatggcgggctgtatctgatgggcgagttcaaccagaaccgcatcattttcgataactcctgggctgtccccgcgctgaaaacagcccttcgtccgctggctattttcctgaaagacagcactcaggcccctgtagccacttcctga

SEQ ID NO: 244570 - DNA, 576 bp, Klebsiella pneumoniae
atggcaaagaaaccgtttagttttgcccaccttatcggacttggcgcgtcggcttccgaagaggaagacgataaaaaatccaaaagagcgaaagcccgtcgcgcggaagaggacgatcgtgatgacgccgaagacgatgagcgtgacgacgacgcagaagaagacgatcgcgacgacgatgcggaagatgatgatgacgatccggatgcttccgaagaggatgattccgacgatgacgacgaccacaaagaaggcaaatcggctaaaagtgcccgtattgctgagcgtaaacgttgcgcccgcatcttcggtagtaagcacgctgctgcgaacccatcgctagccgcctcgctcgcattcaacaccgggatgagcgctgcggcggctatcgacgttctggcgtctaccgcgccagctactcaaccccaggcgacgcgcaatcgctctctcgatcagcgcatgcaggaaagcgagaatgtccggcttgggcaggatggggagaaatcatctggcggtaaagcgacgctggtgaacaaaatgaccagtctctacaactccacgaaaggggaaaaataa

SEQ ID NO: 244571 - DNA, 1653 bp, Klebsiella pneumoniae
atgggtgtacaaatcttaggggctgacggacgtcctttgccgccatctactcagaagatgaagtacggggcgctgtcaggaagtggcagagttccatacgacgcggcggactcctttagcgatcaaatggccaactggcagcctgctctgtggtcaccagataatgaaattaatatctatcgtgatcgcattgtgtctcgcatgcgggaccttgctcgtaatgacggatgggcctcagggacaataacccgtgttttggataatgccgttggtgcgaattatcgccctatctttaaacccgattatcggatgctgcgacttatcacgggcaataaggcgtttgatgccacctgggcggatgaatatggaaaggtgattgaagcgcactggcgatcatgggcaaatgaccctggccgctattgtgatgttgagcgaaaacaaacagtgtctcagatgttacggctgggttttcgccacaagttgctcgatggcgattcgttattagttcttcagtatcgacgcgaccgtttaggccccggacgcggacagtatgccacgacggtacaggtcgtcgatcctgacagactcagtaacccacagcagaatttcgacatgccgaatattcgtggtggcgtggagattgatgccgatggggctcctgtcgcttaccacattcgcgaagcgcatattggcgactggtggagtggcgcgaaaaccatgacatggcagcgcatccctcgtgaaacatcgtggggacgtccgatagtgatccatgattttgatatggaaagggggtcgcagcatagggggataggaatactggcccctatagtacagcgcctgaaaatgctgattaaatatgatgagtctgagcttgaggcggcaattctgaatgccatcttcggtgcttatgttgaatcaccatatgatgctcagatggtgtcttcagcccttggtgatactggctttggtgatggtgatgaactgagtgcatatcagactcagcgaactgaatattatcaggataaacgccttaatcttcaaaatggcgcccgaatccctcatcttttccctaatgaaaaaatagtgactctggacgcagctcgtccaaccagtaattttgacgggttcgagagcgccgtattacggaatattgcggctgctacagggttatccacccagcaagttactcaagactggtcggatgttaactattcatctgcgcgtgcagccatgctggaagcctggaaaacgctaactcgtcgccgtgacgattttgcaaccggaaccgctcaaccagtcgcttctgcatttgtagaagaaattcatagtattgaatcgttgcctttgccttccggagcgccagattttcttgaggccaaagcggcatattgccgtgcgcgatggatggggccgggacgtggatgggtggacccggttgctgagaagaaaggcgcgatcctcgggcttgatgccggtctgtccaccttggaaatggaagtggctgaaaacgccggcgaagattgggaagaggtgatggatcagcgcaaacgcgaaatcgatgcctgtctggagcgtggtcttccattacccagttgggcgcaggcagatcaattcgccagcgagacaattaaagacccggaggaaaagtga

SEQ ID NO: 244572 - DNA, 564 bp, Klebsiella pneumoniae
atgaccatgatgaatcagagccagtatgcgcagcactcaggcgtcgatcgcaaaacgattgggcgctggattaaagccggccgtttcatcgtgatggacggtgacctgattgatgttgaagcgagcgatgctgcactgaagagaaaccgcgacggaaaggatccgcgcgcatcgaacgcgaagaaaaagaaaacgccggcggtcgttgatgatgtcggtgatgaacttgaagacactgccagaaaaattatccttaccgaaggtgccgatcttacccgggaggaagccgcgcgggtgcgcgaaaactatatggctctgctggccaaacttcagtatgaaaaagacagtggccagacgattgaactggtcgccgccgaggagattcttttcaacgcctttcgccaacagcgtgatgcctggatgaactggccttcccgggtggcaccgcttatggccgctgatctggatgtgccggcggacaggatgacagaggtgctgatcgaacatgtccacaaacatatctcagtcctcggagagccagaatttaactcagctgaagattga

SEQ ID NO: 244573 - DNA, 714 bp, Klebsiella pneumoniae
atgaacgcgaaaatagcattgtgcttgctcgtattgcctctgtattcacatgcaatgacttgtcctcaaggtgtagggttttccgctccgcagggtgagataaaaggagaagagccatacttcttcacgcctgaaggtgtttgccttaatgggtacgatgttagtcagcaattaaagcgctatcctgacgataaaattaccggcgcattttctctgggaaaagggggtagctcgctgttctttgtcagcatctacagtgaaaagcattaccatggaagaattattcttttatccgataccaataaaggagctggctacgcagtcctcttccagaaccaacctggcataagaacaaataatccagaggaatcagtcgaaaaccttactattaattattttgataataatatatcgacactctacttcagtactgatgcctgggctcaggctagagccttgcatgccctgacatgggaaaacccttcaaaccctctcagagtgacggtgcggtttgttcatgacggtacgtttcaaggggtctttaatagcatgccaatggtgtctacgattgcacatgacgacaagggcgcatactttccttcttacgttgttcgaaacgacggttcagtattctgcacaataaatacccgcgagaagttttggcaactgacgccagcatgcctttcatcaggggatgactatcgggaaaggtga

SEQ ID NO: 244574 - DNA, 690 bp, Klebsiella pneumoniae
atgaacgaacaatacctgcaatacgtacgtgaagaaatagcgctggctacggctgattttagcggccgcaccaaggggcaattagtcgccctggtagagcaacttcagttcactaatgagcgctacccgcgaaaacggcaatacgtggttgatgaggttacaggaaagaagatcatgcttcgcaatcctccagtgccaggaaaacaatcccacgccaaaggcacttcgattccacaagtgatcccggtggagttctcgacggcaagctggcgccgagctatcgcgaaactggaagacgctgaaagcgcctgggtgaaatggaactatctgcatgagacagatttcagcctgcaaaccatcattgtgcagcatggctggcagctattcagcgagacgattaaaggccgccgcatggcagggaagaccaaagaaaagctcaaagcgctcatttggcttgcggctcaggacgtaaaagagcaactggccgggagagaaacgtacctcagcgaagagttggccgcattctctggtgtagcccccgataactggacgcataactaccgtgactactggcatgcaatgaaaggcgtgttttttggccttgacagggattcgcttatttctgtcgtgcgatcacgttcacaacaaaaagctactttttcgcagcgggttcttgcaaaagtcaattaa

SEQ ID NO: 244575 - DNA, 687 bp, Klebsiella pneumoniae
atgaaagaacgcggaatgattttcaactctgaaatggtgcgggcgctgctcgacggccggaagacgcaaacccggcgcgaagtaaatctgaatctggatatagcgtgcctagccacaacctatgactgggccacttccctcgcggccaatcattatcaggctctgacagaagaacaaattcagcagaaagctgaatctcttcgtggcgttattcaccctgtaattttgggtaatgggcagatggtctccatcatctgtccttatggcaagccaggcgatcgcatctgggtaagagaaaccttttgcccggtagatgacattcaatatggcggggagaagtgggtagattaccgagccactcctaagtttgaagcaagccatcctgcaggctgggacagcgcgcctaatgacgctgaagccctcaaatggcgaccatctatccacatgccgcgctgggccagccgcattctgctggaaatcaccggcgtgcgggttgagcgactgaagagtatcagtgacggcgatgcgatacgcgaaggttgcagtaccgccgacatgaaaagtggcgactgtgtagctgatgtgttcgcgcgcctgtgggcatcaatctacggctcagatagttggaatgccaacccctgggtttgggttatcgagttcaagcgcgttgaaggcggtgcagcatga

SEQ ID NO: 244576 - DNA, 282 bp, Klebsiella pneumoniae
atgactcaatacatcgcccgcgtcgaaatgtatggtgccaattcagaggactatgaaaatctgcatgagcgcctacaatcagtcggctacaccagaacaatcacttccgatgatggtcgtcgtctgaagcttcctgacgcgacgtatttcttaaattccagttcaattgatcagcctgaaaccgttgcaacacaggtccggcaaatagctcaactcataaggaatagcgctgtttttgtttgccgttttgactcatggtacgggtatcttcacgacgcttga

SEQ ID NO: 244577 - DNA, 750 bp, Klebsiella pneumoniae
atgaaaaatatgattggtactggtagtgcgctggagcggctgaaaaaactcatccctccgggtgtagagcctaagtttggcagtgtagatgagtggagagcctggcaggccgaggaagggcgcaaacgctgcgaagaactggaaaaacaaaaccagcgtacccgtgctgaaaaaatcttcggacgagcgggaattcaagatctgcatcggagctgcacgttcgcaaattaccaggtggtaggagatggtcagcgccgggcgctcacgatggcgaaaagttacgcacagaacttcggttcagggttcgccagtttcgtattcagcggagcgccgggaaccgggaaaaaccatctggcggccgcaatcggaaatcacctgctggctggtggtcgctctgtgctggtggtgactattcctgacctgatgctacgtgttcgcgagtgctacgacgacgggcagtcagaggcttcgcttctggacgacctttgccgggtagatctgctcatcctggacgaagtaggcattcagcgcggcagcagcggcgaaaaggtcattctgaaccaggttatcgatcgccgcctgtcatcgatgcgtccggtcggcatcctgacgaacctgaactacgaatctctgacggacatcctcggcgagcgcattctcgaccgtctccagatggacggcggcatgtgggtgaacttcgactgggatagttatcgcaaaaacgtccgccatctgcgcgtcgttaagtga

SEQ ID NO: 244578 - DNA, 414 bp, Klebsiella pneumoniae
atgaccctcacccagctgcaggccgtatcaacgactaccggggcgggtgaagtgctcgcgcagctcgcgatcaacatcgtcatcacccatacgcttaacgtcttcctgtacatcactggcccctttcgtgacttcagcacgtcgttctgcggcggcgacagtagcagcggcgttttcttcggtacgctgctgatcggctttggcttctgccttactggtcccgcgagcgtggccgatgccgaacgcgccagcgatagcacccaggatgacaaccaccagccccgcgattgcttcgattcccatgatcacaccaccagtaccgcttttgctttcaggaagcgggcgcgccggtcatcgatgccgttctgtccgccgttgataatctgcgtgacgcgtgcaaggtcaccgggataa

SEQ ID NO: 244579 - DNA, 183 bp, Klebsiella pneumoniae
atggtcaggcaaaagtgtagcggtattaggcgcagctatttagatggagcatccttcagtgcagcgaccacgttgaacgacggcaccaatatcattcctttccaggctcgttattacgccactggcgcggcgacagcgggtactgctaacgctgacgccaccttcaaagtgcaatacgagtaa

SEQ ID NO: 244580 - DNA, 390 bp, Klebsiella pneumoniae
atgaaaaagacccgctataccgaagaacagatagcatttgcgctgaaacaggccgaaaccggcactcggatggaggaagtctgccgaaagatgggcatttctgaagccacattttacaactggaagaaaaagtttggcggcatgggcatgacagagctgcgccgcctgcgccagcttgaggaagagaatcagcgtctgaaacgtctggtggctgatttaagtctggacaaggagatgctgcaggaagttatcaaaaaaagttctgaggccggctcagaagcgtcaggcggtgcattttctgcgggaggcttaccgtatcagtgtccggcggggatgcgaactgctgatgcagagcagaaccgtttaccactggcagagccggcgggatga

SEQ ID NO: 244581 - DNA, 1212 bp, Klebsiella pneumoniae
atgaacaaactttcgcctgaaatgcccgaactgcaatcaatgaatatcactgctgataacatcaccaagcttaaatcattgtttcctgaagcttttaatgaagacagtgttgattttgaggttttaaagcagcttttgggtgagaatgtagacgacaaagaagaacgctatggcctgaactggcatggtaaacgtcaggctcgccagcttgctctaaccccatctcgtggcaccttacgcccgtgtaaagctgaaagtgttgattgggataataccaagaacctcatgatcgagggcgataaccttgaagtgttaaaacttcttcaaaaaagttacgctggaaaagttaagcttatttatatcgatcctccctataacaccgggaaagattttgtttatcctgataacttccaagataatatgaaaaattatctcgaacttactggacaaacagaagatggaacacgtttaagcacaaatacagaaaccagcggtcgttatcacactgactggttaaatatgatttaccctcgaattaaacttgctaaaaatttattaaaaaaagatggtatatttattgccagtatcgatgatgcggaactgagcaattttaaaatcgtgctaaatgaaattttcggagaagaaaaccacctcggcactctggtttgggatagaaatagaaaaaatgatgccaagtttatttctgtaggccatgagtatatgttggtttacgctaaagatattcagtcattaataaataacaacatagtcttaagagaagagagagaaggattagaagaagccaaggtaatatataaaagattagttaaggaatatggcgacgattgggataaaataaaatccggatggattaaatggtttgataacattccattatcagatcccaagagacgcatgatgcgttttgtaaaagttggttctcggggaccatatcgagacgatggaaatataagctggcccggcggaaatggaccaagatacgaagttttgcatcctataacaaaaaaaccagttccagttccttcaagaggatgggtttatccaaatgaattgagattctgggaggagtacaataaagggaaagtcgtatttgggcctgatcatacaacatcagctagaattgcatcatatctttttgagagtgaaggacaagttttacctagggaaggtgcgaacaagttcctgatatga

SEQ ID NO: 244582 - DNA, 393 bp, Klebsiella pneumoniae
atgcccgtcgatcaggaattaataaatatcatattaaatgaagtgggaaatccaccgccgcataaagccagaattaccgctgtcagtctgttatttaaagacctgagttacagcgctgaaaagggcggttaccatcctgtcgaaatacggattatttcacgcaatgatgaatggtattttgattacatcaccgacttcggttatatatggacggtatacccagaactggaaaaggaaattgatattagctggagtcagcaatatgtctttcttgcccatgttggtgatctgcctgttaacgccggaagggagttatttgaactctggcaatccaactttattcagtatcacgccatgaacgtctacaccattaccgtcctgtgggaaagctaa

SEQ ID NO: 244583 - DNA, 540 bp, Klebsiella pneumoniae
gtgacggctgacagagggatacgtgcgtctcaacagggcgaacttgactgtctttgcggtgcttattgcgtggttaacatgctgagctggctgtttgatggcagggtgaaacgacgcccgttaatgaaccggcttattcagacttatcagcagcgctggtctttgcatgaatggctgactgaagggattgaagaagaccgtttagactggctgatagctcaggtgttgcagaaagggcattacagccgccagttcccggttgaaatcatcaaaccctttgcagggaagcgagggttatcagacgggcgccttttcagggaaatgcagcggtttcttgacgtcactgaccattcccgcctgattatgctcagcgaccagtttcactggtcccttctgatcaaaatggatgaagaaacgctctgtttcttcgacagcaacgggcgaaccactatgccccgtaacgctttctccctgcgtactggcgtaacccgccgccagctgtttcccgacgctatttacttcattgaacgggagttctga

SEQ ID NO: 244584 - DNA, 291 bp, Klebsiella pneumoniae
atgaccatgtttacccaacgtgaaacccgtatcctcgaccaggcgcgtgacattatcagccggtactaccagcgtggcgttcaactctgttcccctgatgatgtacggcggtgtgtgatggttgagttggcaccgcttgaacatgaagagtttggcatcatcctgctcgataatcagaatcagctgctgcaccgcgaaatcctgttcaggggtaggttaaactcggtcagcgttcacccccgtgaagttatcaaacgtgtactgaaacataacgccgccgcagctatctga

SEQ ID NO: 244585 - DNA, 708 bp, Klebsiella pneumoniae
atggattggccaaaggagtacagcaagacgactcaagcggtaagagatgcggcgtataaacactactatgttgaagcaatcacacggtcggttctgctaccgggacaggagaaaaccgcttatcatgatggactactaacgacggattattaccttttcctgttcaccagcagggagaatccgaagcttacagggtattttacctgtggcttgtatgctgcaaaggggtggttcgagttgaacggacagcgacctgaggaaattccatcatacaacccccttacgggcgagtcctccggtggtagtaaaaagagtggctgcgggattactaaaccgctgaaagctgaatcagacccaagaatgaaacgtcttatcagggtactccagacgttcatttctctgacggacgatgagaaaaggaaaataaaaggcgagtcaaccacactggctgtcctacagaagctcataaaagcgtcaaaagaagcccccagcacgtcaaatattagatcagtaaataccactctgtacaaagcgctcaaggatggtcgtcatggtggtgctcgtacattcactgaactagttgatcattacgaggttcttcttggtgtgactttcaaaaagatatctattgatgatttcaatcaggagatcgacgatacccgcaacaagtcagcgacatatccatatatccctttggcatcattctga

SEQ ID NO: 244586 - DNA, 3492 bp, Klebsiella pneumoniae
atgataaagcttggaacaattgagtttgatgaatgccttcttgatgcaatccgtgaagagaaattagtcatttttgccggagcaggtgtatcgaaggggtcgccctcaaaccttgacgattttgtcactctcgcgaataaaatagccgagggtaaaggactaacggcttcggttccattagaccgttttttgggagaacttcatcaccaaggtgtttcagttcaccaaagggcagtacctcttttaacaccaccaaacagtagacccacatcacttcataaggatctgatccgtctgtttaaaacaggtaaaaatgtccgggtagtgacaactaactttgatctacattttgagaatgcatttgaatcaatatttaccgatacatcatttcactcccatgtttatcacgcaccagcattaccacgaggacaaagatttcatggaatcgtgcatgtacacggttctatagaattccccgaagatatggtattgactgacgcagattttgggcgcgcttacttaacagagggctgggcgagacagttccttgttgaagtattcagaagttatacagttttgtttgttggctatagtcatgatgatatagtaatgaactatcttgcgcgagcattaccatcagataacgtagcaggacgctttgcattaacagataaaaaagaaaactggcgtttgctaggtattactcctctcttattcactaaagatacattttcagaactaaatgatagcgtaaaagctcttgctgattggactaatcgaggcgcgctggcatggcaaacccgcatagctgatattgcccgagagactccgccaacagatatcgaaaatggtattatcggtgagataaggttaattcttagtgacccatccaaaactcgtttttttactgcccatgcttatcataatgaatgggtttactggctggaacaatatggatatctaaaaccattattcgaacagtcgaaaatagatgaatgccacattctgttaatgaattggttaatcaagaattttgttattgaccatcctaatgttatttacggactaattgctgcacaaggcgttcgactaaaccctttattttggtctaatcttattagaaatattagcttaaccgaagataagatacctgaaccatcagctttaaaacgatgggtgacaattttactttcatgcataccagagaatagtgatgaaacatacattccattgatatggttagccgagcagtgttcaagacaaaaccaattaccttcagttgttaagatttttcaggtactgataaaacacaatatagtgttgcgttctgagtcattcgatcctgagcatgagaatatttatattgattaccgattatctgcgcctcactaccatttaaatgagatttgggaaaaatgtttagagccacatatccagttaatccatgcttctttattaaccagtttagtatgttgttttgaggatatccaccaagatctctgtagctgggatcgagtatccaccgattgggatcctatcagtgatgggcgagcagctattgaaccccatgagcaagataggcacccggaagatattgattcactgattgatattactcgtgatattttgcattggctaattgtgaacaaccctactgagggagagttatgggtagctaagctgtctctatcagaagtagctgtactaagaagaatcgctattcacactatatcagagcatcaggatttaacagcagagaaacgcttagaatggttattagatcactttgatctatatagtttagccgaaaagcatgaaatttatcatcttgcctttaagaactacccactcgttaactcagatacacgtcaacgtataattgataaaatactgacacatcagtctagtgctcgcagcaactggacagaagagcaatcaacaaatcgggatcacttcgattggcttgcatggttggaaaaatgtaaaccagactgctcttacatccaaagcaaaatatcgccaattaaaactcagtatccagaatggcagctagataaatatccagatttgaattcatggtctgagacttgggcaggctcaaagagcccatgctcagtggatgacttgctaacatggaatcctcaggaaaagcttgagtatttgttaacctttaagggtacatcttttcgtgggccagaacgcgaggggcttattggtacggtgcgtgcagcttgtcagaaaaatatttcttggtcattcaatttaaccgatatattaattgagaaatcagaatacagtactgatttatggcctgcaattattaatggatgggccaaagcgaacctgaatcaagatgactggcataatattttattaaaactagaacattcccaactccactcacctcatgcctatcctattagcaatctgttcctttccatttttgaggatcaagtaaagccttatgcacttgaaattttggagcaagtaaataccctgtcacattcagtatgggaagctatcgaaggtaacgaagatgaacccgataattggctaaatgtagccctcaatgctcctgaaggaaaaattgttcaattctggcttcatggattatctcagagccagaaacctatacctgccactggacgaacactaattgagccatacattgggtggttaacagaagtcgttcagtcaccaggacgtaaaggtgcaacaggtcgtagcctactgacaagtcaactatcttggttatctcaattgaataagcaatgggtactacagcatcttatcccattatttaatgatgataacgacctcaactttactccggcctgggatggttttttatcacgaggatgcagcatacctgaattgcaggaaagattaatcccagcctaccttcctgcaatacatcggtttgcagcaggctcatccagacgagagaaatttattaaccgtttcaccgagctggttttattttatgttgatgatcctacatcaaccttgttcccacaatttttccaaaatattactgctgatgatcgtattgaatttgctcgttgcataaaacgctttctgagtaccatgcaatcagagactgtagcacaactatgtaatcgctggctaactcactactgggaactgcgccaacaaggtatcccgacaactctaaacgatagtgaatttaagataatgctcgaatggctccccgcactgggtgatgctttccctgatattgttagtatcgtaataagtgcaaggccaattacattggaaaataatgttgtcccctatttgctccgagaaagcgacttggtcactaaatttcctgatgctacagctcgcctattgatatatctgtcacaatcaatatcaactatgcacaacgcacaatatatggttgagatctcacatagactaacaacattatcttcagaacttaggagtcaactggatgaagaatatgcaaggaaaggatttacagtatga

SEQ ID NO: 244587 - DNA, 639 bp, Klebsiella pneumoniae
atggctgagtattttcccgcagtatttggtggcgatgcttttaactgtccgtattgcaatgtttattcaaagcatgaatggctccctttaagggggacccgggtagggattactcctgacctaattactaacatgcacgtttctgtgtgcctgtgctgctcagaagaggcatattggtgtgaccaaaggttgataattccggcatcagctgatgttgagatgcctagtccagacatgccggaagactgtaaggctgactacatggaggccagaagcatcttaaacctgtctcctaaaggtgcggcggcgctcctgcgcttgagccttcagaagcttatggtccaccttggcgagccgggaaagcatatcgatacggacattaagtcccttgtagctaaaggattgtctcctttggtccaacgcgccgcagacatctgtcgcatcgtcggtaatcaggcagtgcatccaggagagattaacctaaatgatgacccgcagttagcacatggtctctttaagctgctgaatattattgtcaccgaacaaataaccagaccgaaagaagtcgaggccatgtttaatagtatgcctgaaagggcactcaaggggatcgaaaagcgggacggtaagccatcttaa

SEQ ID NO: 244588 - DNA, 690 bp, Klebsiella pneumoniae; identical to SEQ ID NO: 92403

SEQ ID NO: 244589 - DNA, 702 bp, Klebsiella pneumoniae
atgttcattataatggaaattcgttcgatatggctaagtgatatgaaacaaactctctccagtctcagcggagacacgataaaagcgattgttttggtctgccttgccgtcggggtggtgggcatgtcctatgggtcgctggcggtggcttacggcttccctttatgggtgccgctcttgctttcggtgtccgtgctggcaggcgcttctgaattcatgtttatcggcattgtcgccagcggcggtagtccgctggccgccgccgccgccggcctgttagtcaatgcgcgtcatatcccgttcggggtgaccgtacgcgaactggttggtcggcgcgccttaagctttatcggatgccacattatgaacgacgagagcgtggtctttggcttgtcgcagcccacccccgcgcagcgcaaagcggcctactggctgtgcggcgctggcgtcgcgctgatctggcccctcggtacgctaaccggcgcggccgtcggcaaactgctgccagcgccggaaaccatcgggcttgatgcggtcttcccggcgatcctgctggcgctggtgatcccggcctttaaaaaccgcactacgctgatccgcgccgccagcggcgccgcgctggcgcttgccgccgtaccgtttgtgcccaccgggctgccggtgctgctttcgctgttcggtttactgtcgaggaaaaaataa

SEQ ID NO: 244590 - DNA, 2220 bp, Klebsiella pneumoniae
atggataattatgtaagcaatgacctttttgaagttgctcttagtaaagtctctggtttcgaatttgaaaattttgcttgcgcatttatggcagtattagatgggaggagttttatccctatgggcggggttcatgatggaggggctgatggtgctctagacaaggaaatgtatcaaactgaatcaaccaatatattctatcaaatgacaattcaagcagattacaaagcaaaaataaaacaaactgttaagagattgagggagtttagtaggaaccctagagtgatttactacgttacatctaagactattcctcatttagataaagaggaagatattttatctgaagagttgggtgttcttgttaggataagagatgctaagtacctttatttccatattaacgataatcaagcgacaaaatcctcatattatcagcacttggcaagtaaaacggagtatttatctagagtaggtgcctcgactagtttgggggtgtctgatttcgtaaaagatccatctatttttgttttcctccaacatgaaatatcaaacaggaagggtaatattaagcttatccattcaatcacggatactttaatattatgggctctacgtaataccgaccctgataagggtatatttatgactaaggatgaaataagagatggtataattgagaagtttccgtggtccagttattttttgaatggaaatctgtcatctcgacttgatgcactgaaatcaaaaagtgtagcaaatagagagattagatggtataagaatgacaaaaagtattgtttgccgtttcaaacaagagagtctatcaaactcgaaaattcagcagatgaattattggcattaaattttcttagagagatacaagatcagtgtagcactatgttttcattagggcataagcgctgccagatcatagctgacttaacaaaaaacattattcaacgtgttttcgaaaggcaaggattgatgttggcctcctttatttctgattctgacggttcgataaatgagaaggagcttgtgattagtgactgtattgaggatattttaaactcatcaagtattaaacctaatgatattcctgattacaggaattacattgaaaaaatactgaattctgtcttttatcatagcactgagatccaaagacaatacttattacaattgtctaaaacgtttgttttactattcaccttgaaggctgacccaagaattgtagattactttagctcaatgtgcagtaagtttacgctatttttaggttcagatattatagtaaaggctttatcagagagatatttgagtaaagaggatcaacagtgcaaaaatctattacagtcggctgccataagtggcgtgaagttgaggatggctacagctgttttagaggaggtttatacacatataagaaatactaactatgaatttaataaccactttagaagtattgaaccgcatattaataaggaaatagccagaaacagttccaagattctcataagagcttatttttatgctaaggaagcaggtctcattcgatcttgggaaggcttcataaaccaatttgtaagttacgacgcgattagtaataatttaggtcgagaggaattaaagagatacctaatttcagagtataatttgaagttcattgaaaatgaagagttggcatctttctctaagacaagtgaagttaaggaactcgctgaaacattgctcgaaaatgaagaaaagaaacatgatgttttagcacagaatagtgcacttcttgttcatggcatatatggattaagacttaaaaataatgaatcaaataatggaagtccattcggatatggaacctggtggttgacaaaccagacaagaattcagaagcatacatcagaacttgtacgtaaaaattcatctaagtacataatgcgaccagagtttctcctgaattttctttcactctcaccttctgctgaacaagttcgaaagacatacggaaatttatttccaaataatttaggaatccagtttggccaccgcttgaaagaggacgtttttcatgctgttttacataaagtcaaggagtgggcagattacgagcctggtagggtaactgctttggtttcaagcttatcggacactttaaaatcagagcaatataatataaatgaagaaagttgggagagtataaaggataaaatagttatttga

SEQ ID NO: 244591 - DNA, 435 bp, Klebsiella pneumoniae; identical to SEQ ID NO: 160031

SEQ ID NO: 244592 - DNA, 837 bp, Klebsiella pneumoniae
atgccggtctcctccgaagcgtcaggggaatgggtcagcgtgtatgctgtgccgaagatggattgtccctcagaagaacggatgatccgcttggcgctgaacggctttgatgagattcgaacgctgtccttcgacttgtcgaaccgccgattggaggtcgtgcatgacggcgaggctgagcccattaccgcgaaactggcgaccttggggctaggcgcctctcttcaggaaaccgtcattgccgacccagagacgatcaaggccgctaagagctcggcagtctctgctacgcaggagtcaggcactctgcgcgtgttgctcggtatcaatgcgatcatgttcgtggtggaaatgactgctggcctgatcgcccagtctaccggcctgatcgctgattccctggatatgtttgccgatgcagccgtctatggcctggctctctatgccgtagggcgcagtgcgaaaatgcaggtacgtgccgcgcatctggcaggggtactgcaactgattttggctatcggcgtactcgtcgaggtggtgcgacgctttgttttcggtagtgagcctgaatcgctgatgatgatggcgatcgccttcgtcgcgttgatcgccaataccggttgcctgctgttgatatccaagcaccgcgaaggcggcgcgcatatgaaggcaagctggatattctcggccaatgatgtggtgatcaacatgggcgtcatcgccgccggtgccttggtcgcctggacggggtccagctaccctgacctgattatcggtaccatcgtgggcctgatcgtcctcaacggcgctcggcgcatcctggcgctcaaggggtga

SEQ ID NO: 244593 - DNA, 762 bp, Klebsiella pneumoniae; identical to SEQ ID NO: 160029

SEQ ID NO: 244594 - DNA, 1440 bp, Klebsiella pneumoniae; identical to SEQ ID NO: 160028

SEQ ID NO: 244595 - DNA, 522 bp, Klebsiella pneumoniae; identical to SEQ ID NO: 160027

SEQ ID NO: 244596 - DNA, 249 bp, Klebsiella pneumoniae; identical to SEQ ID NO: 160026

SEQ ID NO: 244597 - DNA, 804 bp, Klebsiella pneumoniae
atgcgtgatttgatggcggaactcaaggagctgcgcctgcacggcatggccacggcctgggcggagttaactgcacagggtgagtcgaacacagcctcgtccaagtggctgctcgaacacctgctggaacaagagcacacagatcgcgccatgcgctcggtgagccaccagatgaacatggccaagttgccgatgcaccgcgatctggccggcttcgacttcagcgcctccagcgccgacgctcgcttgatcagcgagctggccaatctgagctttaccgacaccgcgcagaacgtggtgctgatcggtgggccaggcaccggtaaaacccacctggccaccgcgctggccgtgtccggcatcacccggcacggtaagcgcgtgcgcttctactccacggtcgatctggtcaatctgctggagcgcgaaaaacacgacggcaaagccgggcggatcgcccaggcactgctgcgcatggatctggtcatcctcgacgaactgggttatctgccgttcagccaggctggcggtgcgttgctgtttcacctgctgtccaagctgtacgaacacaccagcgtggtgatcaccaccaacctgagcttcgccgaatggtcgagcgtgttcggcgacgccaagatgaccaccgccctgctggatcggctgacccaccactgccacatcgtcgaaaccggtaacgagtcctatcgcctgcaacacagtagcttggcggcccaggccaagatcaaatcacgggagcgaaagcgtaagggcggccaggaaccggaggacgatgagccgttctga

SEQ ID NO: 244598 - DNA, 1509 bp, Klebsiella pneumoniae
gtgatcagtatggaaatgatgggcaaaattcgccggatgtatttccgcgacaagctgtcgctgcatgagatagccaagcgcaccgggctggcgcgcaacacgattcgcaagtgggtcagagcacctgaggccaagccgccggtctaccaacgccgcgcgatcttcaacaaactcagcccttttcacgccacgctggagcaggcgctaaaagccgattcgctgcgccccaagcaacagcggcgcagtgccaaggcgctgttggcgcaaatcaaagccgatggttatgacggtggctacagccagctcaccgcgtttatccgtgcctggcgagggggacagggcaaggcgtcgcaggcctttgtgccgctgacctttgctcttggcgaggcgtttcagtttgactggagcgaggaaggcttgctggtcggcggcatttaccggcgtatgcaggtggcacatctgaagctgtgtgccagccgtgcgttctggcttgtggcgtatccgagccagggccatgagatgttatttgacgcccatacacgctcgttcggcgccttgggcggcgtgccgcgccggggcatctacgacaacatgaagaccgccgtcgacaaggtcaataagggcaaaggccgggcggtgaatgcacgctttgcggtgatgtgcgcgcattacctgttcgatccggacttctgcaacgtcgccgctggttgggaaaagggcatcgttgaaaagaacgtgcaagacagccgcaggcgtatctggctagacgcccaggactgtcagtttcactccttcgaggaactcaatgcctggctgggccagcgctgccgcgcgctttggaacgagctgacgcaccctcaatacagcgggctgagtgtagccgaagtgctggagttggagcgcgctgaactgatgcctgtgccagcgccattcgacggttacgtcgagcggcctgcgcgggtctccagcacctgcctggtcagcgtcgggcgcaaccgctactcggtgccatgtgagtacgcgggtaagtgggtcagcagccgtttgtatccgacgcgaatcgaggtggtggccgatgatgcgctgattgccagccatgtccgcttgctggatcgcgaccaggtcagctatgactggcagcactacctcccgctgatcgaacgcaagcccggtgcgctgcgcaacggcgcgccctttgctgatctgccggcgccgctgcgtcagcttaagcacggtctggggcgtcatgccggcggtgaccggatcatggcgcaagttctggctgccgtaccggtcgccgggctcgatgccgtgctggtagccgttgagctggtactggagagcggcagcctgagcgccgaacacatcctcaatgtcgtggcacggctgacagcatccgaaccaccacccagcgtcgaaacccacttgtcgctcaaggaagcccccgtcgctaacacggcgcgctacgaccgcctgcgtggccaggccgaggaggtcggtcatgcgtga

SEQ ID NO: 244599 - DNA, 1272 bp, Klebsiella pneumoniae; identical to SEQ ID NO: 160021

SEQ ID NO: 244600 - DNA, 1050 bp, Klebsiella pneumoniae
atgaatgaatcagtagtttttggacgaggacaaggtgagtcagtattagttcaacttactgaaaaacagtggatgatagttgactcctgtaccaatgataataaagaacctgcggcattggcatacctgcaaaatttaggattggaccctaatgaacatgtaaaaattatagtgattagtcatttccataatgaccatatcaaaggcttaagtaaaataattgaggcctgccctaaagcagatatttgcattagttcagctttaaacacaaaagaatttgaagcatatatcaaagctatttcagatccagatgctgaatttgcacaaatctctgaatttaataaaataatgcgccatttcaacgacttaaaaacccaagggagattgaaatttgctatagccgatcgctttattttcaaaaatgataatatatcagttgtatcattatctccatgtgacaatgatattacagagtcaaatttaaattttgccaacctcataaaggtcaaaaacaacacaaatagttcagaaaaatcggctgctctcattaatccaaatcactatagcgtggtactaagaatctttgatgaaacatcaaaacatgagatgttgttaggctcagatcttgaagttcgtaccaatggtgggtgggatgcagtatgttcttgcgctttaagcccaaaacctaataaagtcaatgtattcaaaatccctcatcacggttctgttactggataccatgaggatacttggaataaacttatcaataacgctccagagtgcttattgacaacttataattctgtgttacctgctgaagacatgatgaagaaatatggttcaaaggcaaaggggctgtactgtgcatctacaccttcaaattataaaaaacctgataatttaaagaatattttaagaagtttggagagaagtaattcatctgctgtttttcaaagaaaaaatagtagatatggatatattactgtaaaaggatatttatccgactcccctgtaattaatattcacggtgatgcagttaagattgcataa

SEQ ID NO: 244601 - DNA, 573 bp, Klebsiella pneumoniae
atgagcttaagttccttaacacttagtgaaacaaaatttatcgacagtgatttagaaccaccaaaaagcctttcaatatcttttaataatcataaagaatctgaacgtcaagatgatatcaattataatctaacaaatgctatattttgtgtctcaacacccagcattgattattcttcatctatatctgatatcatttcaacagccccaacctcagaaaatgatggtttaactttaaaaagccgattcgaaaaagcaaaaattaaagcaaactcctttttaagttctaaaacagtcactcttaaaaagcatttagatgcttatggagttattgatacaattgttcaagatgacaaagataatggaataaaaatatccgcacgaatctacaatatagtagatcacgaattcgttgatgaaattattttccttagtaaagaattcagtgaaagcgatcaaagaaaactggttgaaaatgctattttttattggcatgtaggtgtggaaaaaaatattttcggccgtgaaaaacatgtatccgagttcagactgcgaagagtagcaaaaagataa

SEQ ID NO: 244602 - DNA, 714 bp, Klebsiella pneumoniae
atgcattataagcttgaaaatcaatcgattaatttggtgtggattgctccgctcagtcctgatctcttcacaccaaactggttcaagcaattcgatcttttgcgtgatgaggatgttgaggcagcaaaggtcactcttcataacgacaaactattagtagactttggatggttagagctaagagcagaaccaaatagattaacgttaaaactcgcaaacgttggtcttgagcaaagttatatagatttgatcatctcgattttctctcttcttaatacaatccctaccgccgcgattggattaaacactaatttcttatatagttttgtagaaagagaaaagtgggataaaattggtaatgaattagttcctaaattattatggtcagaagaaaacaaatcactaatccttcaagatgaagttaaatatcactttggaatgaagcgcttagatatagaaattgccaattcaaataaaaaagaaaataatgtatacgatgaagtaatcaatttaacacttctaccaaaacttaacttcgaaaaaatcccattcggattggtcgtgaatttcaatcataatctaagaagcacaatagagcctgatagtgtcgagttgacaaagttattaccggaagtaattaaaagtcaattcaggaatgcttcagataatgacatattaactattgaatcaatatttaataggattctctcatga

SEQ ID NO: 244603 - DNA, 204 bp, Klebsiella pneumoniae
atgctggaaaattactatggtattgactacaccgatgatgaaaagaagcgtttgttggctgtacaggcagcaatagaaatagctatagcatcagtatcagcaaataccgctgatagtaataactcgaagactctatgggatctaaagcacgtagctcaagagattggagcgttagctgattctattcaggctgccttgaaatag

SEQ ID NO: 244604 - DNA, 333 bp, Klebsiella pneumoniae
atggcgcacgacggcattgataaaattccggaaacgggcacctggctgctgaaaaaaggggagcgggttacgacggcaggcacatcagcaaaactggatgccactctggaacaggtgcggaaacagcgttcccttgccggaaacccgctgcatgttgagttcaataacacctacaccgggaaaccggacgatgcaatggtccaaatgttggatcagcggcagcgtgcatctgaaaaaaggcttaagcaatattttacttcccaggttattaatccaactgagaattatggtcgatcacttaaatcagtttatccggggaggcgtaagaaataa

SEQ ID NO: 244605 - DNA, 216 bp, Klebsiella pneumoniae; identical to SEQ ID NO: 114219

SEQ ID NO: 244606 - DNA, 294 bp, Klebsiella pneumoniae; identical to SEQ ID NO: 193826

SEQ ID NO: 244607 - DNA, 672 bp, Klebsiella pneumoniae; identical to SEQ ID NO: 181159

SEQ ID NO: 244608 - DNA, 2799 bp, Klebsiella pneumoniae
atgcagggaaacgaagaaaaatatacgccggatgttctggactctgcccagttggtacgtattgaagccgtacaccgtggatttctttatcagcacttgtatgctgttggctgcttactgctggcacagaaagccagcatggagacagttaccgttgagcttgatgaggatattgaactgaattccggacaggagcacatttacgttcaggttaaaacccgcgtgaagcagatcattcccagcgatgtgtcaggtgcactgacgcggtttgcggagctgcgtaatgaacacactgaagggcgccgtcaaggagccgcttctttcgttattgtcgccaaccaagcgccaggtccgctcctccagaagatgatcgaggataagacacttcctgcagatgttcgttttgtctggccccagtcaaccgctgagcgccatcctgcacttccccctgcctgggacacagtggctagcgcggccgcatggtgcatcaagcaagcagagcaactgaatttttcgttattgtcgccagaatccctcatctggaagctggccggtctggtccagctcgcagcaaccggaaataacttagacggacagcatgcgttttatacaaaggaccttccagctctgttcgagcagctaatagttcagctacaggacttccctgcaccgccgacactttaccgaccacaaagaggggaaccctcttttgtgtcggataaacgggtgcgcatcatttgtggcttgtccggtgcaggtaagacagcatgggcctcgcaggccgcacagcacagcatgcaggtgtgtgcgtattacgacgtcggcgaccttccgggtcctgcacttgccagtacgctggttcgtgagctagcagccaggtttgcgactcaggaacaaagtgggctacgaaaaatattgcttcctggtgccagtggctttgaagcactgagaacattcgacgccttcttgcaacagcagggcaccaacctgctgctggttctggataacgcacatcgtatccctgtggagaatttgcgggatgttttgaatgccacaacctgtatccattttgtgctgttgtgccagcctcatgacaacatccgtcaactggaggccacaaccggacttcagcgagaatcgttacagggatgggatatagatacagtggctgccgcagtgaccgacctcaacggtttcgccagtgcgctgggatatgagcagttacggagctataccggagggttgccgctgtatgtcgaaagcgcggcgagagttgccgtagaggaatacaaaggagagatagacacgctatgcgctgaactccggcaacaagaaaacagtacggaaaccgcgcaggaagttattctcagccgcgtctttcaaggatttgaaccactggtccaaaacgcactggcgttgttcagtctgtctgatgtggggctaagtcgtggcgaagtttcagggtatcttgcccgctcattgaatattccttcaaacggggcgtccacattaattaaaaagatgcgggccaccgggaccattgaaaactatggaaaccagacgttaaaagtacatgacgctgtcagggctctgggtctacagcacctgaacatgatggcccccgatatcgtaaacaatgcgttaatggccttaaaagatcttttgatcgagagtcttcaccagactcgcgacacttcgcgattttctcttctcattcagatttacatcaagcttaacgatgtcattacactcatcggtctgtctggcgaagaactgttttatgagatgggcattactgtcgacattatggcaagtctgaaagaagcgacggcttcggaatcaatggagcccattcataaattctgggcgctcgatggtctggttttttcccaacttaaagacggggcttctgagcaaattgctcaattgctggaagcgatggaagccttgcttacagaacatgagtttggctaccaggaacgcacagcctacaccatgaagaagatccttttcttatccgaaaagggagacctttctgaagtgcaaaggctggcagatgaagcccgacccggtattccagacgaggagcatgcgcgtatttttgactacacctacgccatcgcactttggagactgaaaagatataaacaagcagaaacactgtgccagagtgttgtgaaacgctattacgaattatttgggattaccccactagatgtcatgggtaaaaactcggatgtgctgtggacaatcatcaaccaccctgaaaatgttcacgaacatatcaaacatctggccgatgccctggagctactcgctaacatcaatgacgcgcagggaaaagtgtcaccgtttctgcgtattcacgcgatgaaattttacaacatgaccgctgcccccgaatctttggtccgggttgggcaggatctggctgacgagtttgttgcaagaaaggactatgtcggtgcaagagaggtgatggaacagcacgttctccctgttgtaaatacagctgggctggtgcaacgactggttcaggttcgaagccagtatgccgtcatactggcactcgccggcgaacataaacaggcagaagcagagatgcgtcggctggaaccctattttgaaggtttaacgggtgatcaacgacaggaggttgaggatcaatcgaccatcattgcccatctagcttataaagccgcacagtccaagatcaccaaatacttagggccagttggcagaaatgaaccatgcccgtgcggctcgggaaaaaagtataaaaaatgtcatggagcctga

SEQ ID NO: 244609 - DNA, 930 bp, Klebsiella pneumoniae
atgaaagatgcgatattgagagatgaaatcctaggtcagtatcttcccgggtactttgcaataacagtaaactcggctacagactttataaatatgagtgaacaagactactcaacattagttcatgagtatattcatttcttgcaaaacatttctaccgtaagtggtttgacaattctgagctgtattggtgcttgggtggggcatctcactcatgggatttataacaataaagagagtgaaggggggataagatgtttcccatactatggggaaaatagtgattcttcaacaattatcgagaattttgattcaattattatttctctatacggtaatggtgaaaataaaggtctgaatatactatcagacaagtatggtgtaaccaaggtgacgttgtctccatttagtgataatgttttatttgatgaaattacgccgatgccagaaagattaaagtactccagcaggtgtttagtggagtatgcgtatttaactacccaaggtaattcaattcaggttccaaatataacagtggatgtaggtgctatatgtatttatgaatacatggccttcactattgaaaagcatttgtttggaacggttggtgaaccacctaagacgccatatttagtagtaaaagacgtggcggattttatttttggatatgaggttaatgatgatattttggttgcgatatgcgaactaacactccagtctccattcccgggagaggagctatataaaatactaaataatttaaatgagaaaggatatgctataaatagcatggataaaagggcttgtctgagtgctgtgattctatttattatattcaggaagattatgatatattggaaagtggttctacagattctgatggagaatttaaggagtattctaagaaaatgcttcttaaccgacaaatag

SEQ ID NO: 244610 - DNA, 456 bp, Klebsiella pneumoniae
atgcttcttaaccgacaaatagaagaagtaaaaaaagactttaaggttttttttgatgggaatcctgattttgataaagcctatgatgctttggtatatttattggatgcgatgagcaatttcagtggtgatgatttgatgccaatatcggagatgatgtttctagagaagaaagtggcttttgattatctgaatgatattattaagttaattggcatgccattgctatttaacgaaaatggctatgttggacatgcaatcgctgcaaaggggtgcgatgaacagtttttcctattttataccttgtaccaatatataagaatattcaaatatggagatgagtcatgcggtttactgcatagttgtaaaaattttcaaattcaatgtgttaatgagaactgtcaatcaaatcctcgcttgaagggggctttgttgaataaatcgaacttttgctga

SEQ ID NO: 244611 - DNA, 393 bp, Klebsiella pneumoniae
gtgtttgcccacgacttcggttttgtagccaagtatctcaacgagaggtttgagctcctcccggtagattttcccgaaggctatctggttcgcgtacacattctcgataaagcccgttttcccgactgtatcagtgccaagagactgccacttgtccccgttctgcgtcgcattcatgacgacggcgtgagtgtgcaactggggctcctcgttacggttcgtgtcgtgggtgaatttcgccacaataaggttaccggtcagcacagtttcgctttttccatcggtcatcacgcgggtggcggccagcgtttccacctgctgcagcgcttttgtcaccgcctggttatgggcgtcaataagtcttttgtctccccccagcatcgccatcactga

SEQ ID NO: 244612 - DNA, 2025 bp, Klebsiella pneumoniae
gtggccagaagagacgctcacattcagcaactgccccgacctgatttgtgcctgaatggtcgtgtcgatatccgccatcgataccttaccgcccccggtttccagcgccgtggccagcaactgtggccgggtaaacgtcaggtcatcgctttccagcaggggaacggaaaggtggatggcctgctctgccggggtatgcagcccggccttctgctgtgcgatggccgcatcgaggtctgtctctccggaacgggccttcaactgctccgacaccacgctgaacgcggtatgtcgcgccagcttctccatcgtgcgcgccgcatcctgcgcggagtacagccggaggtgacttccgctctgcgccagctggttgagtgtggcgttatccagctcacgctgcgtcacagacgcaaaaaccgttgccgtctcgctgaccgacctgccgggactttccacccagccgtgcccgaccttgataccgtcgaacgggctgctgccgacagaaagcgactgggtggttttctgcccggggcgctgcaccgtcagctgcccgtccccggatttgagcacggtgatgctctcaccacccttcagccgtgtatcggggatttttcccagcacggccagacgctccccttccgccaccggcagtttatcggcccggaacaacgtccactggctgtcgacggcggaaactttcatatccaggcgctccccttctttgtccttcagggtcagcatgttgctgctggcggtcacccggtcaatgacaaagcggtcatgcttccgggtctccgggtcccaccgctccatcaccatcccttcgcggtaatagtcccgcacgctccggcttttgctgtccagccacaccggcgtcagggcggtgaccgtcatctccttctctccgagcacaccttcatttttgagggtgtcgcggataacgctgttgagcacattctgttcacgcgtcccgctgatttgcgccacgctttcctgtccctcacgcacgctggcggcaaattcctgcgccagcaggctgtagcgtgcccctttgtccggctcactgatgatgtctgccgtcacctgatgtccaccctgccagcggtaggtattgacgccgctgtccttcagaaccgtcagcgcactccccgtcccgctgcgtttgccgctgtcagaaagcagaacctgaacgttatggcgcatcgcgccgtcgagcagggaaattgtctctttcaggctcagcttctccgcctggtcaacgataagcgtcccccccgggataaacgcggtcccgtcctgcagggcggatttaccggtcaccgtctccccggccagccgcgcatccccggcgagaaaatcacgggagcggttatcagcagcaagaatatgtacgtcgcgtccctgctcccgggccatgagggtcagctcggccacccgctcccgctgacctgccgcgccaccctgcccggagacaatccccatcgccggccggtcctgagccagcacgctgaccgcatcgctgaagggggcctgacggacaacagacgcatccggcgtgacagagacgtggttctggcgctgaacctcctggctcagcgctttcacggagagctcatccagcacgtggatattcgaggtgaagagacctttttcccggtcaagaggaataagctgctcgcgctcgatcgccgcatcgatacccgttctggcctgctcaaacacaccgggttttgcttccagctggctgactgtgcgggccagcaggtcggcgtaggtgaactgcaccttccggtcgctgagactggcaatggctttcgtgaccacgtcgctgatatcagggccgtccgttttcaccggactgactggcgcactggcgagctctgctgcgcgcttatcggcatcctcgcggtagctgcgcatatcaaacccggtctccttcatcgtgttcatccattccaccatcttctcggccggatcgatggctgctttggatttgcgggtatcgagggcggccacatcccgtga

SEQ ID NO: 244613 - DNA, 1977 bp, Klebsiella pneumoniae
atgcaaaacataaactcaattatgatgaggctagcaaagagagccgagaaactacagccagaccacctgctcaagtcatttgttgatgttggccccacttatactttattatcaagccatgataatcaaataatgtttggtagaagaggtaccgggaaaacacattttttagccgttctttgtaataacattcaacaagagggtatcatttgtgccgctattgatatgaggttgataggttctactggaggaattttctctgaccctaatatatcattcggtgaaagagcgaccagattactttctgatacattatgtagtatacatgaagtaatcctagactacatttttgaaaaagatattgaaaacaccactgaaataacacaattactaaatgatttcattgagaaatcaacctcattaagtattgaaggtactacagaggaagaaattagttcggcaaaccatagatccatcaattcctcactaggcgcttgcttaactaataaaagcatatctaccaatttctcattttcagataaaacttcatcggataatagtgagaaatcaaaaatttccgggaagaaaacactaagaattcattttggagaaataactaaactactgagtaatatcgtttcaaagctccccaaaagggaattgtggatattaattgatgaatggtcagaagttccaatggatcttcaaccctatcttgcagagcttcttcgcaggatattatacccagtatctggcattacagtgaaaattgctgctattgcacatagatgtaattttctaataattgatcaagatactggtgttcgtgttggtatcgaacttgggtccgatgcttcatccgttattaatttagatgagtacatggtttttgataacgatcgtgatgcagcaaaagcttttttcaaaaacctacttcataagcatgcacaggcaatagataaaaactcaatatgtgatacagaagccattctatttattaatgatgtgtttactcaaccatcagcatttgatgaatatgttcgagctgttgaaggtgtaccacgtgatgctataaatatcatttcacttgctgcacaatcggccttagaaaacaaaatatcaattgtgcacgtacgtaaatcggcacaaaaatggtttcaagtaaacaagcatacggccctcaatagtaaacctgacgctgttgtcttacttgataaaatcataaatgaagttattggtcatagaaagaccagagggttcttaataagcaatgaaaaccatcacccattaattgactatctttatgatatgagagtaattcatgttttaaagcaaggggtctctgctcgaaacactataggaaaaaaatatactctctacaccctcgactacggctgttatgtagaacttatgtcatctagttcagctcctttgggtttaataatagactcagatgagaatgatgagttaaaatatatagagattcctaaatctgactatagatcagtcaaaaattcgattttagaattcgaaagcactaatcaattacgattgaatttggtaacatccactgatcatcttcaacttcctgtcaagggtggaaaacataaaaatgtggagaggcacattgataataaaataataaactcaatacctaaaaacattggttcattgaaaatagcaggaacaatatacatcccaataatcatggtggctttagtgttaaggaaagccagaggttttgagaaaagctatgctgtagaattaactaaaataataaacgaacacatcgttattgacattaacagaccgaagattgccaataataatatgtcgagagaacttagaaagaataatatattagacctcccatggttagaatttcatgaaaatggaagaagcccacaattttctttacacccaaactggaaagagtactggaaacaatattttgggaaggctgctccaacattttaa

SEQ ID NO: 244614 - DNA, 1218 bp, Klebsiella pneumoniae
gtgaaaccggcatcacgctggccgctgcatccggcacccaaggaaggcgaagcgctgtcctcgtggctcaatcgtgtcgccgtctgctaccagatggatatgctcgatctgttggaacacgatctcggtcacagccaggtcgatgatctggacattgcgccaccatcgttgttgctgacggcgctgtcccagcgaagcggcatcgagctggaccggctgcgctgcatgagttttgccggctgggtgccgtggttgctcgatagtctcgacgaccggcttccggccgccctggaaacttatgcgttccagctctcgattttgctgccgaagcgcaatcgcaagacaagatcggtcgcgagttggcgcgcatggctgcccagccagccgatccgccgggcgtgtccgatctgcctgaatgatccggcgaaccaggctgtgctgctcgcgtggaagttacctctgatgctgagctgtcctatgcatggctgctggctggagtcctattggggcgtgccggggcggtttctcggctgggagagtgccgacgctgcgccgcgcacggccaacgacgcaatagcggcgatggatcggcgtacctggcaggcgctgacgcaggggtacgtggagctgccgcgccggcgcatccacgccggcctgtggttccggctgctgcgcacgctgctggatgagctgaacaccccgctttcgcattgcggggtttgtgccggcagcgtccgctatgtctgggagcgctgcggtcatccgctgcgcgccggacaaagcctatggcgtccttacgaaattctggacccggcggtgcagttgcagatgctggaggcggcggccaccgccatcgaactgatcgaatcgaaggtggtgagtccacacggggagctggcggcgttgttctcgctggagacgcaaaccgggtttaccaatggcctgtccgagaagaaacgtaaccctgagcctgtcgatcactggcgggaggcggtcaaggcgctcgacgaggctattgccgaggcccggcacaattgcgagacggcccggtcactgttcaccttggcatcttatggacggcgcgaccccgagtccctggatcgccttcgcgtcacgtttgcccaggagggcattcccccggaatttctgtcacattatgttccaagcggaccctttgcattccttagtatgaatgacgggttaagtgacaaaatttga

SEQ ID NO: 244615 - DNA, 783 bp, Klebsiella pneumoniae
atggagttcgttctgatcggccttgtggccctactgacatctgggctgaccttgttttcaggcttcggtttgggaacgatcctgatgccggtgttcgccctgttcttcccattgccattagccatcgcggcgactgctgtggtgcatttcgccaacaatctcttcaagttcgggctgatggcccggcaagccgattggcctgtcgtggcgaagttcagcgtgcctgctgctatcacggcgattcttggtgcggcatccctgacgttgttcgaccgactgccggccttgtggcagtacagcttcgctgactcggatttcgagatcacacctgtgaaggcggttatcggcagtttgatcgtgctgtttgcactgctggaactatccccgcgttttcaagcactggcctttcctccacgctggcttccagttggtggggcgctctctggcttcttcggaggactctcaggcaatcagggcgcattgcgctcggcgtttctgttgaaagctggcttgtccaaggatgcattcgtggcgacgggggttgtttcggcggtgatcgtcgatgccgtgcgcctcgtggtgtatggcaccgccatgcttgccggtcaatttactcaggctcaggcattggtactgcctgttgccgttgggacaatctgcgcattcatcggcgcttttgtgggaaagcgcgtcttgcagaaggtcacgctgcgcacggtacagctcaccgtagctatagccatgctaggcataggaacggggttggcccttggcttgctctag

SEQ ID NO: 244616 - DNA, 1206 bp, Klebsiella pneumoniae
atgaccgataccaccaagactgaccgcagcccgtgggctgtttttctggtctttctccgattgggcctgacctctttcggcggcccgattgcccatttgggctacttccgcgatgagttcgtgacgcgacggcagtggttgaccgagcgcagctatgcagatttggtcgccctctgccaattcctgccggggccggccagcagtcaggttggcatcgcaattgggctgtcacgatccggctatgccggggcgttggctgcgtgggctggtttcacgctgccttcagcgattgcgctgatcctgtttgcgctgggcattgccagctacggggatgcgatgccgtctggcgtactgcatggattgaaggtggtcgccgtggcggtggtcgtgcaagccgtatggggaatggctcgcaatctctgtccagacgcaccgcgcatcaccatcatggcggcggcaacctgctttgttcttttggtgccgtccaccttggggcaggtgggggttatcgccattgcagcggtcataggtctgttgctattcaaacctcagcagggggcagcgcatgatccattgccaattgccatccggcgtcgcgttggattgttctggctgacgctgttctttgcgctgctgatggggttgccgttgttgaccgccacattcccgaaccagacgctgtcgatggtggatgccttttaccgggctggatcactggtctttggtggcgggcacgtcgtgctcccgctgttgcaagccgaagtggtgccttccggctgggtcagcaatgacgcatttctggcaggctacggtgccgcgcaggcggttcctggccccttgttcacctttgcggcgtttctcggtgcttcgatgaaccaggcaccctccggctggtttggtggcttggtctgcctgcttgcgatcttcgcgccgtccttcctgctggtcgtgggtgcgttgccgttttgggaacgtctgcgccgcaactcccgcacgcaagcggcgttgttgggcatcaacgcggccgtggttggcctgctgctggcagccctctatcaaccggtatggacgagcgcgattcatgcaccgcaagacttcggcttggcccttgtggcattagttgccctgatgttctggaagctgccgccgtggctagtcgtagttggtagtggtgtcgcgggctggttgttgagcgtgaccctgtga

SEQ ID NO: 244617 - DNA, 741 bp, Klebsiella pneumoniae
atggttgctaaattaggatttatagtcgacggctcttcatgggctcctgagaacataatcggaagtctttatcctcaaccaatggcaggaagaattggtattttgaattcggatggctcgacaatgttagttggtgatgaaccaacaaaaatcggaacacccgttttaggggatggctgccagacgttaaatgcaataagtgctggctatgacacaggaatccccgacagtataaccaaaacgattatggtgctggcaaaacctgtgttgtatgggacaaagcgagcactaggtataggctcttatcatggtggtaacggtacgcccccggtgcctcagggtgatacgctggttatcagcccaattgattacagtgtgcgtgccattgccagtactacaactggaaccgcatcacaatcagtcatcgatgggtccaatcttgatatcagtaaattccatctctactttggcgattttagtgcatcatatttacaggtcagtactttccataatgatacattcatagccggaaatgttgcagctgccgctaaccgtattgtgccatcatcaaacattcgcgtgggtatcggatatgatgttgtggatattaatggattcgatgcgccagttcaggtagccgcatggggagcatggagcggggttaatttaaccaccgcagacaaagtaaaaatgtattcggtactaaaaagcatgttatcaggtcagatcgctatcagttaa

SEQ ID NO: 244618 - DNA, 1164 bp, Klebsiella pneumoniae
atggctgcaataaatgctatgccactccagaccgttaccgccattctcaatgcctaccggtttaatggtggcgtcagggcgcaagatggttcaggaacctctgctgaaaatcatgccagtctgcttccatatattgaaaccacacatgatacgggtgatggtatcggctatgaaacacctgtgggcggggccattactgcgatatttgaccggttgtctgctgaagctgaggggtatacatcaggtgacgttaaaattctgggttctgtcccggcccagggaaataagaccatagcccaactgcgccagaatcctggcccatatatgcagcgcatcatcgacgacatgacatacggtaaagcgcgcgccaatgaactgggacttacgtattcaccccacgcaatgatttatatgggtaatgaaagtgaccagagcgcaggaacaacagaagaagcctatctcgacagttttgacaaaatgattgcagccgtcaatggctttgccagcgacgtgacaggaaaaacagagtctcttccctggttcatctatcagttcaacagctggaaaaaccgtacaccgaataccagctacccaaccatccccattgcattgctgaagctggccagaacacgggatgatgtcaggcttgtacagcccatgtacatgtacgactactacgataccgctcatcttcttggttttgattcgaaaatctgtggttatcgttttggactagctattgaacaggaaatgttgacaggtaagaagtttgaaccactctggtcaaaggatgtgattttgcaggaggggatcggaaatattttttataaccctgttagaggtttggcgttagataccagtttggtaacagacccgggcaactacggaatgagtcttcttgatcctgatgataacccacttactctgacggatgtctcagttcatttggataggcttcgagtaagggcgtcaggcggtattcctgcaggttcaaaattacgaattggatttactggaggtacaaccggaacccttccaagcaggacaaatggtccccgctgctgccttcgtgataatcaaggtgacatcattaaattcgatccaaatggcgttgcatatcgcatggataactatgcaattgttgaagaaattatattaaattaa

SEQ ID NO: 244619 - DNA, 375 bp, Klebsiella pneumoniae
atgaggtactggttgctcgttatcttaatgaacgtgctgttctggttgatcgtgaagcatgttgctccggaatggtatggttcccctggttattatgcaggccaaatcatctgcacactaatagctgcggtcatcacatggcgtgatccgcctgactggttagatggaatcctgctcggcgttatagaattcggcgttctgattgccgggattatattctttgtctggggcatcgggtacaagctggcattctgggggcaacatgatcctaataccatatatgcaagtgcaaacgatgtgattttacctaatcttgcgctgggcacgggcgtcttgattgcggcatgggtatacattagatatttaaagcgctaa

SEQ ID NO: 244620 - DNA, 303 bp, Klebsiella pneumoniae
atgatgatctcatatcaggaacttgttcgcaccttccctagccttcaaataaactacaacccatgtttttttgtaatttttcacagcgttacctcttgtttatccattattagcaaacagcacgccttgcagactacctgcggcttcctgcaactgagcattctgaataagcgacggggcgataaagccgataacgcatcgttcagtatggaggcattatttcacaaccccagcggcctggcctcctgtatgaactcaatcagaaggcgaagcccggtcggcaattgccggcggcttgaataa

SEQ ID NO: 244621 - DNA, 969 bp, Klebsiella pneumoniae
atgagcactaaattaacaggatacgtctgggacgcttgtgcatcttcggggatgaagctatccagcgtggcaatcatggcgcgcctggctgacttcagcaacgatgagggtgtttgctggccttctattgcgaccatatcccgtcagattggcgctggtgaaagtactgtcagaacggcgatagctgcacttgagaaagaggggtggctcactcgcacacagcgccgcaacggcaaccgtaatgcatcgaacgtctaccagctcaacgtttccaaactacagaaagcggcattttctcacctgtcagtttctgacacatcaaaatctgacacgtcaaaatctgatgcgtcaaaatctgatgcgtcaaaaattgacccctcaaaatttgaggcgtcggaatccatcaaaaaaaccagttttgacccgtcagaatctggtggggatccgtcagtaaaatcaactactgatccatcagatataaatccttcttgtccggacgcttcgcaaccggacgaacagggctctgctgatgaatttctgtcacgacatcctgacgcggtggtgtacagcgcggcaaagcggcagtggggcagccaggacgatttaacctgcgccgagttcatttggggaaaaattatcagcatgtacgaactggctgctgaaagtgatggtgaggtagttcgccctaaagaaccaaactggaccgcatgggcgaatgaggttcgcctgatggtgatgcaggacgggagaacccataaacaaatttgctcacttttcaagcgcgccaacaaagattcgttctggtgtaaaaacgtactcagcccgtcgaagcttcgggaaaaatgggatgagctgtcgttaaaactatctgctccactcaatagctcccgccaggagtcgtccatttcgcgagccagcttcgacggggttgattactcattgccagaaaactcggggttccgcacatga

SEQ ID NO: 244622 - DNA, 972 bp, Klebsiella pneumoniae; identical to SEQ ID NO: 145052

SEQ ID NO: 244623 - DNA, 2025 bp, Klebsiella pneumoniae
atgagatataataagcccctatcaattattttattattcatgattttgttggtggtggttatccaaaccagcatatttatagctcatgaacagaacatttactattgggatttcaatggatactggagaatgtgggaagagttttgtgccacattccctaatgagcctatcaactcaataaggacagtctttcactctattagacatgatgactataactctcttcctgtcgccatcacgtcatggttttatctttttaatttaccttcacggctgtcttatataacttcattggctgtgatgtatcttttccctacagtaatactcttccatttactgtgtaaacgtttttctgataatcactcttttggctggttgttactttcttgcattttacctttaacctttgtggctttttgggccccaacgcttaaaggatatcctgatatatcaggcttaatcccaataattgctgcattactatatgtttcgagcagtgatttcggtgataaggttaaaattaaaaaagcccttgtgactggattacttctgtggtctccattcttattgagaagatggtacgcatatacggttgtatcattgtatatatcattacctgtgcttaattatttcctctacaataatgccaagcatagctttggtcgcgtggccatcattatcaaaaattttttcgttgctggtattttctccgtattgcttaccttgatatttcagggtgcattaattaagagagtaattgcaactgactacgccacaatatattctgcttatcagtcctctctcagtcattccattgaaaatctttataatgatatcggtttatatctattcccctttgtaatcattggattgctttccatttttcggagtaaagaccgtaatgataaaatccttatcatattctcagcttttaacttagtatttagttttttcttatttacaagaacacaaagccccggcgtacaacactgccttccttttgctctttgggcgttaataatcgccaccttgggattaaaaacgttattgcatcttgctaccagcaaaacttatcaatattcaatgctcattgccgtcactggtttatgtttttttattaactacacttcgctatttagcgcaaaacaatatacaacgattgacaagttgttgcctatcaaatcgttgcctatacacgtagataatttcaacaattacgttactctcgttaaaaatattgaatcgcttacacagggaaatgaaaaagtcacgatacttagttcaagttcagtacttaatgacgatatgataaataccatttcctaccggaaattaacagggaaaatagcatatgcttctcaagttgatctcagagatggtattaatattgaatctttactctcgaaatattttgttgtagcggatccgatacaaacacacctgacaccggatgggcaaagggtaattaccataccagcaaatgaaattctttcaggtgacggaattggtgctgctttcaggagaataggccctgcctataaactgtcggatggagttactgcatacatttatgaacgaacgcgttcctataccgataaagagattaaaaactttttttcacttttctacaagcattaccctcaatgggaacaagtatatgggaaagggctttactatccgtttctttcagcaagtgtagttgttggtgatacctggggtaaatttaccatctccgataatggtgaaatcgatgcccatccaggagacaacacccctaccacagcgaaatggatactaactggagttaacacgcttgtttttgactcttacaacacgacgtgtagtaatgctgatggtgtggacataaaaattagcaacgatgaaggaaaatctagtaatgtttatattaaaaacggcagtagtggaatcatggatgttgaggaattttcaggtaaagaatcaaccattgaaattctcaaacacgaatactctgcttgtgactctattaaaataaccgcaaaataa

SEQ ID NO: 244624 - DNA, 543 bp, Klebsiella pneumoniae
atggcagcacgtggcgttaacaaagtcattctggtcggacatctgggacaggatcccgatgtgcgttacatgcccaacgggggcgcagtggccagtctgacgctggccacgtctgaaacatggcgtgacaagcagacgggagagatgcgcgaaaacaccgagtggcaccgtgttgtcatgttcggcaagctcgcggaagtggcgggcgaatacctgcgtaaaggcgcacaggtctacatcgagggccagctgcgcacccgcaactggcaggacgatgccggagtcacgcgctacgtcaccgatgtgctggtcggccagaacggcaccctgcagatgctcggcggccgccgtgaatccggtgagcctgagagcgctgcgcagccgcagagtcctgccgccccggcacaacctgctcaggccccggctaaatccccgaaagcaaagggcggtaagaaaggccgtcaggatgcggctccgtcgcagcaaccgcctcagccactcccggatgatttcccgccaatggatgatgacgcgcccttttaa

SEQ ID NO: 244625 - DNA, 489 bp, Klebsiella pneumoniae
atgagcagtaagagatcagtatcggctataccgacccatcctgaagcttctgttgaagaggctaaagactggttgacagcagaggaattcactcatattgagggcatgccgggcactgcgcgtggcgccaggatgcgcctggaaaagctggcatccctgcacccggaaatacgtcgtaaaaggactgcagggaaaggcgtggtttaccatatcagcgcagccacaatatcgcttgatgatgagagaaacagggctaagggtgaagcgtttactctcaccgacagcgatcgccagcttagcctctggatacagttgtatcgcaatatgtcgccagcttcgcgggcgcaactgatggagcaggccctcaggctggtaaaggacgatctgatgtctcaggggcctgatgtttctgaactggcggtacaaatcatgaagctgcccgaagaggagcgtaagcgcctctttgaaaagctgaacgggaaggtgtga

SEQ ID NO: 244626 - DNA, 528 bp, Klebsiella pneumoniae
atggcaaccaccatcactgaaataacggaatgctttgagtattttttcatttctctttatcgcagggagttcgtcaaaaccctgcgtctgaacgaatgtagcgagcgggaattacagcctctggtacgttgctatttgctgagttggtttgcagataacgtctcaccggaagtcaaaagcaagctgccaggaactgtatccgggcatggttacattgattttgccattgatgatgtagccgttgagtttgcagtacgtaaaccaactgcggcacgttctaatgtctccacaattgtaaatagcactgaagttaagaagttgatgaagcacgacggcaaagccttgcttgtgctgtttgacttctctgacacgccctactcagaagaacagatcgaatctttccgcaactgcccctctcttggtcgagggaatcatcgcaagtccgcattcaacgtcgtttatttctttgtggaaaaacgcagaccgttggcactggggaaaatcaccaaaaacatccgtataacttaa

SEQ ID NO: 244627 - DNA, 360 bp, Klebsiella pneumoniae
atgaacagaaaactgctggccttattaatggtaaccataacgctacctgtcgcagcagcgcagtacgtaaaacccggagcggttctaaccctgaacccgggaaagggcaatgctgaattcaacattaatgcctcaacagggaatggttcgggcgtatgcaatatggatggtacggcacaggaaatagctgccggagaaagtcagaagcgtcgctgggtctggaatgacaataccagccagtgtgttgcagtaattagtacactgaaaaacggtaaggccagcgttatgactcgtggttgcgagggatactgcggggcttctgcggcaggcgcaatggatggcctgtttaataagaagtaa

SEQ ID NO: 244628 - DNA, 336 bp, Klebsiella pneumoniae
atgaaaagaacaatgcttctcgtattaatagcagctggtttgctgactggttgcggcgagaaaacgccaaaatatagtagtgatgatgcaaaaaatctggtcgtggatattgccagaaagacaatcgagaaaagcatgacactggataaggatgtgaggatttctgttgaaaatgtcagaacaatcagccatgaatcaggccttgacgtttatcagtgtgcggctgacttaacattcacaaagccagacctgcaaaactctcttccaattacatacctgattcaaaaaactgatgagggtaaaggacgattctatataaatgtatctggcttataa

SEQ ID NO: 244629 - DNA, 687 bp, Klebsiella pneumoniae
atgattgcagccgtcaatggctttgccagcgacgtgacagggaatacagagtctcttccctggttcatatatcagtttaacagctggaaaaaccgcacgccgaataccgactacccaaccatcccccttgcattgctgaagctggccagaacacgcgatgatgtcaggcttgtacagcctatgtacatgtatgactactacgatacggcacatctgctggggttcgactcgtatatttgtggctatcggttcggcctggctatcgagcaggagatgctgagtgggaaaaaattcgaaccgctgtggtcgcaggatatttctcttcaggggggcatagcaaacatctggtatgagccggttggcaaactggtactggataccagcattgtcaccgacccgggggattacggggtgtctgcaatagacccggatggcaatgcgctgacgctcaccgaagtttctgttcacctggaccgcctgcgcgtccgtgcatctggcggtattcctgcaggttcaaaaattcgccttggctttactggcggcaccaccgggacactcccgagcaggacaaacggaccgcgctgctgccttcgtgacagccagggcgatactatcaaattcgatccaactggcgttgcgtatcgcatggataactatgccatcgttgaagaaattacactgaattaa

SEQ ID NO: 244630 - DNA, 741 bp, Klebsiella pneumoniae
atggtcgcaaagttaggatttgtagttgatggctcttcatgggaacctgagaacataatcggaagcctatatcctcagccagctgtagcaagaattggtattttgaactccgacggggtcactatgctggttggtgatgctccgactaaaataggctcaccagggttaagccctggctatcaaacattgaacgctattaacgctgggtatgatactggggttcctgacaatattactaaaacggtaatggtactggctaagcctgtgttatatggaactaaacgggcgcttggaattgggtcataccatggaggcagcggcactccaccggtgccacagggtgatacgctagttatcagcccaattgattacagtgtgcgggccattgcaagtaccacaacaggtaccgcctcacagtctacaatccccggctccagcctggatatcagcaagtttcatctttattttggtgattttagtgcgtcctctttgcaggtcagtgcattccataataacgcccttgtctcaggaaacgttgctgctgctgcaaacagggcgatcccatcctccaatataagggttggtgttgcttatgacgttgtggattcaaacggctttaatgcaccaatacaggtagctgcatggggtgcgtggagtggggtaaatctgacaacagctgataagcaaagcatgtattcgacgttgaaaaatatgctgtcatcccagatagatataagttaa

SEQ ID NO: 244631 - DNA, 609 bp, Klebsiella pneumoniae
atgatgatctcatatcaggaacttgttcgcaccttccttagcagaagagcaccagacctttcacttgaaaaatacaatgcgaaaaacaaagggaaatttaaaagattaagcattggtgaacttgactgtacttgttcgacgattttttactcactattcattggttcactgagcacaaaaacaccagaaacctttacaaaaaataaagttttgatattctccataggagattttaagtttatgctaacatgggcctacttaccttttccagctcattcatcaggaaatctaattcataacaaaacaataacagacgacgaggaaaatattatcggtcaagttgaagggattgattttcatggagcaattgagcaaagtgcggtatatttcaatatacttatagatgaatacaatgaaacctttaataaggccgaaagactcccaaaaaattttgtcatcgaattatttaaacataccggatttctaaaggagggaactttttcaagccccagcaaaaaaaaactaattaaaaaaatgaagaaaaatggctcacttaataaatttccttttatctccacaaaaacagtgaagaaaacggacagtcattaa

SEQ ID NO: 244632 - DNA, 672 bp, Klebsiella pneumoniae
gtgccggacggccagtattctttctatctgcacagcgacgatcgcaccgacatcgcggcgatggcaaccatcagcaccatctcacagcccctgcgcggtgagttcatccgtaccgccgccaccgccggggcggtggtataccaggtggatgcccgtttaccggcgctgatcccggtgttctttgccgggcagctgagtgctgtccgcctttgcgccgtgatgaccctggtctccggaacctggtcctcactcaccggccttccggatgagcccgaaaatggtgaggctgctctgcccatgtcaccggagacggaataccagcgccggcgttacaccctgacgcttcagaatggccggagcggagaacgggtggaaagtgtgctgacggaagcgtcatcccgtctgcgtggggatctgctgagaaacctgattatcaccggtcttgccctccacacgacggcgccggaactgccgcgcctgctggccagtatgccggtaccgcccacctcggtcagtgagctgcaggctctggttcagcagatggccggcaccgctgacgtgaacagggctgcagctgcagtaccggatacgccggcagcatctgccgcgccggtgtccggggcggatacccgggaaataaagaaaaatatgcggcgtgcattcggtgactaa

SEQ ID NO: 244633 - DNA, 672 bp, Klebsiella pneumoniae
gtgccggacggccagtattctttctatctgcacagcgacgatcgcaccgacatcgcggcgatggcaaccatcagcaccatctcacagcccctgcgcggtgagttcatccgtaccgccgccaccgccggggcggtggtataccaggtggatgcccgtttaccggcgctgatcccggtgttctttgccgggcagctgagcgctgtccgcctttgcgccgtgatggccctggtctccggaacctggtcctcactcaccggccttccggatgagcccgaaaatggtgaggctgctctgcccatgtcaccggagacggaataccagcgccggcgttacaccctgacgcttcagaatggccggagtggggaacgggtggaaagtgtgctgacggaagcgtcatcccgtctgcgtggggatctgctgagaaacctgattatcaccggtcttgccctccacacgacggcgccggaactgccgcgcctgctggccagtatgccggtaccgcccacctcggtcagtgagctgcaggctctggttcagcagatggccggcaccgctgacgtgaacagggctgcagctgcagtaccggatacgccggcagcatctgccgcgccggtgtccggggcggatacccgggaaataaagaaaaatatgcggcgtgcattcggtgactaa

SEQ ID NO: 244634 - DNA, 663 bp, Klebsiella pneumoniae
atggttatgtcactgtttcattccgtgagcgacctgatcggtcatactcccctgctccagttgcacaaactggataccgggccctgcagtctgtttttaaaactggaaaatcagaaccccggcgggtcaattaaagatcgggttgcgctgtcgatgattaatgaagccgagcgccagggaaaactggcgcccgggggaacgattatcgaagccaccgccggcaacaccggtctcggcctggcgctgatcgcggcgcagaaaaattaccgcctgatcctggtggtgccggacaaaatgagccgcgagaaaatctttcatctgcgggcgctgggcgcgacggtgctgctcacccgctccgacttcaataaaggccacccggcctactaccaggattatgcccgccgccttgccgatgaaacgccgggcgccttttatatcgaccagtttaacaacgacgctaatccgctggcccatgccacctccactgcgccggagctttatcagcagctggagggcgacatcgacgccatcgtcgtcggcgtcggctccggcggcacgctgggtgggcttcaggcctggtttgctgagcactcgccgaaaacggaatctatggtcactcccgtttttgcaacaccgattttgacgacaagttggcttgcttga

SEQ ID NO: 244635 - DNA, 300 bp, Klebsiella pneumoniae
atggctaagacagcaaatcaacttattaaacaggcgtacgaaatagccaaaactatgccaccagcacaggcagcaatcatcagggaactggctaccgtcctcgatgtttcgaatgtagctctgcgccagacgcgcaccgaacgtgacgcccttctcgcagaggtcaaatcatgggcgaaagagtgtgatcgtctgaccgagcgacacaccaagaatcgcacaaatatgcatgttctagaggctatgcgcgatttgaaagcaatttgccccaccagcttccgtaacgtggaggctctctga

SEQ ID NO: 244636 - DNA, 432 bp, Klebsiella pneumoniae; identical to SEQ ID NO: 92438

SEQ ID NO: 244637 - DNA, 468 bp, Klebsiella pneumoniae
atgaccaccttctttacgctcgatggcgcaaccctgatggcactgatggctttctgcaccgcctgctccatagatggtgtacagggcaaggatgaatttggtcgtaaacaccagagttcgctggatggggtggaaaacgccattcagtttgaccttcgtgactggtggaaaccgacggctgataaccttttctcgcacatgaagctgccacacattgtacaggcactctctcaggccggactggctggcgcagcacaggacgccgcgaagatgaagaaaaaggatgccgctgaacatgcagagcacttcctctcaaaaatccgttgggttccggaatggatgaccagtgctggcaatcagaaacagcttgccgcaaagtctgaactcagtctggcaacaagtcagaacgataccgacgctgatgccggcgacgtcagcgaccataacaacccggcctgcgccgcctga

SEQ ID NO: 244638 - DNA, 540 bp, Klebsiella pneumoniae
atgctaaaagagcacaactggcatcaactcaaggacgatacggcgcagcgcctgaatcagctggccccgtattttcgtgacggcaaaattatcgacgccaaagatactgtcgccgcgctggaagccgttattcgaagcttcgatcgcgtcaatatcgagggtaataaccagaaacaggcggattttctctccgaatgcctgtgccagcttgatccgcaaaagatctccggcctgcatatggtgcagtcatccgtaccgttgtccagccatctggatttgtttgaaaagggcatcgctgaaaagctcgatttcgcctatgccgggccgcaggatggacgtctggcgaagctgatccaagacggtaagatcaagctcggggccatccatacctatctggagctgttcagccgctactttgtcgacctcacgccgcgcgtgtcgctaatcaccgcctttgaagcggataaagacggcaatctctacaccggctttaacaccgaagatactcctgttattaccgaagccacccacttccgctag

SEQ ID NO: 244639 - DNA, 717 bp, Klebsiella pneumoniae
atgtatctgggtatcgatctcggcacatcggaagtcaaagcgctggtcattgatgagaaccatgaggttatcgccagccatagcgcgccgctgagcattcagcggccccatccgcactggtcagaacaagcgccggagctatggtgggaggcgacggagtacctgatggccacgctacgggaaaaatgcgcgcagcattggccggccattaaggcgattggcctctccgggcagatgcacggcgcggtgttgctggatgcagagggggaggcgatccgtccagccattctgtggaacgacacccgctgcgccgcagagtgcgccgagctggaggcgatggcgccggagctgcatcaggtggcgggcaacctggcgatgccgggctttaccgcgccgaagctgttgtgggtgcgccgtcatgagccgcagcactttcagcgcaccgccacggtgctgttgccgaaggattatctgcgctaccggatgaccgggaagaaagtctccgatatgtcggacgccgccgggacgctgtggctggacgtggcgaagcgcgactggtccgacgctctgctggacaagtgcggcttgtcacgcagccaaatgccgaagctggtcgaaggctgcgaggtttccgccacccttgacccgcaggtggctgcccgctgggggcctgtctcttatacacatctgacgctgccgacgatatgcagtgtgtag

SEQ ID NO: 244640 - DNA, 438 bp, Klebsiella pneumoniae
gtgctggaagcgcctgcggcggaaaaccagcacggcgagatggaagcgggctggtatgacaccggggatatcgttaccttcgacgagcagggctatgtccgcattcagggccgcgcgaagcgcttcgccaaaatcgccggcgagatgatctccctcgagatggtggagcaggtggccctcggcgcgtcgccggacaaaatgcacgccacggcgattaaacaggacgccagcaaaggcgaggcgctggtgctgtttaccaccgataatgaactgactcgtgaagccctgctgcgctacgcccgccagcacggcgtaccggagctggcggtgccgcgagatatacgctggctgaaacagctaccggtgctcggcagcggcaagccagactatgtcaccctgaaaaatatggtcgacgaggcggaaacaacccatgagtga

SEQ ID NO: 244641 - DNA, 276 bp, Klebsiella pneumoniae
gtggcttccatctccatcagttgtccctcctgctcagctactgaaggcgtggtgcgtaacggtaaaagtactgccggacatcagcgctatctctgctctcactgccgtaaaacatggcagctacagttcacttacaccgcttctcaacccggtacgcatcagaaaatcattgatatggccatgaatggcgtcggatgtcgcgccagtgcacgcattatgggcgttggcctcaacacggttttacgtcacttaaaaaactcaggccgcagtcggtaa

SEQ ID NO: 244642 - DNA, 924 bp, Klebsiella pneumoniae
atgagccaaccgctacccaataaaaatctgccgatgccctctttacgcaatatccaggcttttattgaagtcgccgctaccggcagccttaatctggccgcagagaatctcaatattaccgcctcggcggtcagccatcagatagccagcctggagcactttctggggaaaaaactgttctcccgcagcagcaaaggcgtcacgttaacggcggtgggagaaaaatatctcaaagaggtctccggggcgctgaatatgattggccaggccaccagccaggtgatcaacgatatccatcaggattatttacgcattcattcggcgccgagcttcggcctgctatggctgatgccccgtctggataaattccgccaggcgtggccggcgttaaaaatcagcctgacctgttcatacgaaagcatccagttctcccgggataatattgatatcgatattcgtcacgggctgtcacagtggccgacgctgctggtcagaaccattaaaaatgagcgcgtcctgccctacagcgcagcgtcttatttagccagccatcctgtgcaggctgtggaagatctgctggcctgcgatctgattcactccgacagcaccttgattaactggagcaactggctgtcgtggcacaaggtccgcggctggcataaaaacttcatttttaatttcgaccggtcatatatgagcatcgaggcggccagaatggggatgggcgtgatcctcgagagcaatctgctggccggcggacacgtgcgccaggggcagctgacgccggtatttgccgacgagcggagcatgccggtcggcgcgcaccacttcgtcctcccccacgctaatgaacagaaggagaaggtccagcgcttcttcgcctgggtcgccggagagctgaaagaggaagggttccatatttga

SEQ ID NO: 244643 - DNA, 315 bp, Klebsiella pneumoniae; identical to SEQ ID NO: 220408

SEQ ID NO: 244644 - DNA, 483 bp, Klebsiella pneumoniae
atgacagccgaagccattctggcgctggtgaaaaagctctggctgccggctttcattgctgtgctgattggcgcgctggctatcactgccagccactacaaaggcaaagccgagagcgagactaaaagggctgatgaggcaaagcgcagcctcaacctggctaacgccaccattaccgacatgcaaacccgtcagcgcgatgtcgctgcgctggatgccaaatacaccggagaactggcaaatgctaaagccactatcgatcagcttgagcgtgatgttgcttctggtaagcgtcggttgcagctcaacgcaaaatgtcccgcgaacggaacgaccgcaaccggcggcgtgggcgatgcttccgccccccgacttactgactccgctgagcgggattatttcaccctcagagagcgaatcgacaccatcaccgggcaagtgaattatttacaggactacatccgcacgcagtgcctgaaataa

SEQ ID NO: 244645 - DNA, 162 bp, Klebsiella pneumoniae
atggctactcataaagaagaaaatattaagctggctgaaattgccgcagagattacaaaagaattaatcaaggcaaatcctaaagtctttgataagtatccagcagcgattaatgcgtttaaaggcatttttgatgcagtttctgagaaagttggtaagtag

SEQ ID NO: 244646 - DNA, 507 bp, Klebsiella pneumoniae; identical to SEQ ID NO: 225781

SEQ ID NO: 244647 - DNA, 429 bp, Klebsiella pneumoniae
atgcagtatgtgaatacatgcccggtcctgaatgttgaggagtccgaccgcctgtcttttatgccgtacctgttcggcacggatttcatgctcgcggaattacaggtgtacgctctggccaaaaaatggatgcccggctatgagggcggcttctggcattttattcgcctgccggaggggggcggctacatgatgccggattgtggccgggtacatctggtcagtagcgaaaactggtttgatcgcactgtcagcgccgacgcggcgggcattattctgaccagcctggcgattaatcgccgtctggcggcccatcatgacagcagtaacccggcgctgacccgcctttatatgctgcgtgatgcccagctctggaatcacatcacctttcaccccgaatgcagtgctatttacgccgcgctggactga

SEQ ID NO: 244648 - DNA, 420 bp, Klebsiella pneumoniae; identical to SEQ ID NO: 92447

SEQ ID NO: 244649 - DNA, 222 bp, Klebsiella pneumoniae; identical to SEQ ID NO: 92446

SEQ ID NO: 244650 - DNA, 729 bp, Klebsiella pneumoniae
atgaagaatatcaacattatgtggaatgccctgtccaaaaaccggctctttgatgacaacaaggagctgaaggaattcgtcatgaccctgaccgggacgctgatttttggtgagaacagtgaaattaccccgctgccggcacgcaccaccgaccaggatctgattaaagccatgatggagggcggcacggcgaaaatctaccactgcaatgattcggataagtgcctgaaggtggtggccgatgccagcgtgacgatttctgacaagaaggcgttgaaaaatcagatatcagctctgctgagcagtatccagaacaaggccgtagaggacgtcgcattgacggagcaggagaaagggtttatctccagcaccaccatcccggtgttcaaatacctggtcgatccgcagatgctcggggtgtctaactcacttatttaccagctgacggactatatcggctacgacatcctgctgcagtacattcaggaacttatccagcaggcccgggcgatgatctcaaccggtaattatccccagtcgacaatggatatgatcatggaaaacctcaaccaggcgagtgtccagattgccgctttccagtcccgcgttcaggtccagcaggacgccttgcttgtggttgacagacaaatgagttacatgcgccagcaggtctctgcccgcatgatgacccgctaccagaataactatcattttggggggaatcagtaa

SEQ ID NO: 244651 - DNA, 717 bp, Klebsiella pneumoniae
atgttgcgtatgtatcctgctcgcaataaaagtggcttcgcacagcttatacgccattgcggctggggctcaccagatgttgaacgtgcgctctggagtgtgaaaaatagtctgacactggtagctgaagacagcttgtacccctatcgtaagactcgcgacggtattaaaactcgtgacttgaatttacatgcgctaccttggccactggaacagctccaggagttacaggatacgcaggtagagctcagggttacattgtcttatttcatcgaacctaacccttcagcacgggggagttcatcaagatatcattacccatcccaccgtctacgctttgcgatgaaaagacaaacagaatctttagacgaatttaaaactcgcatcaatgcagcagctgagtctgaagagagtgagcatgggactaccggtaacgatgataactggtcattaggtgctactcaacgacataaagggtcgttgcatcaggatatatggcggggggcagcagcagagcttgctagttgtggttatttggctgtttatcctgcacaaggttggtggagaaccagaggcgctttgcaacgatttgattctgaagctaaatacagtctggttgtatcgattcatgcacccgaagcagacgtagacctttatgccgcagtggaaaccttggtcgaaaatatggttgaaaatcctgttgaaataatgggttag

SEQ ID NO: 244652 - DNA, 486 bp, Klebsiella pneumoniae; identical to SEQ ID NO: 204905

SEQ ID NO: 244653 - DNA, 528 bp, Klebsiella pneumoniae; identical to SEQ ID NO: 14800

SEQ ID NO: 244654 - DNA, 210 bp, Klebsiella pneumoniae
atgaatgatttcctgcaaactaacactatcagcttcattattacgaaaaatcttaaattactcttcctcagcatcttcatcaggaaaaaaatttcgcatggcttcctgaacatcctcctggatattcagaaccatactcttccattgccaccggggatcatctttaacatgaggactcaggcactcaatacccagaattttattcactga

SEQ ID NO: 244655 - DNA, 639 bp, Klebsiella pneumoniae; identical to SEQ ID NO: 213941

SEQ ID NO: 244656 - DNA, 993 bp, Klebsiella pneumoniae
gtgaaaaccctgacgcttttcctgagtgccctgatgttgtgggggtacagcctcagtgcggctgctgacccctcctgtgagggccggtttgttaacccgatcaccgatgtgtgctggcgctgcatcttccctctgtcgctcggcagcgtgcaggttggtaaaggcgatctgcctgataccagcaatcccggtaatcccctgcagctgtgtccggcgccgccaccgctttttgttcgccccggtctggccatcgggtactgggagccgatggccatgacggacgtcagccgttcgccaggttgcatggtcaatctggggggcttcagtatcaatctcggcaagaccggcatgggaaccgcgagaaaggacgataagcaggtgaacggcgccttctatcacgttcactggtacaagtacccgctgacgtactggctgaacatcatcacgtcggcaggctgtctggaaggcggagacatggatattgcctatctgtccgagattgacccgacctgggtggacagcagcctcaccaccatcctgaatccggaagccatcctgtttgccaaccccatcgcacagggggcgtgcgcggctgacgctatggccagcgcgtttcatatgccactcgatattctgttctggtgtgccggctctcagggttcgatgtacccgtttagcggctgggtaagcaacgagtccagtccgctgcagtcctcgttacttgtcagcgagcgcatggcgtacaagcttcaccggcagggacaaattatggagagcatcgggaaggacaaggcggtctgctatgagtatccgtctccgatcatccccaaagagcgctggcgctatcagatggtgaacatgtacccggacagcggccagtgccatcccgtggggcgcagcgtgatgcgctgggaggccggtaaaaatccacccaacacccgtaagaactatggctatctgatgtggcgtaaacgcaattgtgtctttctctga

SEQ ID NO: 244657 - DNA, 390 bp, Klebsiella pneumoniae
atgactattactgagattactctcgcagcattaattgttgttcagtggcttacggtggttcgacaaaataaagaaattaaccaccgacgtgaatgtgaaaggcttctgaaagaaaaaattgacgattatgaattacagaatagtcggtattgtcggtatgttgaaggcaaagcaagtcatctcatcagcgatatggaaaaggatttggatgagctttttcttttaaaaccacatgatgaggactcgttctggcggaaggtttacagactggagtttatttccaacgtgctgaaggatttcgctaagggacaggatttaaaaaagcagaaagaaataatcgatggtgtaaacaacatctgggaaaaatacaggggaagggataatcaatga

SEQ ID NO: 244658 - DNA, 687 bp, Klebsiella pneumoniae
gtggcgctgccggcatttgataaaaacgggaaagccgccggtatctggctcagcccgctgaccgatcgggacggacggctggaggctatcggcggagagggacgaattatgggcaatgaagacgcccggttcgtggcgctgcagaacagccgcaacggtgaaagcctgctggccgggaatatgggggagggcgtcagaatggcccgcgacaatcccgataccggggtggtggtgcggctggccggtgatgaccgcccctggaaccccggggccatgaccggtgggcgggtatgggctgaaccggcgccggtggctccggtaccgcaggccggggctgacattatcctcccgccagaggtactggcacagcgggcggcagaagaacagcagcgccgggaaatggaaaaacaggcggaacagactgcccgggaagtggccggggaggcgcgtaaagccggcgagccggcggaccgggtgaaagaggttatcggggacgtcattcgcggactggagcgtgaccggccgggtacggagaaaacgacgctaccggatgatcctcagttccggcgccaggaggcggcgattcagcaggtggcctcagaacgtctgcagcgtgagcgtctgcaggctgtggagcgtgacatggttcgtgaccttaaccgcgagaaaacactcgggggcgactga

SEQ ID NO: 244659 - DNA, 381 bp, Klebsiella pneumoniae
atgtttaaccctgataaatacctttcagtcacctggctgaagggcgggcgctcatggccggatctcgactgctttggcattgtgaacgagatacgccgggatttgggcttgcctctctggcctgattttgccggggtcacgaaagacgacggcggcctcgaccgggaggcgcgtcaaatgatgcttaccctggagcgctgcgacccctgcgaaggggctggcgtggcctgctattccggctcagccgtcacccatgtggggattgtcgtcagtattgatggcctgctgcatgtggcggaatgcaatccaggctctaacgtaacgtttctgccgttagcgcggtttaagcggcgatttgtcaaagtggagttctggcaatga

SEQ ID NO: 244660 - DNA, 240 bp, Klebsiella pneumoniae; identical to SEQ ID NO: 236649

SEQ ID NO: 244661 - DNA, 771 bp, Klebsiella pneumoniae
atgcttatcgagggggcagatgccaacgcgtctgttaccgggaatgaatcaactgtaccgatgcagttgcgtatcactggtcgcgtggaaatgccaaacagcaaaacctacgacctgacagggtgttttgtgggccttgaagcctggggcgatgtctccagcgaacgcgccattgtccgtacccgcaatatcagctgtatcaaaggtgataaaaccatcgatcagcccattaacggccacgtttcctttatggggaaaaacggggttaagggagaggtggtgatgcgtaacggaaaaatcctcggctgggcatggggggccggttttgttgacgggattggtcagggcatggaacgggcttcacagccggctgttggcctgggggcaaccgcatctgttggcgccggtgacgttctgaaaatgggggtcggcggtggtgcatctaaagctgcgcagacgctgagcgagtactacatcaaaagggccgagcagtatcacccggtcattccgattggtgccggcaacgaagtgaccgtcgtgttccaggatggattccagctgaaaacgattgaagagctggaagcggaaaagaacgggcaacagcaggctcagaatcaggaggcggagccggcaccgcaggctgatgcccatcatcagtcaggcggcggtatgaacggattcaatactgacgagatgctgaagaagctgggcaaacttgatccgcgtgagttctctccgggcgcagcgccgcagggggaaaataatggctaa

SEQ ID NO: 244662 - DNA, 414 bp, Klebsiella pneumoniae
atgttattcagtgcaccgtttgcggtttcacagaatcaggccgacgcctcttatattgaacagctggggctgagttttattgcgctgcgcctaaatgtcacaccagaaacggttgatgcccagcatcagcaactgctccggtatgtattacccgcctcgcagaacagccttaaggtccagttggctgaagatgcgaagcggataaaagacaataatgtgaactccactttttatatgacctctgcccgtgcgtacccggctgagaaccgcgttgatttccgtggagagctgaaaacgtggattggggattcgaagccctacagcgaaattaaaacttatgtcctgcagttttaccgtgttgatggtgtcagctggctggcacggtttggagaagtaaataatgaaaaaaattaa

SEQ ID NO: 244663 - DNA, 312 bp, Klebsiella pneumoniae; identical to SEQ ID NO: 181259

SEQ ID NO: 244664 - DNA, 165 bp, Klebsiella pneumoniae; identical to SEQ ID NO: 39929

SEQ ID NO: 244665 - DNA, 276 bp, Klebsiella pneumoniae
atgaataatgcccagattgaaatgttcagtgttatggtacaaacggggaatattcatcatacagcacaacgttttggtatcgatgccgcgtccattaccaccagtatttgtgcgctggaaaacgagattggttttaatctcatcgtgcgagggaaaaatatcaggaaggtaatattaacggaaaagggaaaggctttttacaaactcacgccagagatcctttgtatcctgaatgctatcgccacgattcgttgcgcccagaacctggttgaataa

SEQ ID NO: 244666 - DNA, 1059 bp, Klebsiella pneumoniae
atgtcagaaaatagaaaatctgttaatggtatacagtatctaagagcttatgccgcaatattggtggtattgaaccacttttgcaataacatttattttctttctgaaaaactgatgctggataagataggagggtttggggttgacatatttttcattataagtggctttatcatggcttatacactgagcgattttaacaacacctcaaataaatctgccgctatttcttttataaaaagaagaatactccgcatttacccaatatatcttattatattagtgccaattgttctcatgtactttttaaaagtatatttaaaagtaacagacttttcattatactctcttattgggagtattttgttaataccagactttacaagcaatccacattaccatatgcttcttcagccagcatggacattagtttatgaaatgtttttttatttaacgctatctctaacaatattattttcaaaaaataaagcatcatccatcattaattactcagtaattttgtttgtagcaatagcgttagtacacctttttaacctacaaggtaataggttagggtgggttaatatgcattatatgattggcgacccgatttttttggacttcatccttggctttgtattatatagcatacataagagttctttaagcataaacatccctacatggacaatgtttccattattagccacactcacaattattgcgatgtatttagcaagccttgggcttcctcgtattatttgctttggattgacatcctttgtcatagtttcaatcttcactcttaatgaaccaatgaaaaaaagtaaaaataaaaaattactttttctcggagcagcatcatacgctatttacctaacacacccgttactatttccttttcacataatgttaaacaatcactttccctggatgttcaagtatgggtttttagattttttatttgcaatagttgcaatattaatcggttgcttcacccacaataaaatcgaaattaaaattgacaactatataaaaacaaagcaacacaaatcctaa

SEQ ID NO: 244667 - DNA, 195 bp, Klebsiella pneumoniae
atgtacgtttataaattgtctgaaggtggaacggatttttacaccgtcaccacaacagagagttcagagtatggcgaactggccgggatgctggaaacagatgaaaccaataccggcgttattcttgagcgagtgtacgacagtttcgccgctggaaagtcagaaaatcagtgctcgataatatttgtcttgtag

SEQ ID NO: 244668 - DNA, 165 bp, Klebsiella pneumoniae
atggcactaacaaatgaacgccttttaaatagcttaaggcacaaccgtaaattgcttgatgagatttatcagtcaggaaaatcgcagtattacaataccgacattattcatgatgccatcgactcaattcttgatgagctcaggcgacgtggattccctgtctaa

SEQ ID NO: 244669 - DNA, 372 bp, Klebsiella pneumoniae
atgaagactggtacgcaaaccgcgaatagcttcaattgccagatccgcagggttatcaacagccagaaagtcgggaatttcatcaacaatctttctgctccacctttttttctgcactacatttttcgtaaatgtttctgcaaccgggatacttgcataaacgttaataccaagctcttcaagttgctcgggtgtttcaatgcctcgacgcagaaaaactctaagcaatacaatactagcagaaatgattgtgcccaatataataccgatcagaacaacaagtactttcttgggtttgactggcttgggttgggtcacggcattatcaataatacgcacattaccaatggcgctggattttgctatgcttaa

SEQ ID NO: 244670 - DNA, 741 bp, Klebsiella pneumoniae
gtgactaagatgacaggactagatgcgttttataacgagtcagaagataaaatctggtttggtaatctgatcagcgaactggcaaggctaaacaatgaaaatgaaagaatgatagctgccgctatcttaagtaactacagattcagcaaggctaaacccgatactttaggggggctgggcttttatcagttcgattgggtatcaggttttacaactaatgaagactttgaaaagcagtgtgtggagtttttaggtcttctggctatggggcatgaatacagggagagcccgataccgggggaagaagggactttcaacgttaggaaaggagaagactttttatatcacgatgatgaggatgattggtatgggtcttacgattcgttttatttcaggcgctccgagttggtgaacttcttccccgaactggaagatgacaacattgatgaaccgatagcagaggaaacagaaagtgggtcgatccccagtgactggcgcggcaaaaacaccgcctggaaaatgattgctgggctggcgattgctttatatgaatccagcgaggacgttagaaagaatggaaagctcaaccaatccgcggtgtgcgagaaagcagcaaataacatcgcaaagtacagtgaagaatacaatgatgctggcatgaccatggataatctaagaacgcttctaaaaaagactttgcagcggcacgcacccaattttttgggaaagataacaaagtaa

SEQ ID NO: 244671 - DNA, 1413 bp, Klebsiella pneumoniae
atgtcttatgcgttgattgataatgcttcgttaacagcagtcgaaagaacactgggtgatattcttgttaagaatccagatactattaacggagatctagtcgcttttgaaaatcttattcaagcgatacttttttacgataccctgatctgtgtagataattataaaaaagaatatagagataaacgcattgctaaatttgactttattaaatttgtatctgaaagtgattttcaactcagtgaacttgatcagttagcacaagttgaatctcggcaaatcactcccgaaattagaggtggggagtttgttgacgatgattttaggcaacttgtagagatgcttaagctgaatatgatttgcacatgggatcttcggtctagcgtgtattacttaacaatgaaaatgcttggtcagcccggtactcctgaatatgcgaaatatagtgaactaagtgcatcgatttttaatgaattatcagatgcttctgatacgaaagggtactggtcaaccaatgtgaagctagtgagttcatctggacatgaatatactgagcgtgaatttgaactagaaagggaaaaatctactcgcggtaaaggaggtatgactcgttcacttgaaatgtttatcgcatcgctaaattggctggcatataaatctatttattacagcgtcattgctaagcattttaaagcagactcatttattcatccaataaggcatgcatatcaattgcattggatgaaaaaaacaggtgcttttggtcatgattatacagcaaggttggtgcaatcgttgtctgataaaatcagtactgcaagatctgaaattgtagatcatggacgcacatctactatttcattagatttaccaatattttctgcatggctagcaaacgaaacaggaaatgtctctcaagttatcaattcagctttagagcttagaacacatgatcattttcgtacgtgtcgagatgtaatccgagagattcatgtgacctacgatgaatcggggataagtgcaggaaataaaaaagtaacaaaattactaagtgatttagataaaatatctggagatattaaacgaagctacggtgttccatcaaatcaaggtattcaaggcagttttttgataaaatgtataaattcattgacaggactcgtgggtattccaggtttgcctgataaagagtttgcactgagcactcctgaatttatgaagtctaaacaacataaagcattttctaccgttttcaaggatgttactaacgaactaacaagcattgaacgtttaggtgggcttcgggataaattagcgtcgaactttactattgatgattcttattataccgagccaaaaacagaggatccgagattccgttacgtaagtagtaattggaagcagccaatgtag

SEQ ID NO: 244672 - DNA, 177 bp, Klebsiella pneumoniae
atggaaaaagacctgaaagagttgcgggaatacctattactttcccccgtctatcctgaaattaacgattgtttggctagtctctcaatggaagacgtgaccaatgaagagttcgcggaacgtttgggaattgctcctgattggatggatgctatagatactagccaacttgcttaa

SEQ ID NO: 244673 - DNA, 642 bp, Klebsiella pneumoniae
atgagcatggttgaatttagcgcggtggcgaaaaacttcggcgccactcaggtgctgcacgatatcaatttaaagattgaagcgggcgaggtggtggtggcgggcatgcatattacggatccgcacgcgaatgagtgtgatattcgccgcgaagccggtatggtgtttcaacagtttcatttgttcccgcatctgaccgccctggagaatgtcatgttcggtccgcttcgcgtgcgcaagcagagcaaggccacagcgcgggagcaggcgctggcgttgctggatcgcgtggggctgcgtgaacgcgctaaccactatcctgccgagctctcgggcggtcagcagcagcgtgtggcgatagctcgcgccctggcggtgaaacccaaaatgatgttatttgatgagccaacatccgccctcgatcctgaactgcggcatgaggtgttaaaggtcatgcgctcgctggccgaagagggcatgacgatggtgattgtgacccatgagattggctttgccagagaggtggcttcccggttgatttttattgatggcggcactattgccgaagatggttcacctgaggcgctgctcacggccagcagcaatccgcgtctgcaagagtttttgcaacacgtatcctga

SEQ ID NO: 244674 - DNA, 1137 bp, Klebsiella pneumoniae
atgaaaagaaaagtactggctctcatggttccggcattattaatggccaatgccgttaatgccgcggaaatctataacaacaacggcaacaaactggacctttacgggaaagtcgccggcctgcactatttctcagacgacacttcagaggacggcgatcagacctatgcacgctttggcatcaaaggcgaaacgcagatcgcttccgagttaaccggctacggtcagtgggaatacaatatcaaggccaataccagcgaaaatgaaggagcgaattcctggacccgtctggccttcgccggtctgaagtttgctgactatggctcactggactatggccgtaattacggcgtggtgtacgacatcgaatcctggactgatatgctgccagaattcggcggcgatacctacacccagaccgacgtctacatgaccggccgcaccaacggggtggccacctaccgtaacagcgatttcttcggcctcgtcgacggcctgcatttcgccctgcagtatcagggtaataatgaaaacgccggttctggcgaaggcactaacaacggtggtgctcgtaaactggcgcgggaaaatggcgacgggtttggtatctccagctactacgatctcgatatgggcatcagcttcggggccgcctactcatcttccgaccgtacccataaccagctggcggcagcacgtagcagccatatttatgccaacggtgataaagccgacgcctggaccgtcggcgccaaatatgacgccaacaacatctatctggccgccatgtatgcggaaacccgcaacatgaccttctacggcaacggcgctattgccaacaagacgcagaactttgaagtcgtcgcccagtaccagttcgatgagtataatttaccgctgcgtccgtctgtggcctatctgcaatcaaagggtaaagatctctactcctcttctcgcttcggcgacaaggatctggtcaagtatgtcgacatcggcatgacctactacttcaataaaaatatgtccacctatgtggattataaaatcaacctgctggatgaagacgaccgcttctacagcaacaacggtatctcgaccgatgatatcgtggccctcggtctggtttaccagttctga

SEQ ID NO: 244675 - DNA, 150 bp, Klebsiella pneumoniae
atgttagccacagaaaccttatacacgccctataatggtgccgtcctgctggaaaacccgttattaaataaaggcctcgcgtttacggaaagcgaacgcacagcgtttaatcttcagggactgttaccgcacaatgtggaaaccatttaa

SEQ ID NO: 244676 - DNA, 294 bp, Klebsiella pneumoniae
atgaagacaaattctaaccaacgtatcactcagccctctaaatatgagatttttgttgaagcgaaagatccgcgctggcctgtcgacagggataatcttcatcgcgcctggcgctgtgaagtgcagcggcacagccagttttacaccctgtcattcaatgagggctggtttccggaccgcgatccgcaggtcatggctcgccagtgcgctccggtgagcgatcttaacgcactcagcgacacggcaatcatgattgctcgcccgatcgcccctctccctggtgaggtagcctaa

SEQ ID NO: 244677 - DNA, 960 bp, Klebsiella pneumoniae
atggagtcgctgggggtgagctatagcaataccctgggtcgcatttcttacttcattaactactcctacagccgaaatgtgcagagcacaggccagaacagcgatagctctccgaccagcgataatatgatatcgcttacgatgagcatgccttttggcgcggatatatcggctaactacaacctgaacagcagccggacgggcgacacgacccatagcctggggttgagcggttctgcgtttgcggaccgttctctgaactggaacgtgcaggaaggctacaacgccagcgataaaagtatctctggaaacgtcaatctgaactatcagggttcccggggcgaagtcgccgccggatacgggtatgacagctatagctcgcactacaattactcgcttcgcggcgggatggttgcccattctggcggggtaaccctttctcgctatctgggcgagagcgtggcgctggtcgaagcgccgggcgtcagcgatgtggcagttcgggggcagacgaatattacgaccgatgcttttggatacgccgttgtgccttttgtacgcccctaccatgaaaacaatctctctcttgatgagcagcaggtctctggtgcggaaattgataacattgtcagaaaggtagtcccgacgcgaaatgcgattgttaaagtcaaatatgatacctggatcggctataaggccatggtcaccatcaactacaaaaataaagcggtgccttttggcgccgtggtgacgcttgaggatgaaaatctgaatgataaagagcgtcgtagttcgattgtcggcgatgccgggcaagtctatattaccgggttacccaaaaaaggccggctatttgtgaagtggggtgatacgcaaaatagccagtgttatctcaattatgatttttcatctgatcagtcagtggatgatatcgttttttatgcagagaattgccgatga

SEQ ID NO: 244678 - DNA, 411 bp, Klebsiella pneumoniae
atggttgaggttgaggaaataaaaaagaagtatcccggcgcagatgcctggcaaatgggtgacagtccggagctggctaacgagcttgctgacctgatcaaaaaagggatcaaaacggcctcttgcggatcttttgcctcttaccagcaggaaaaatctgccccgaggatagggagttataacattattcttgatggccagaatgttccagtttgcgtgatcagactggtttcgatgcagctggttcgtttttgtgatgtcactgaagcattcgcccgcaaagaaggtgaaggcgatttaagccttgaatactggaagagagagcatcagagatttttcagctccgaaggtcatttttctgaagatatggagttgatcgcagaagaatttgaagtggtggaggtgctgtga

SEQ ID NO: 244679 - DNA, 777 bp, Klebsiella pneumoniae
atgggcgtagcgattattgataaaacagcattgtttgacccggctaattcattagggaaaattgttccggtgatgaatgggcttacagcaatacatttcgacggaaaatcaaagggaattaatcagaaaattaacggcagttcatttacagtcattggctcaccagttaatgaaaataattatgtaactgattatacagaactggcacacatcaaaactcaacttccctgcactgccgaagggacgattatcgtgattgcccgtctttttaaaaattccagtagcatcaacagcaccctgcttggatggtatgaaaactccggaagtcgtggtgtcagtttaatcaatgcgacaggggggttgttgttgctgagttgttctacggttgccagcgatggagtgactaaaacaacccgaaacgcacaacttgatttgtcaggttttacctctgatacaactccggggacggggcgctgggcggctatcgccgggcggtggtacaaaaacagcagcggtattttcaccctgaatcttaacaacctgactgaaaatacctcaaaccaggttactgccccggctggaagtactctggtaacagatacactgagcaatcccatgctaattggctcagggtatgtttctacggggcagggtggaggcagcaaagcaatgggcggcagtcttgtgtatgaccgttcgctgagcgatgacgaactacagttgatgtatagcgggtatctgaagggttatttctctcgccgaggcattactgtctga

SEQ ID NO: 244680 - DNA, 1098 bp, Klebsiella pneumoniae
atgaatgagcaaacaatcaatttattgaaggacataacagagcgtttgggctggaagcaaactaaaaagattgtaggagaacctttgggagtgacatcagtaggacttgatctgtttattaaaaggttacagggtactgaagaagcccaacaagtaagagttgctgagcatattgacagcgtttggcataacttgctactaagtggcacacgcttggtcaagctgtacaaattacaaccagatgagattcaaacccttcgtactgctattgcatctatcgagagagatgattccttatttagtcagaactacccctatcctctgtctagagaacaactgcttacagcggatacagatctgcactttcttgaaactacctcattaagcttaaatcaggtctctatagagacaaccatacttacctctaaagcatattatactgaaacgatcgagttggatgcgtcgcacctaagtgactctggcttagtgcttcgttctaacggcggagagatcaagtgtaagactagagaagtaacgcaatgtttcaatacagtgatgatactgcctgaattacaattagttgcgcttacaatcgatttgtcagttatgcctcgttcagaatcggaacggcagcaatttttacttgatcaattcgtgagaaatgcttctggtatcacattcccatcgcctttagatctctttggtttagtgcaagaaatgtacgaacaggcagatggaagaatctctcaaatggcgtttcttacctccgatggtaacacaagctctttgaagttgcgtcctggtgaaagttgtttacgtacagacagttatcatcatggtggagaagaagccagtcctatcttaacaaaatataagctgggtaaaatttgggatctggccgattcatcttcacggagttacactgtagaattagttttacctggtaaacgggctatgattgataagccaaattcgcatctttatgacgctatcatcgataggtgttcatcggttgaacacattgtttttattatcaataagatgctggattcattagcgagcatacaaagaaaacggggcgcagctgaagctgcataa

SEQ ID NO: 244681 - DNA, 636 bp, Klebsiella pneumoniae
atgagtgaatctaatttctctttagcctctttagaggctctcagtcaagttgatcctgaaattaatgggtttctcaagcgaaagtttgcggctactaatgttgatttcgtcaagcagctttatattgatttggatgaagcaatgtatgtgcttgaaactcaaaagcatatgtaccaagaaaccaagtggggtgaagatgaactaacctctgtgataatagctttcctaaaaggccgcaattatgacgcagaacatgatacgcagcacggcggacacatcgacattttggtgaaacaccaacttgggcggtttgcatggatcggagaagctaagttatggaatggcccagcttacatctttggaggctggaatcaacttaatgagcgatatggaacaggaacggttagagacaatcacggtggtatcatcatatatgtaaaacaaagacattcaggtgataaattttcttcttggcgtaagcatttaagtgaaaatgtagcaggagcaactataatccctgatgatacgaattcactccgtttttctagtgaaacagtgcatccagcgacaagtcagccatattttgttaggcatatggctgtatctttgtttcatgcaacaggggattctgattag

SEQ ID NO: 244682 - DNA, 264 bp, Klebsiella pneumoniae
atgcatgatgaaggggtcatcctgaagacagtgttgaatttcacttgcattgtctcctttaaaaagtatgtagccgccggcatgattgctgagggggccagcaaaaaggattttgccttctttaaaacccctgaccagccattgcttatgtgcgtcaagatgagcagaaattgcatcgggttgtgtcaggtaagtcagtgtaacggcctacagcatggttcattccttagcggcaaaaatcgcattaatggcctgtggaattaa

SEQ ID NO: 244683 - DNA, 1650 bp, Klebsiella pneumoniae
atgagcgcaatcacattacgtaaagcgttgggtgtacttgcgaagtcatcttcgttttccgtcaccaccgtgacacaccgtcagaaggatgagttcgatcagttaaaggaacaactctttgttaaacaagaaattgaaaccgaattacaacgctatctggatgttgctaaacccggtgaaatcatttttttgtgcggcagtagcggggatggaaagtccgaaattttaacccgctgtcagtcagatccgcgttatcagcggcgatttattttccatctggatgccactcatagctttgcccctcgacaatcagccattgatgctttgaatgaattatttgctaatcatcatcagcagtcatctccattgctcattggcatcaataccggaatgctcgctaactttgcccgagaaggtgctgaatgccacagggtgatccggtctgcaattgactcatttttatcagggcagcaggatgcaagccgtccttaccgtaacgagaattgttctttttttgattttgaacattaccctaaattccagtttgacgaaaataaacaatattcatcatttattaagacattattagataatttaactcgggatgatgataataatttatttcagtttatttttcggcgcgatgagtcaattaatccggatctaaaagaggtcgcaaactttaaattgctttgcatgccaggcgtgcagaatgtattaattacgcagctttttaaagcgcggctaattaaagatcaatttgtaacgacccgaacgctgctggattttttgcatcatctgctgatggggcctggctacttgtttgataacctcttcaccggtgcagaaaatgatctgattaaaaaagtttccgattttgatcccgccagattgcacacttatgaacttgatcagtttattttgcgctatgaactgagactggttgatgctgaactcgatgattttttagccgcacttgagccgttacacattaagtttgatcgccagtgcgttaagcctggtgacgcaacctcgttgatccggcttttttggctattgcagcatgagtcgttgggtaatgattatcatcggagattttccgcgttttttaaagaatcgttgtttgaacattactcagaaatctggcatttacatagaaattacacagcaggtctggagcaaaaaagatcattgaatcgcttttacacctctgaacttatcgctggtatccagcgctatgcaaaccgtaaagcgccggagttgagtaagcataaagaagaattttttttgggagagtttggcggggttaaaataactgcgccagtagcgctgaagcctgactgggacgctatccgtagtaaacatactgctcatcctactggcttcgatgttcatttaaaagtgggtgaggatccattaccccccatccgtatcggacttaacctattcgaattattgaaaaagttaaataatggttatcgtccgaataaatacgataaaaatgctattgttctattagacggaattattgatttagtttctgataagatcaagctcagcactgagataagattttatgatggtatgcgccgagtttatagtgcaagattggatgacgatatgatctctattagcggaatggaggggtaa

SEQ ID NO: 244684 - DNA, 1341 bp, Klebsiella pneumoniae
atgtatcctatttcagagatcttggaagtaaggaaaaataatccacaacctagctatctgcctatacgaaataaaaataataatattaactggcaaatagtgaccggtttggtactaagttattccttgaaacataaaatcgaagagtcttacgggattgaacaattcagagatgattgcaaagcccattttgaaaaaataatcgatgaaccagatttctgggccgtcttggaacgaatgtatttttcgaaccacgatatttttcgtgtttctcctatgtttttattgtttcaatcccagtttaacaataaaagcataaactctggttcagcagccgataagcgtcttggagctctcttcgctaatttgatgggggattttaatctcaactatccaatgccggataagctgaattttatcgaaaagcaacttttgaataagcttgatgaaaaagtatatgagttttctggtgaaagtccatttaccaaagaacaatcttatcttccctttattgcgaaatgttttcagtccgatttggcatttctagcagaatatccacaatatcttctacaggaactagccaatactttgcgattgtatgcttttagctggtgcgctcaacttgcgctcaatctagacaattggcaaaagggggagccgcaaagcaaatcactttttttcatccttgactcggaaaaagccagtgcagaacgggaaggtgtgcaaacctatggttataagctttttgctcggcatagtaaaaatcttttcccgatgctctctgcgctggaagttttacagtggaatgataaaaagcacaaagggcaacccaaacgcccgctatggcaggtttatcaagattgtctcaattactcagattcatcaaaggtactaaattcgcttaacaattacttgcaggagtttattgtcgagcgcgaacttcaagtttatgaacgagctgcaaacttggatgaggcctttaagcagctaaaatcagttgctgttggacagtttcagaataaaaggtctgatagagcaagagtgaaccgagactacattaatgagcttgagagccagatttgcactgacttcattcaggtccgtggtcgggcagggaaagtgttggtgctgaatcaggatcgtcttctgttactgaccaatctcaccataggcaaaaatgacaaactccgcctgcacgaactgctgcgtggttttgaacagcgaggtttttatctggataaccagtcggcgcaaacgttggtcgcgttttatgaacgcatgggaaatgtagagcgaatgagtgatagtggagacgccgtgtatgtccgtaaaacagtatga

SEQ ID NO: 244685 - DNA, 5079 bp, Klebsiella pneumoniae; identical to SEQ ID NO: 95884

SEQ ID NO: 244686 - DNA, 492 bp, Klebsiella pneumoniae
atgagtgatgactctaatactattacatcaagtgacagttacattaagtctactgggataagatgtgtaaatgctatgtgtactctttctttctggcgagagtttattgcatattttatcttgggaagtatggggctatggcttcctccttttttaggggcttctggcgcgaatgcagtttttgatccaatgaatgttttaacatttggtcttgtgacattgtttataatattagaagcaaggctttttatggataaaaatgatgatgctaaatctcctggagtaactaaattaatagttttgctaggtgtgatattattgtgcatcggatatgttaaaggtgttgttacaaatgggactccattattctgggggatgggttgggtacatatctctttgttttttacaatgttagtttggctgcttaaccatgttaatacatcaagatatgatccaaaaggtattaatgagatgcttggggggagcgtatga

SEQ ID NO: 244687 - DNA, 1212 bp, Klebsiella pneumoniae; identical to SEQ ID NO: 95886

SEQ ID NO: 244688 - DNA, 2010 bp, Klebsiella pneumoniae
gtgctcattaagcaactggtattacataattttcgcgtattttgcggcacacacaccatcgatctggctcccagaaagcgcccgcatgaagtaaaccctcgcccgattgtgctatttggtggtttaaatggtgcagggaaaacatctattttgtcggcaattcggctggcgctgtatgggcgtttagcatttggcccggcaatgcagcagcaggagtatgttgaacaactcggtgcgctggtacacaacgggacgtatacagcagagcgcccggatgaggccgcagtagaactgacctttacctacaaccaaaacggccatgagactgaatttaccgtcacgcgtagctggaaaaaaggaaagaaagatcgtctctctttgcagcaggacgggcaaccgcgtagtgaactcagttatgaccagtgccagggatttttgaatgaattaattcctcacggtgttgccgatcttttcttttttgatggagagaagattgcagagctggcggaagatgaatccggcaatattctgcgtacagcggtgcgtcgtttgttgggactagatctgatcgccagactgcaaaatgatctgatgatttttgtcaaacgccagcaaaccgcccagttgggtggctcccagcaacagcaggttgaagcgcttgaggcaaagattaaaacgcttgccggtcaggcggagaaattgttggaagaagccgatttcgtcaactcgcggatcgaatttttatcccaggacattattcgccatgagggattgttaaatgcgcagggcggcgcatttgcccagaccaaagcacaggaaaaacagaaagttgaaacgctgttaaaagaaaaagagcgtctggaaaaagcgttacgacaggaatgcgatggatcgttgccctatgcattagcgcctaatacgttgtcgcggttgctggaaaaaattgccaatgaagcgcagatcaagcaggcgaaaatttttgagacagagttaaatcaatttttaactcaactcaaaaatgatatcgcgttccgttccagcagtgaaagtagtaccagagccattgctaccgaagcgattaccaataatttggacgcatatatggcagccaaaccaaaaggtgatttgctgtttgatatttctgaacgtgaagccggtatgctccagcaatccattgagcaggacagcaaaaaagcatggcagcgttttgatatgtaccgccatcaattagcggatattgaacaacaactggagcaggcggctgccaatattgctcgcgccccggaagacgagcagttaatggatctctttgcagcattacgcgatctcgatcataagcgtgaaaaacagcggcaaaaataccgctctctactggaagaggctaaacggacgaaacagcagcaactggactgtgttcgtcaggtacagaaagcacatgacatcacccgtagccagcatggtttgagcagcgcatttaaaaatgcacaagagaccattaacctgctcgattactacagcgatgtgttaacgcaggcgcgagtgaaaaagttatctgctaactttgaaattgcctaccacaagctggcccgtaaagaggatttacagcttaatgcgcacataaatccacagacatttgatgttgaactggtggatgaaaaggggtcggtgattaatcgtaagctgctttctgcgggtgaaaagcagatttatgcgattgccattcttgaggcgctggcaaaaacctctgggcgtgatttcccggttattattgatacaccgttagggcgtctggactctcagcaccgggataagttgattaatcattatttcccggaggccagccatcaggttgtgctgctatccaccgatactgaagtggacgagcgttatttcgtcgatcgactgcgtgatgatatttctcatgcttatgagattgtgtttaacgcgcataccaaatcatctgcgctgaaacccggttatttctgggaactaactaaggaggctgtctga

SEQ ID NO: 244689 - DNA, 435 bp, Klebsiella pneumoniae
atgcaatttcgaaccattcgtaccgcccttaaccatgagggcgaagtaacttacatccgggacctgactccgcgttcaagggggctctggttctgccgttcctgcaacaatcccttgcgtctgcactggacgcatgacagcggcggttatttcgaacatgaccttgaagatgcagacgaacgccgattaacgcattgtgcgtaccagatcattgcccgggataaaccagtatccgcttttgaccaagccgtaaatgcactgatggaacgtgatgatgtgtccttcacagcaccttcagacagagattacttctgcgtactctgccagcgtgaatattatggtatccgctgctgcccggcgtgcgagcagcatatctacagcacggaaatgaaagacctggataccctgacgataccagttaaatttgcgaagtaa

SEQ ID NO: 244690 - DNA, 207 bp, Klebsiella pneumoniae
atgactacacctgactgccttctttccaacaaatttgtcgatatggcgtttatcacacaactcaccggcttaacggacaaatggttctacaaactgattaaagacggtgaattcccaaagccaattaagctgggcagaagctcccgctggcttgaaagcgaagtggaagcctggctacaggaacgcattgatcagtcccgccagtaa

SEQ ID NO: 244691 - DNA, 1878 bp, Klebsiella pneumoniae; identical to SEQ ID NO: 110276

SEQ ID NO: 244692 - DNA, 156 bp, Klebsiella pneumoniae; identical to SEQ ID NO: 140177

SEQ ID NO: 244693 - DNA, 330 bp, Klebsiella pneumoniae
atgaacacatcaccgtggaacaaagaccgtatcatcggccaaaaaagaccacttcagatatctcatatctgggggatccgaatcaggcttgaactggaaggtaaaacgcgcgatttggctctgttcaatatggccctggatagtaagcttcgaggctgtgatctggtaaaacccaaagtatctgatgttgcatatggtaactctgtttcaagcagagctacggtgctacaacagaaaaccggcagccctgtccaatttgagataaccaaagggacaagagaggctgtttctgcattgataaagcttggcaatttacgcagtaaagactaa

SEQ ID NO: 244694 - DNA, 738 bp, Klebsiella pneumoniae
ttgttaactccaaaggttatcataatggaaatattctctagggtttataaaatgaaatggataaaacaatatagtaaagagtttgaaagggatgctttaaggaaattaatttcaaaagtcaattggaaacacttcaaaccatctatcaaagctagccttataggtatagctgaagaattgaataaaaatggtatagaggtaagtgtttatgaccagcaagatgaaccagatggatttggttttgattcgttgagtttgcagtttaattctaaatttactggaaatatgcggcaggtcatagaaacagataaaataacttttaatcaccatatgcaatctggtggggtgttatccattacatatagtgctgttggtcatattcatattcttgttgaacctcctaaaactgaagactctgtcgcagttcatagttatcttatcctttaccaaacttatgatgcaaaaaatatcacaagtaagcgtattgaaaaaagtgttaaaaacttcatccattaccaaaggtactcaggtgttctttatagaaagacatttaaagatagatgggtagtcagatggcttaaagcaaagatgtactttattcaatatctagaacccaaaaataaatttataagatattcagctttatatattccgcttattagtatgattgttgcaacaattgcggcagtcgcaagcctgatagcagtatatctgacctatttgagtttaaatcattaa

SEQ ID NO: 244695 - DNA, 888 bp, Klebsiella pneumoniae
atgaaacatctctcgggctacgcccttatccgccgtcacctgcggcgctatccacgctcactacgacagcatttgctgaaagaactcaatcagctcgtcacgtacgaaccagtgattggcattatgggtaaaaccggcgtcggcaaatcctcaatgtgcaacgcgctgttccgtagcgaagtctgttccgttaatgcagtggaagcctgtacccgtcagccacagcgtgtccggctgcgttttggtcagcattatctgacgctcgttgatttaccaggcgtgggtgagagtgttacccgcgatggcgaataccgcgagctgtaccgggaactgatgccacaactcgacatggtgctgtgggttctcaaggccgatgatcgcgcatttgcagtggaagagcagttctatcaggatgttttcgcaaggtactgcggggcgttaccgcctgtgctgtgggtgctcaatcaggtggataaaattgaacctgccgagcagtggaattggccgtccgctcagccctcgacattacaggcggaacgaattgtgcagaagcaacaggcggtagcccgtcagttgggacttgctgagcaggacattcttcccgtttcggtccgggggcgttatcgcctgtcccgactggtggaggccatgataacccggctcccaaagcaggcccgcagtccacttgtgccgcacctgcagaacgggtatcacaccgaagccatcatcagcaccgccagcagcagctttggcgatgccgtggtggaagtgattgataagattattgacctggccccgctaccacaggtggcacgcattgcactgcaggctgcaacacacactgtcgcccgcgcagcacgctccctgtggggatttttcttcagctag

SEQ ID NO: 244696 - DNA, 159 bp, Klebsiella pneumoniae; identical to SEQ ID NO: 95917

SEQ ID NO: 244697 - DNA, 465 bp, Klebsiella pneumoniae
atgaaaaataaactgattatttcatttttactggcttcagtgctgacgccttctgtctcgcatgcgtttggcaaccgtgatagctgggtaagtggctatgcgcaaggaacgtctgaatacaccatcctcggtaaagggcaatcacaactttatctggcctgcgatagttccggctcacagccagcgaccattatcttcactgatgtgaacggccatcaggtcaggatggacagcggccagacacttgccatgagaattgataacgctgaagaagtgaatatcagcgaaagcgagtctcatgtgggatctgacaatgtcatgtgggcatggaacaaattacgcaccggcaaacgtgttgtggtttcaggtagcggggtaaaacctgtcactttcactttagcgggggctgctgcagttattcctgcgttcggtgacaacggctgcgtgcccggatttgcactgtag

SEQ ID NO: 244698 - DNA, 342 bp, Klebsiella pneumoniae
atgaagaaaatcatcacagtcgcagcactctgtctgctgtcattttcttcgctggccgcttcttcaccggtcagtgtcagtgttagtcccggaagctacagccactactcatcgattcggattacatcaaaagtcgattcgattgtgattaagcaactcattgtcaaccggggaaactgccaggatgcagaattcgccagcccctggaaaccggtacgtctgggatttggcggggcggtagcacatgagtttaccggtaaggggctgatggttccctgtaatgtactggaagtggtggtccagacaagcaaaggcgcatggcagtttgattttgacagctga

SEQ ID NO: 244699 - DNA, 450 bp, Klebsiella pneumoniae; identical to SEQ ID NO: 95913

SEQ ID NO: 244700 - DNA, 321 bp, Klebsiella pneumoniae; identical to SEQ ID NO: 95910

SEQ ID NO: 244701 - DNA, 1134 bp, Klebsiella pneumoniae
atgtcagactcaataatcaaaagctatggtgggatactccggtttggagcaggattcagcatcgttctgatgacgctcactgccattttcatctggttttatcttacgtggattggccgtctagatatattccttcaagctgtcacttttaacgaactattctccttctctggaattatatttttaagtagcattatattgttctgtggcgtactgtttctaccttgcttgttaggatgcctcattatacatagcaatcaaaataatgcaaagtcaaagcaaaagaaaataattctagcacgtgtttatgctgggagctcttttctatgtataacttttgtcgctttaatatctttgtttgacatagactcaggagaattcatcttcataactttgatgttattgacaggcattgttagtacttttattgcattaattctccagagaaaatatatacacactcacctgaagtcactaaacacaataacgaagataaaagctctactattagattattcaatgaaaccctttctattgggaatcaattgctggctagtagtcttcccaatgatattattgagcaaattcttacacatcgaaaatggaatggatgactaccagcaaacctcgttattccttttatatggcacattagtaataataatcaatatattcccatgcatcttctttttacgacaagatttttctagtggatggtttaaacctctgagaaatactacaggtgttgtttttgctttattactactgtcatcatccttcatgcacgtcattccgttactgattgtcaactttgcatttcggatgactgggatgacaatcatggaaccagttacaattgctgtcaaaacggatgaaattccttctgaaatgcttcatagcagaggatgggagtatcagctatcagaggatagaaaatttagcttagtatcaggagttatctttttttcatatggcggagtttatcttgtctgtcctaaagaaacgactcaaaaatttcgtgaaagcataatcttcgacatactgtctgatgaaatagaaaaaaaggccagagaagaaataaaaaaatcagcccagcaatgcattgcagtagataaaagtgttttaaacttttga

SEQ ID NO: 244702 - DNA, 498 bp, Klebsiella pneumoniae
atggttgatggctcccatctcctgcctgagtgccagcgtgatcctgcgatagccataccggtcacagttctcgttgtatatctctttgattctgcactttatctccccgtatttttcaggggatttcaacgctttcagatgataataaaaagtacttctgggtatctgggaaatccgcagaagctggtcaaacggataatgctgcctcagctcgtctacaaccctgactttatctcttaccgaactgaggctttcagcttttgtagatacagtacccgtaactcaagaaacctgacctttctttccagcttctggatacgtttgtctttggattgttcccgtgcagcttcaacagcaagaggatcatctaacatctcaggggtcctttttttgccaagacgcagcgatctgagcccttcctccccatgtttatcaaatacatctatccatctgctgatggaggctgaaccagcaagcttgtatttggttgccgcctga

SEQ ID NO: 244703 - DNA, 1290 bp, Klebsiella pneumoniae; identical to SEQ ID NO: 190386

SEQ ID NO: 244704 - DNA, 429 bp, Klebsiella pneumoniae
atgagcaacataaccatctatcacaacccggactgcggcacgtcacgtaatacgctggagatgatccgcaacagtggcaatgaacccgcgattatttattatcttgaaacgcccccgactcacgatgagctggttaaacttattgcagatatggggataacagtccgtgctctgttgcgtaagaacgtggagccttatgagcagttagggctagcagagaacagctttagcgatgagcaacttattggttttatgctcaaacatcctattctgattaaccgtcccatcgtcgtgactccccttggaacacggctgtgcagaccttctgaagtcgtactggatattctcccggagtctcagcaaggtgcattcacgaaagaggatggtgaaaaggtcgttgatgaagcagggaagcgcgttaaaccctaa

SEQ ID NO: 244705 - DNA, 831 bp, Klebsiella pneumoniae
atgctgatgtgtgatgcgaccggtctgtcgcaacgtcgtgcctgcaggcttacaggtttatccctgtcgacctgccgctatgaggctcaccgtccggctgctgatgcgcatttatcagggcgcatcactgagctggcactggagcgcaggcgttttggctaccgccgcatctggcagttactgcgccgtgaaggccttcatgttaatcacaagcgtgtgtaccgcctttatcatctgagcgggctgggcgtaaaacgcaggcgacgtcgtaaagggctggctacagaacgtctgccgctgctccgcccggcggcacccaacctgacctggtcgatggattttgtcatggacgcgctggccaccggtcgcaggatcaagtgcctgaccagtgtggacgacttcacgaaggagtgtctgacaatgaccatcgcattcgggatttcaggcgttcaggtcacgcgtattctggacagcattgcactgttccgaggctatccggcgacgataagaactgaccaggggccggagttcacttgccgcgcactggatcaatgggcttttgagcatggtgttgagttgcgcttaattcagccgggtaagccaacgcagaacggatttattgagagctttaacggacgatttcgcgatgaatgcctgaatgagcactggttcagcgatatcgttcacgcaaggaaaatcattaatgactggcggcaggattataacgagtgtcgtccacattcagcactgaattatcagacgccatcagagtttgcagcacggtggcgaaatggaaaatgtgaaggtaaacaaaccgaccttactaactga

SEQ ID NO: 244706 - DNA, 537 bp, Klebsiella pneumoniae
atgtttttgcttgctctcgttgtctttcagatgattggaggaataactgatttttatcgttcatggcgaggcgtaaaaatatctactgagttactctttattacaaaaaattggaccttgagttttttaatttcgttaggtttgttatttctcatcccgaacctcaaactcggtttcacagttacaatgtctcttggatggttcatatcggtaacaataggttttatttgttgccgttcattcattcgttttggcgctggagtacttcgaaagtttggttacaatactcggaaagtggcggtagtaggaggtttgcctgtaggaattaatcttttgaggggttttctagaggagccttggcttggttttattgttgaaggtatttatgatgataaaccattagatcagataagtgacattccatatgcaggtaatttagaaaaactagttcaggacgcacgtaatggaaaactcgatagaatatatatcgcattaagtatgaatgaagaatataagctgtctcttatacacatctga

SEQ ID NO: 244707 - DNA, 333 bp, Klebsiella pneumoniae; identical to SEQ ID NO: 244604

SEQ ID NO: 244708 - DNA, 210 bp, Klebsiella pneumoniae
atgccctctctggcgcgccgcgacccactgacacaagatgtgccactccgtcagctgcgttttcttctatatgttgtgttcctcccctgccccgtgaccgcccgctcaccaccggaaaagggcgctttgcttattctctcaccgtggtacacttccggaaacttcgtaaagcgcgaaaagtcggatccgaacggaacggccgtcctgtaa

SEQ ID NO: 244709 - DNA, 378 bp, Klebsiella pneumoniae; identical to SEQ ID NO: 180324

SEQ ID NO: 244710 - DNA, 1536 bp, Klebsiella pneumoniae
ttgaagaaccgtaaagggactaagggttttgttgacttattggctaaagataatttaaatcgttttgtattaattgaattaaaaagaagcaatgctgcatcgcgagaggcattacatgaagttataaagtatttcgaaggtataaaagaggtaaaaagtttaaaagatgatgaggttattgtttatattgtatcaacagaatggaaagaattgcgagttccattttctagatttgtcaacgatgtgagttttaatgttgaaggttatcttctagagatagatgcagaaaataatccgatatgcttaagaaaaatcgaaccgatcaagataaataataatagaagactaagtaatcgatgcaaagtgtgttattacacttcctccaagaatagagagactggtataaaatcattcgagaatgcatttgttgaaaaagagatagatgattatgttattgtgctgctttcaaataaaaatcaaagtgtaacaaatggttttgattatatgatttatgtatcagtccaagagatggaagttgaggaatatatccatatactaagaaaagataaagaactgtataatgaacataaagatctgataaacgttcaggatactctatctgatgatgaacatcgtaatatattacatggttttgcagtcgatgattgtaagccttatgtttattttgattatttggctattggttatccatctaagtttaaccatactatattaggtgatgaaggttggaatatagaaaaggttataaagtatggaaaattaaaaaataatgagttgttaactgatgatatgataattaatgagttgaaaggagatagtggagaaaacaaaactagatatgtaagaaatgtggttagtaaaaataaatcttcatttgaggttgttagaaatgaaataaaaggatgtttgattgataataaaatatggcaaaaaggcattttacatgctctagatgagatatatcatgattctgtattgcagacgtgtcagattggaatatataacccaatgaatatattgagaagcttgcatcacgtctatgctgagttctgggcattgccttctgatcaaggattgaaaaatgctcaccagtggattccagaatataagttatattcaaaaggagtaactaaagagcatatgtatgttgggatgttgaaggataataaaaaaagattaaaccttaaagattattttttgaatttttataatggcatggaacatatgtatttttatacttttttaagtaccggatataatcatggcgatgtaaatgagtcaaaggaagttgggcttgaatatgccaattttaaaataactcatgataatttaaaaaatataactgagtattttttcttcaccggctttgaatatgaaaagattgattctcttaaattgaatgatgatataattaaatttgtattatctgagggtgattttatggatgagttaaatgatctctttgagcgaagacttttttctaatgggatggtcgatttgtcagaccatgaatag

SEQ ID NO: 244711 - DNA, 729 bp, Klebsiella pneumoniae; identical to SEQ ID NO: 92458

SEQ ID NO: 244712 - DNA, 750 bp, Klebsiella pneumoniae
gtgcatatcccggcagggaaacgcctgatagagccattcgttggtggtgggtcggtattcctgaacagcgaaaagcacgcagattacctgctgtcggacgttaatccggacctgattaatctgtatcagatgttagctgtggtgccggatgaagtggaattaaaggcccgctggatgttcgagtacatgcggtcaccagatggttatgagctgatccgttccgagttcaacgctcagacgctggatgctactgaacgcgcagctgcattcctgtatctcaaccggcattgcttcaatggcctgatgcgctacaaccaggcgaacaagttcaatgtgggctggggaggctacaaggccccgtattacccgatggatgagatgaaagccttcgcggctatggcgcataactgcgtattcatgaccgctgactatcgccgaacaatcagcctggccgggaaaggggatgtggtttactgcgatccgccttacgaaccgatgccgggaacaaccggattcaccgcctacgccgctggtggttttagctgggataaccaggtagacctggcgaagcaatgtgtatctgcctttcaccgtggggctcgggtagtgatttctaactcatctgcaccgaaggttctcgacctgtaccgggagcatggttttaacctgcaattcatcaacgcgcgccgttcgatctcctgcaaaagcagtacgcgggaagtcgcaaaagacgttgtagcgatcctttaa

SEQ ID NO: 244713 - DNA, 669 bp, Klebsiella pneumoniae
atgattaatcgtttattgaatgctcttgcagtaccaatttcaatccttgctatagtttatgtttggttattcattccagacgaaacgatgaagtttaatgaaaaaataactttctcaattgcggtagttgtcatggctgccacatggattggtgcggaaagttcaaggcgagcaagtataatttctcagaaaacccttgagaataacttaattaatagcaggcttagttattttgagcaacaatataattccttgatgactcttcataataatttacatacgtcagtatgcgaatatctcgactcagatgataagttcgctaataataacaaggttgtcagcttgggtggtaaatcattctttaaaaatatccgtagcatggcgactctcgaagaagcgcataatacactaatggggcattctgttgtaagcccgtatatgcgtgttttataccatttattaaaacatatattcaccttttccgatgaaccagtatgtttcaaaaagtacacttctccacttcgatcattgattcgaaatgatgttatttacttaattgctctcaatgcttcgataatctataaggaaaaatctaatgaatataatggatacgaggagtatcaaaggtatctacaaaaatgtaaatttttcgaacatggaattttctag

SEQ ID NO: 244714 - DNA, 312 bp, Klebsiella pneumoniae
atgagtgcgcttagtctgcaggaactgcatgaggccaaagccgaagatatcttcttatctgaactggaaacatctggcggtatcgtgcttcacactgatatgggatatccagtagctgaatatttacattctgatatcagaatagctattgagccgataaactttgcctctatgcgagatctgaccaatggctatgtggtaatgttcaggaacggtgagttcggtcatgagatggagggcgatctctatgaaacgttctctcaggctgttgataggcttaagatcgctgttgtgttgtgtgaaactctataa

SEQ ID NO: 244715 - DNA, 189 bp, Klebsiella pneumoniae
gtgttgtatccgccggatcagcgccgtcgggatattgataactacaacaaagcgctgttcgatgccctgaccctaaccggcgtctgggaggatgacagtcaggttaagcgcatgctggtggagtgggggaacatcgtgaagaaagggaaagtagaaatcaccatccgtcgttttcgtgcagctgcctga

SEQ ID NO: 244716 - DNA, 828 bp, Klebsiella pneumoniae
gtgctgactgacggtaagctccatgctgatgacacgcctgtcccggtgctgttgccaggcaataagaaaacgaagaccgggcggttatggacctacgttcgtgacgaccgtaacgccgggtcaacgctggcgccggcggtgtggttcgcttacagcccggacagaaaaggcatccatccgcagacccatcttgcggggttcagtggtgtactgcaggcggatgcatacgctgggttcaacgagctgtaccgggatggtcggataacggaagccgcctgttgggctcacgcccgccgtaaaatccacgatgtgcacgttcgcaccccgtcagccctgacggaggaagcgctgaaacggatcggcgaactgtacgccatcgaggcagagataaggggaatgacggcggagcagcgccttgccgaacgtcagttgaaaacgaaaccgctgctgaaatccctggaaagctggctgcgtgaaaagatgaaaaccctgtcgcgacactcagaactggcgaaagcgttcgcatacgccctgaaccagtggccggcgctgacgtactatgcagatgatggctgggctgaggcggacaataacatcgctgaaaatgcgctgcggatggtcagtctgggccgcaaaaactacctgttcttcggttcggatcatggaggagagcggggagcgctgctgtacagcctgatcgggacgtgcaaactgaacggagtggagccagaaagctacctccgctatgtccttgacgtcatagccgactggccgataaaccgggtcggcgaactgctcccctggcgcgtagcactgccgactgaataa

SEQ ID NO: 244717 - DNA, 396 bp, Klebsiella pneumoniae
atgaatgatgtggtattatacgaaaaaaatgaatcaatgttttttgccatttgcacggtcttatcattatattgcgatttcatatacgaaatagcatatggatttcataatgaagcggtaatgatcattgaaaatgaaaagtgtgtgggacaggcacttaaaatacaaataaacaatctattcgatgatttcgattactacaaaaaagtgaatggaacaggaaaagaaaaacgggaagatatagatgaaaaagaactttttaacaaagtaatggcagcacataaccaaggagtaaaagcgctaatcatgaagaatcttgaggccaatcttcgagagaaagaggaaggttctgaatattggaagttaaaaatatttaataggtttaatgggatatag

SEQ ID NO: 244718 - DNA, 333 bp, Klebsiella pneumoniae; identical to SEQ ID NO: 244604

SEQ ID NO: 244719 - DNA, 249 bp, Klebsiella pneumoniae; identical to SEQ ID NO: 181172

SEQ ID NO: 244720 - DNA, 204 bp, Klebsiella pneumoniae; identical to SEQ ID NO: 92423

SEQ ID NO: 244721 - DNA, 369 bp, Klebsiella pneumoniae; identical to SEQ ID NO: 92424

SEQ ID NO: 244722 - DNA, 255 bp, Klebsiella pneumoniae
atgcatgtttttattttgttgcgtaagcgtgataaatccaccagacatagtaaagcatctatgattattacctataaatataggatattcttctttatagcgctgatcttgattaaccgcttcaaatttattatttgtaagaaaaaaagaataacaataatcttcaatgtatatcgcacctcttttaaggtgttcgaagtggcaatttgtaattcttactgcattacaactatcatattttcttttaaaaactag

SEQ ID NO: 244723 - DNA, 132 bp, Klebsiella pneumoniae
atgaaacgttctctcaggctgttgataggcttaagatcgctgttgtgttgtgtgaaactctataacatattgtttttatttattttattgtgcattctcctgagttattgtatcgatgtgaggataaaatga

SEQ ID NO: 244724 - DNA, 996 bp, Klebsiella pneumoniae
gtgctcagcgtggtgctgatcatctgcgccgtcaacctgatgagcgtcaaggtgtttggcgagctggagttctggttctcgttcttcaaagtggccaccattatcatcatgatcctcgccgggttcggcatcattatctgggggatcggcaacggcggccagccgacggggattcataatctgtggagcaacggcggcttcttcagcaacggctggctgggaatggtgatgtcgctgcagatggtgatgttcgcttacggcggcatcgaaatcatcggcattaccgccggtgaggcgaaggacccggagaaatccattccgcgcgccatcaactcggtgccgatgcgcattctggtgttctacgtcggcacgctgttcgtcattatgtccatctacccgtggaatcaggtgggaaccgacggcagccccttcgtcctgaccttccagcatctgggtattaccttcgcggccagtattcttaacttcgtggtcctgacggcttcgctgtcggcgattaactccgacgtgttcggcgtgggccgtatgctgcacggcatggctgagcagggcagcgcgccgaaggtgttcgctaaaacgtcgcgtcgcggtattccgtgggtgacggtgatggtgatgaccattgcgctgctgtttgcggtatacctaaattacatcatgccggagaacgttttcctggtgatcgcctccctggccaccttcgccacggtgtgggtgtggattatgatcctgctgtcacagatagccttccgccgccgtctgtcgcccgaagaggttaaggcgctgaaattcaaagtccctggcggggtggtgaccacggtgatcggcctgctgttcctggcctttattatcgcccttatcggctatcatccggacacccgcatctcgctgtacgtcggtatggcgtggattgcgctgttgctgctcggctgggtctttaagacccgccgtgagcgccgcctggcgcaggctcagtaa

SEQ ID NO: 244725 - DNA, 291 bp, Klebsiella pneumoniae
atgctttatttaactcaacgtctggagatccccgccgccgtgaccgccagcgttacgctgccgattgatgttcgcgtcaaaagccgggttaaggtcaccctcaacgatggccgggaagccggcctgctgctgccccgcggcctgctgctgcgcggcggcgatgtgctcagcaacgaagaaggcaccgagtttgtgcaggtgattgccgttttaaggagagcggatgctttatttaactcaacgtctggagatccccgccgccgtgaccgccagcgttacgctgccgattga

SEQ ID NO: 244726 - DNA, 543 bp, Klebsiella pneumoniae
atgaataacacacaatctgataataatttgttttattttaataggctaacgtacattacgccacacgaagtggcgcttgctatgaatggttttgactatgatacagaaaatgatgaattgactgagattcaattaaaagaggttatcagattaagaaaggcaataaccagaaatctacaactgattaatgaatataaaaacatatccgccacgcaaaaagtggaagcgaacttagtgttaactgccgcttatatctttcagagggaagatattgtacctgtggagattaaggaaagaattgagaacgcattgcaacaacaggtaaaaaataaagattggggcgatattttaatgatgctaggaggaaatgaattatatgaaattggtaaaaaactaaggagtaatggcagagggcagtatagaaaagataatgatattatttctttttgtaatgaaaatgagattctattgaaaggaattaaaaaagctacgttttataagaaaataaagttgggtaaagacattataaaatacggagagtga

SEQ ID NO: 244727 - DNA, 423 bp, Klebsiella pneumoniae
atggaaagtagtaacaagcttaagcgcgggctaagcacccggcacattcgctttatggccctgggttccgccatcggcaccgggcttttttacggctcggccgacgccattaaaatggccggacccagcgtactgttggcctacattatcggcggcgtcgcggcatatatcattatgcgggcgctcggtgagatgtcggtgcataaccctgccgccagctcattctcccgctatgcccaggaaaacctcggcggactggcgggctatatcaccggctggacctactgctttgaaatcctgatcgtcgccatcgccgacgttaccgccttcggcatctacatgggcgtctggttcccgacggtgccgcactggatctgggtgctcagcgctgagagatcccctcataatttccccaaagcgtaa

SEQ ID NO: 244728 - DNA, 126 bp, Klebsiella pneumoniae
atgatgatctcatatcaggaacttgttcgcaccttccctaacaaaaatttaaaaatcggaattgccgtcaaataccgctttataaaattggtgataccattcattgcacagagtttactgctgtag

SEQ ID NO: 244729 - DNA, 366 bp, Klebsiella pneumoniae; identical to SEQ ID NO: 220509

SEQ ID NO: 244730 - DNA, 573 bp, Klebsiella pneumoniae; identical to SEQ ID NO: 92426

SEQ ID NO: 244731 - DNA, 2634 bp, Klebsiella pneumoniae
atgagtcaggaaacgcccgcttcgcagactgaagccagaataaaaaccaaacgccgtatttcgccattctggctgctgccggtcattgcgctgctgattgccgcctggctaatatggaccagctttgacgaccgcggatcgacgattacgattgatttccagtccgcgaacggcatcgtgccgggacggacgccgatccgctatcagggggttgaagtcggcaccgtccaggatattagcctcagtaaagatctgagtaagattgaggtttcggccagcatcaaacgcgatatgaaagatgcgctgcgcaaagagacccagttctggctggtcacgccgaaagcctctctggccggcgtatcgggcctcgatgcgctggtgggcgggaactacatcggcatgatgccgggcaagggtgaacccgaagatcactttgtcgccctcgacacccaacctaaataccgcatcaacaacggcgagctaatgatccacctgcaggcgccggatcttggctctctgaacagcggctcgctggtctacttccgaaaaatcccggtcgggcgggtatatgactattccctgaatgccaataatcagggggtgaccatcgatgtgctaattgagcgccggtttaccaatctggtgaaaaaaggcagccgcttctggaacgtctcaggcgtcaaggccgacgtcggcctgagcggggccaaagtgcaactggagaacctgtccgcgctggtgaacggcgctatcgcctttgactcccccgccgattcgcatgtcgcctcgcaaaacgatgaatatcacctgtatgaagatctggcgcatagccagcgcggcgtggtggtgaccctcgatctgcctgatggcgatggactgaaagcgggctcgacgccgctcatgtatcaggggctggaggtgggccagttaagcaaactgaatctaaaccccggcggaaaagttactggcgagatgaccgtcgacccgagcgtggtgacgctgctgcgggagaaaacgctgattcagatgaagaagccgaagctctccctcgataaccccagcattagcaccctgctcaccggcaatacctttgagctggtgcccggcgaaggcgagccacgcaatcacttctcggtaatgccggcggataaagcgctgctggatgagcccaacgtcgccaccgttaccctctcggcgccggagagctacggcatcgacggcggtcagccgctggtgctgcacggagtaaaagtcggccaggtgctggagcgtaaactgacggccaaaggggtaacctttcaggttgccattgatcctgaataccgcgatttaattcacggcgacagcaaatttgtggttaacagtcgtctggacgtcaaagtggggctcgacggcgtgcaggtgctgggcgccagcgccagcgaatgggtgaacggcgggatcagggtgatccccggcgaaaaaggcaaaatgcaaagcagctatccgctgtacgctaaccttgaaaaggcgcaggaaaatagcctgagcgaagtgccgaccactaccctgagcctgtctgctgagacgctgcctgacgttcaggccggctcggtggtgctgtatcgtaaattcgccgtcggcgagatcatcgccgtcaaaccgcgcaaggatgcattcgatatcgatctgcatatcaagccggagtaccgctacctgttgaccaacaacagcgtcttctgggcggaaggcggtgcgaaggtcaagcttgacggtaacggactcaccgtgcaggcctcgccgctggcgcgcgcgatcaaaggggcgatcagtttcgataacctcaatggcagcagcgccggagcacggctgaataacaaacgtatcctttatgcatctgaaacggcggcgcgcgccgtgggcggccaaatcaccctgcacgcgtacgacgccgggaagatggcggccgggatgccgattcgttatctcggcatcgacatcggtcaaatccagtcgctggagctaatcaccgccaaaaacgaagtgcaggcgaaagcggtgctctatccggaatacgtcggcaccttcgcccgcgccgggacccgcttctcggtgatcactccgcaaatctccgccgcgggcgtggaacatctcgacaccctgttccaggcctacatcaacgttgagcccggccgcggcccggcgcgacgcgattttgagatccaggatacgacgatcagcgattcgcgttatatcgacggcctgaacatcgtggtggaagcgccggaggcggggtcgcttggcatcggtacgccggtcctgttccgcggactggaagtcgggacggttaccggactgtcgctggggtcgatgtctgaccgggtgatggttaagctgcgcatcagtaagcgctaccagtacctggtacgtaataactcggtgttctggctggcctcgggttacagcctcgacttcggcctgattggcggggtggtgaaaaccggtaccttcaatcagtttatccgcggcgggatcgcctttgccacgccgccgggcacgccgctggcgccgaaggcccaggatggcaagcacttcctgctacaggagagcgagccgaaagagtggcgggagtggggcaccgctctgccgcagtaa

SEQ ID NO: 244732 - DNA, 690 bp, Klebsiella pneumoniae
gtgttgagcatcctgacgcttattcatatgaacgtcgaagagctatgggagcgtttctatcccgagcgtccggcgacccgcgccgataataatctgcaggtctgcaccggctgccattacaccggctatcgcgacgcgcgcggccgctgccgacgctgccacacgccgctgcatcatcgccgaccgcagagcctgcagcgcagctgggcggcgctgattgcctcgctggttttcctctttccggccaacctgttgccaatctccatcatctacgtcaacggcgcgcgccaggacgacacgatcctctcggggatcatctccctggccagcagcaatatcgccattgccggggtcgtgtttatcgccagtattttggtgccattcaccaaagttatagtgttatttaccctgctgctcagcatacaattcaagtgcgagcagggattgcgcacccgcatcctgctgctgcggctaatcacctggattggccgttggtcgatgctggatctgtttgttatctcactcaccatgtcgctaataaatcgcgatcagctcctcgccttcaccatggggccggctgcggtttactttggcggcgcggtaattttaactattcttgcagttgaatggctggacagccgcttactttgggacgcacatgagtcaggaaacgcccgcttcgcagactga

SEQ ID NO: 244733 - DNA, 216 bp, Klebsiella pneumoniae
atgaatacatatattttcctgggaggggctattgtggctgaagtcataggcaccacctttatgaaatattcagaaggatttacacgcctgtggccgtctgtaggaactgcaataagttattgcgctgccttttatctgctttcccaaacattggaaaatatacggggtctgacgctcagtggaacgaaaactcacgttaagggattttggtcatga

SEQ ID NO: 244734 - DNA, 903 bp, Klebsiella pneumoniae
atggctgcacacactaacgtctgcgtgattggactgggttcaatgggcatgggcgccgcccgcgcctgcctgcaggcgggcctgaacacctggggcgttgacatcaatcccgacaactgtcgcgcactgctggcggcgggcgccaaaggcgcgggccccagcgcggtgccgttcgccgcggaactggatgcagttgtgctgctggtggtcaatgccgcccaggtgcgggggatcctgttcggcgagagcggcctcgccgcccatctgaagccgggcaccgtcgtgatggtgtcgtccaccatcgcctccgccgatgctcaggccattgccgaggcgctggcggagtaccagctattgatgctcgacgcgccggtatcgggcggcgccgtgaaagcggccgccggcgacatgacggtgatggcctccgggagcgatgccgcctttgcccgcctcgcgccggtgctggacgccgtggccggcaaagtctaccgcatcgggagcgacattggtcttggctcgacggtaaaaattatccatcagctgctggccggggtgcacatcgccgttgccgccgaagcgatggcgcttgccgcccgcgccgggatccccctggagacgatgtatgacgtggtcacccacgcggcgggtaattcctggatgtttgagaatcgcatgcagcacgtcctggatggcgattactcgccaaaatccgctgtcgatatttttgtcaaagatctcgggctggtgaatgacactgcccgggcgctgaccttcccgctgccgctcgccactaccgcgctgaatatgttcacctccgccagtaatgccggattcggtcgggaagatgacagcgcggtgatcaagattttcaacggcatcaccctgccgggccataaacagtga

SEQ ID NO: 244735 - DNA, 1185 bp, Klebsiella pneumoniae
gtggacagaagtgcggttgatacaattcgtgggtattgttatcaggttgataaaacgattattgagattttttcgttaccacaaatggatgactcgattgatatagagtgcattgaagatgttgatgtctacaacgatgggcatttaactgcgatacaatgcaaatattatgaaagtaccgattataaccactccgttatatcaaagcccataagattaatgttgtcacattttaaggacaataaagaaaaaggggctaattattatctttttgggcattataaatccggtcaagaaaagttaacactcccattaaaagttgactttttcaaatctaatttcctcacctacaccgaaaaaaaaatcaaacatgaataccatattgaaaatgggcttaccgaagaggatctacaagcctttttggatcggttagttataaatatcaatgcaaaatcatttgatgatcaaaaaaaagaaaccatacaaataataaaaaaccatttccaatgtgaagattatgaggcagagcattatctttattctaatgctttcagaaaaacatatgatatctcttgtaataaaaaagatagaaggataaaaaaatctgattttgttgaaagtatcaacaaatcaaaagtcttatttaacatatggttttatcaatatgaaggaagaaaagaatatttaagaaaattaaaagaatctttcatacgcagaagtgtaaacacctcaccttatgctcgttttttcatcttagaatttcaagacaaaactgatataaaaacagttaaagactgtatatataaaatacaattaaattggtctaatttatctaaaagaacagatcgaccatattctccttttttacttgttcatggcatcagcgatgccaatttatacgaattaaagaatcaattattcaatgaagatctaattttcactgatgggtacccttttaaaggaagtgtatttacccccaagatgttagtcgaagggttttcaaataaagaaatccacttccaatttatcaacgacatagatgatttcaatgaaacactgaacagtattaatataagaaaagaagtttaccagttttatacgaaaaactgccttgatatcccatcccaactaccccaggtaaacatacaagttaaagactttgccgacataaaggagatagtgtaa

SEQ ID NO: 244736 - DNA, 594 bp, Klebsiella pneumoniae
atgagcaacctccgccggcctgttcgccgcatccaccattttctgcacgtctttgctggcaccgtaacgccggaccactccaacgaactcctcgacgtcgtgtccgcgaagcttcagaaccggcatcccggtctctttgttgaacttcggcgcgccatagtcatcggtagcctgggcgatgtggtaaagctcatgctccaccagtgcgcagaactccagatcggtacattgcgcgcagaaatccgccgccagcgtgatgatgaactccggcacatcgccgaaccactcatacatttgctgctcctgccgtgccttctgccagccgccgacgcgcatcatcaccgattccgcctggccgagtacggtacgcccttgtttcgcgaaagcgctggaggcccacataaagcgcaggtccgcatcaatcaggtggccgtggtcagggttatgcagatagccgtcagcagacagtatctggctgtttacccactcaccgatttcaggtgcggggatcagccgtacgtaaggaagaacatcaaaaaaattcctgtctggatgtggacgcacattcaattctccatgattattattccgtaa

SEQ ID NO: 244737 - DNA, 552 bp, Klebsiella pneumoniae; identical to SEQ ID NO: 185233

SEQ ID NO: 244738 - DNA, 615 bp, Klebsiella pneumoniae
atgagcattggcgaggctcagctcgatatctgtgcagcagatgcaaacgtcatgatggcagcaccggcgtatgccgtcaccgacaaaggcggacatctcgacgcgaatggctaccgctggctgggtatgcagttcgggaaaacgctgcatcgcgcgattgaccgtcgccagaactggcgtccactgcaacccctgtcagtcacgctgagcggaacactcctgcgtgctgatttcctggtgtggagtccgccacttcagttccggtcgtgctacgtggggtcatctccgacaacgtatgccgcaaaaggattcagagttactgacgacgccggggacgttccggtgacgcgtgtcgacattgtagccgataccgtagttgatattacgctggggcgtgaaacgaccggcgatgtttatctatggtacgccagccagaccggaagtaacggtaacggaaatctgtttgacagcgacacaactgtcgctgttgcgaattacgaatttcatgaagggacggggcaatatccggaatcaaatattccagagctggtaaaccgtccatacccactgaataacccctgtgtggcatttcgtcgccaggcaatcgctatttaa

SEQ ID NO: 244739 - DNA, 735 bp, Klebsiella pneumoniae
atgggttcgcgtattattgttccgggttattttggtgataaaggcctgggttttgacccgctcgttcgccgtggcctgaaatatttgaatttttatggagaggcagataaaactggtcggaatctcgcaccggatggggtagctgcaacggtactgggttcgcctgttgtgcaggaaaatggcgtccagtttacgcctgcaggcacattgcttgatacgggtattcttcagcctctggactttacttttttcacaatcttcaactgtccgaccctttcacagattctgctgctcagcaattttaacgggccccggcaatctggctcaggaaccacgcagggcgtagtgctcaggacgcagcccggatctaccagcatgaccctgaacttttcggtaaacactctcaacggtagcgcgtcgacgcagcgtacagtcgcgctcggtgggttgctggcaaacacaaactatttagtgtgcgcacgttttaaatcgggacaaaaaatggactttcaaatactgaacaaagctctgtcagcagagaaaacaacagatatgggcgacccggcggatttgggggccaagttacgcataggtggtagttaccaaattgacctgacaaacgcagggattcacagaatgtcagcactacacaacgttgcgctaactgatgatgaaattacgaaagccggtgcgcaatggactgcgtgggctaatgctgtaggtgttccgctctag

SEQ ID NO: 244740 - DNA, 132 bp, Klebsiella pneumoniae; identical to SEQ ID NO: 191078

SEQ ID NO: 244741 - DNA, 180 bp, Klebsiella pneumoniae
atgcataaaaaaatgatgaaatccaagccagcagcttctaacgaaacagcaaaatcattttccgaaatgaacgagcatgagaaagccgctgttgtacacgagaaggcgaataatggtcagtcttcagtgattcatcagcagcaggctgaaaagcatcgcagccagatcacccagaattaa

SEQ ID NO: 244742 - DNA, 1422 bp, Klebsiella pneumoniae
gtgagtgaattaagcaccggggaacagttcctcgttaatgcccttgctgatgcaatcgggcgccagcgcatgctctacgcagggcgtaatggcaacgtcaaacggacaaagttatgggacgagttcggctaccctgacacgctgacgttcgacaacttctatcgccagtatcgccgaggctctaccggttttgcagctgtccataaattgctggattcctgctggatggacagaccgaccatcatcgatggtgatgaagacagggagtcgaccaaaactacgccatgggaaaagtcagttaccaaactgatgaaaaagcactgggcgaaaattaaagacgctgaccgccgcaatatggttgggcgttactcagcacttctgattcaggtgaaagataatcgagactggagtgagcctgttgatgtggcactggtccagaggctaggtagtgctgcactggttaaactgatcccggcatgggagccgcaagtcaaacctggcaaccttgatattgatacctggtcggaaacctacgggcagccagtcagctatcagtttaatgaacaaccgataggcgacgagggcacgtatagcagccctcgttcggttcaggtgcatcctgaccgtatcattctgctctgtgaaggctcagaggatgagaatatcctgtcgggaatcccgcttcttgaggccggctacaatgacctgctggatattgagaaaacgaagggcggcagtgcagaagggtttctgaagaacgccagtcgtcaactggcgatggagttcgacgccgccacccaaattgacacgctcatcaagcaagccaaggatgctggatataacaaccttggtgatgcgatgaatgacaaggtgaataagcttaaccgaggtacggatgctgcaatagccatgcaggcaggaaaggcgagcgttctttctgttgcggcagctgatccgacaccaacgtggacggtttctgcaaactcattcgcgtcgacgattcagtgtccgtttaacatcctgtttggcaagcagacaggcaacctggcttcagaggaggataaaaccgcgtgggccaatcgttgcaatgagcgacgctggggctttatgtctgatgtcattacgcgagtgatagagcgattctggactattggtattatcgaacctcccgcatcgggcgaggtcaccttggcgtggtctgacttgctcgctcccagtgagaaagaaaagcttgcgaatatggcgactatggctgatgttgcccagaaaactcagcaagcctacggcacccccgtggtcgatgagaacgaggtaagggcagtcggcgagcttgaacctcgcaaagaggttgctcagccagacccaaacaacaaggtgacaaccgatgatcctctttccgatgacccaggagcaaaagagtaa

SEQ ID NO: 244743 - DNA, 204 bp, Klebsiella pneumoniae
atgcaatgggtttcagtgggtgaagcattaccagagacaagatctcaatttcaaatggtcattgttgcgacaaacaagggcataggtgttgccagctataatgcgataaatggattttacgacgccattttaaatggtggaaagcaatacagtaagcttgaaatcagtcactggatgtatctgcctgaccagcctgaaaaatga

SEQ ID NO: 244744 - DNA, 378 bp, Klebsiella pneumoniae
ttgccctttctgcgtttcgaactgctggatgagagccaactcctgagcatgctgattagccagctgttggacagggtcaatctgcccccgagcttcctgcatggggcttacagtttgctgagcgcgtatcttagccagattaacctggtgctgagcctccagttgctcactggtttggttgtactgctgctgggtaatcctcttgccatcgagcgcagttttcagatccttcatatcctgctggtaagaggcgttctctcttgtttcagggaggagtttttgtgcagcagcctgggctttgatggcgttcgccgtatcccatgcagccgctgcatcacgttcaacttgagcaacctgttgtggggtggcgttcgttaa

SEQ ID NO: 244745 - DNA, 843 bp, Klebsiella pneumoniae
atgcctgcaacatcagggcgctgggcatctgtttatcttgaaccaatgatcggctcaggagagcggctcacggtagcagttgccacgataacatcatctggtgaaattttagttaagccggcaatcagaaaagaagttatagaagctatgtatggcttcaaagcaccagcatttatcaatgtggttgatctgattttgtcgagtttgaagttgcatctggctgctaagggggatttcgtatcatggcatcctccagttacaggcgtcactataagcgccgtaaggaatgctgcgtcatcaagccctgttggcatactccgccaagcggtatcattgtcatcgagtttgtcatcactccttgaggctgaagaagattccgatgggttgccagctaagcaatcaagaactaaagacaggtggccaattcaaatctttgatgcggttatcagcgctgacggacgcagggatatttttttcaatagaagcttcacctttagtgatggacacagaccggctaaaattttctatctaagcgatcatgcagctatcaacaccggaaaactgttaccccacaacttgaatgagcaggttaaggatggaaaagcaaaaatatctgacttatcaatgataaaaaggcaaggcgatatttttccaagagaaactcatcaaatgattatctacaaaccggaagatgatagccctgcatacaatgataggcacatagcatcaataaatagtgcgtacctttctttacaggacttggctaacacctacgatgtatcaatcacttctgtaagcactgccgagcatgcagcaaggttaatattgcaaactgcagcataa

SEQ ID NO: 244746 - DNA, 765 bp, Klebsiella pneumoniae
gtgatcagaataggaaggttactacctggcggcattgcaattgacgaagggcaacatcacccgataaagggcgttgctcttttgataaaagaaaatagcgaaccagaagagattgttgtttttgcaaaagaaatatcttctaggagcatttctatagaaataacctgcgcagccttgggaagagctctatccctgcctatacccgagccagtgctactgtttgacagctcaaacaaagcattttttggtagtgttgatgctacctatccgagtttcatgaagtatgtttctaactcttcagatcaggccgtttctgatgctttggcatcatggccgttattgaaaaaagctagctattttgatgagtggattgcgatggatgaccgtcacaacggaaacttgcttttcaatggtgatggtttcttcctgatagaccatgaatcggcaattccccaaggtcttgcccctgaccttttcgggatagattattactccaatcaattgctgcaggtagcaacttacatactcgatagaagtaatgatatagccgttcagatgatggcaaatgaggcgagggcttggaccatgtcttgcaagagtaacaccctaacgctattagatggagagatatccgaaacagttcaaggtaaagagaaaaatcaaataatgtctttcctttcatctagaattgagttactaggagacattctttatgatcaaatcaagccccaacaaacacagatgatatacgatgctaaatcttga

SEQ ID NO: 244747 - DNA, 3240 bp, Klebsiella pneumoniae
atggcaaagatgactgagtctgatattgaacttatggcggttgaacacctacaagggctgggctatgagtatgtttacggcccggacattgaacccagtggaatcaacccgttacgtagctatcagcaagttatccttgaagataaagtgcgtacagccttgcaacgcctgaatccgcaccttaatgagcagaagtgtgaagaagcgttaaaacaggtgatgcagattgcctcacctgttctaatggtaaacaatctaacctttcatcgcctattgactgaaggaatcaatatcgaagtctgtaaggaaggtaatacacaaggagaactggcttatctgatcgactttaacgatcctacgaataatgattttctggtcattaatcagctcactatcaaagaaggcaaccatacccgccgaccagatcttattttatttgttaacggtctgccgttgatcgttatcgaactaaaaaacgccgctgatgaaaatgccacggtatcaggtgcttataaccagataaaaacgtatcagaaccaaatccccagcctgtttacctacaatgcctttaatgttgtttcagacggactggaagccaaagcgggaacggtttccgccgatttcagtcgttatatgacatggaaaaccgctaatggtaaaacacaagctaccagtacccaaccacagctcgaagttttattacaggggttgcttaatcctgtaacgctgttggatgtgatccgccactttatcgtgtttgaagccagcaaacatgaagacagcaaagggattatcagtatccgtaccgttaaaaaaatggctgcttatcaccagtactacgcggttaatgcagcagtactttccactattcgtgcctcaggtgtaaatgcagattccccctctgccgaagtagcactgcgccagcagggacgtaacagtaaagttcttgttaatgcgcaaaaaaccggagatcgtaaagcgggggtcgtgtggcatacccagggttccggtaaatcgctttcgatggtgttttataccgggaagattgtactggcgctgaataatccaacagtggtagtgatcactgaccgtaacgatttggatgatcagctattcggtacgttttcttctgccactcagctacttcgtcagacaccaaaacaggccaacaaccgggaagaactcaaagaatatttgcgtgtcgcctctggcggtgtggtgtttactactattcaaaaattccagcctgatgatggcagcaatatctatgagttgctgtccgacagaactaatattgtcgttatcgctgatgaagcacaccgttcccagtacggtttcagcgccaaagaagttgacgtgaaagacagcgaaggcaacgtaacaggtaaacgcaccgtttacggctttgccaaatatatgcgtgatgccttgcccaatgctacctatcttggctttaccggaacccccatagaaaaaacggacgtaaacacacctgctgtttttggtaactacgttgatatctacgatatctcacaggccgtagaagacggtgcaaccgtgcgtatcttctatgaaagccgtcttgccaaaattgccatcagtgacgaaggtcgccagctaattgaagacttcgacgatgagtttaacgaagacgagctgacgcttacccagaaagaacggtctaaatgggccagaatcgaaggtttgattggcagttcaaaacgtattaaagctattgcggcggatatggttcagcactttgaacagcgcttaaaatctaatgccgatcatggcaagggcatgattgtcaccatgtcccgtcgtattgctgctgaactttataaagaaatcatagagttaaaacctgaatggcacagcgataatctaaatgatggcgtgattaaagtcgtcatgacctcttctgctgctgacggaccagaaatcgctaaacaccacaccacaaaaaaagaacgtcaggttctggctaatcgtatgaaggatgacgacgacaagctgaaactggtgatagtgcgtgatatgtggttaaccggcttcgacgctcccagcatgcatacgctgtatatcgacaaaccaatgaaaggccacaacctcatgcaggcaattgcccgtgtgaaccgtgtgtataaagataagataggcggtctggttgttgactatctgggcattgcctctgatttaaaagaagccctctccttttactctgatgcaggtggacgtggagatcctgctgaggttcaggaagaagctgtaacgctcatgcaggaaaagctggaaatcctggaaggcatgatgcatggctacgattacaaagcttactttgccgcaactacttcacaacgcctgaaaattattcttgaatcagaaaaccatattttagggctggataacggtaaaggtaaaatgcgtttcctggctgcggttgcagccttgtcgcaggcatttgcattggcgacaccgcacgataaagcaatggaagcggcacccgaagtagcattcttccaggcagtaaaagccagactgaataaatttactgaaaactcagacggatcagaagaagaacacaatgacagtctggaagttcgggtaaaacagactatcgatcaggctctggttaccgataaagttgttgatatttttgacgctgctgggatacaaaagcctgatatttccgttctttctgaagaattccttcaggaaatgaaggattaccaacacagaaatattgctttggaaacgcttaaaaaactgctttctgacgagatcaaggttcgctcgaatcaaagtatcacccaaggcaaaaaactgattgatatgctgacctctgcaatcaatggctaccagaacaaggtactgaccgcagcggaggtaattgatgagctaatcaagcttgccaagactatccaggaatctgacagccttgccagccagttaaacctcagcgcttatgaatatgccttctattctgctgttgcagataacgacagtgctcgcgagttaatggaaaaggaaaaactacgagaactggcagtcgtacttacagaggctatccgcaacaatgtcagtcttgactggacagtgaaagaagcagcaagagcaaaaattcgcgtggtggtaaaacgtctgctcaaaaaatatggttatccacccgatatgtccttgctcgccacagagaccattttgaagcaggctgaacttttagctggagaattaggaaaatga

SEQ ID NO: 244748 - DNA, 1140 bp, Klebsiella pneumoniae
atgagtgagtggatggaaattgcatttaaagacgcatgtagtttttcgtatggaaaaatgcctaagaaagaaaaaattgggcatggttcatttcagatatttacagggtataaatatcttgattcttaccctgaatataattgtgatcaaggcgatgtcatagtagtcgcacgtggagttggtggttccggtgatgttaaaatcgtcaataagaaatcgtacctgacaaatttatcaattaaatttacactcaacaatgaaattcttctaaacacatactgtttttattacttccaatggaacaatctacgatatttagatagcggctctgcacaatcacaaatcacaattaacgatttagaaaaagtaatattaaagttaccatctatacccgaacaaaaagctatagcctccgcactgtcctctcttgatgacaaaatagacctgcttcatcgccagaataaaacgctggaatctatggctgaaaccttgtttaggcaatggtttgatgtggatagcaatgatgaatggcaagaaaaaaatgtcctagatatattcacattagttggaggtggaacgccaaaaacttcagttgctgaatattggactgatgagataccttgggtttccggaggagatatttcagcagctcatcaaggctatctgtatagcacagaaaagtctataagcttagcgggacttcaaaacagttcagctaaattgctgcctaaaaactcaaccgttataagtgctcgtggtacagtgggaaagtatgctcttttagcaagagatatggcttttagtcaatccaattatggcattgtttcaaaaattggaaactatcctttcttcatatatcttctgattggatttattgtcgatgatttgctgacagcagcttatggcagcgtatttgacactattacgacaagaactttcgagtctgtaaacttgaagtttccttctttaaattcaattgagaaatttaatgaagaaatatctccgatatttagtaagaaagagacgaacactcagcaaattaaaacactagaaactctccgcgacaccctgcttcccaaactgatgagtggtgaagtacgagttcagtatgcagaagaaaaacttgaatctgtagcataa

SEQ ID NO: 244749 - DNA, 1752 bp, Klebsiella pneumoniae; identical to SEQ ID NO: 244121

SEQ ID NO: 244750 - DNA, 387 bp, Klebsiella pneumoniae
atgagcaacctccgccggcctgttcgccgcatccaccatttcctgcacgtctttgctggcgccgtaacgccgtacaactccgacgaattcctcgacgtcatggccgcgaagtttgagcaccggcataccggtctctttgttgaacttcggcgcgccatggtcatcggtagcctgggcgatgtggtaaagctcatgctccaccagggcgcagaactccagatcgttacattgctcgcagtagtcagcagccagggtgatgatgaacttcggtatacgaccgaaccattcatgcatctgctgctccatgcgggacttctgccagcctccggaacgcatcattacctgctcacattgacccagcacaatgcggccacttttggcgaatga

SEQ ID NO: 244751 - DNA, 471 bp, Klebsiella pneumoniae
atgccgacattgagagagtggaaggagcgccggccggcgagcgacatcaaacagacggtggagttttatcaccctgcttttggttattaccgggtggtcaataacctgtttcgcccggcgacgtttggcggaaactcgttcgagcctgcgcggttcagcgtgaccgagccggcgcaggacggaacggcagttatatccatgacgataacctttgttgccgcgacggagcatgttcggcagacactgaaaagctggcgcggggcggcgcgcatgacgccgataaagtgcctgtatcagcagtggaatgcgatcggtgacactacatccctgaaagactggacgctttacgtgaacgacatttcagccgatgccagcaacgtcaccgtgaccgctggcaagaccaatccgctgacgctggccaactccatcatttacaccacgaaagactatcccgggctgatcaccgtatga

SEQ ID NO: 244752 - DNA, 471 bp, Klebsiella pneumoniae
atgccaacattacgagaatggaaagagaggcgtccggcgagcgatatcaaacagacggtggagttttatcatcctgcgtttggatattaccgggtggtcaataacctgttccgtccggcgacgtttggcgggaactcgttcgagcctgcgcggttcagcgtgaccgagccggcgcaggacgggacaacgacgatatcgttgaccattacctttgttgccgcgacggagcatgtcaggcagacgcttaaagcgtggcagggtgccgcgcggatgacgccgatccagtgcctttaccagcagtgggacgatatcggtgattcagcatcaatgaacgactggacgctgttcgtaagcgatatatccgccgacgccaataacgtgacggtcaacgccggattcaccaatcctctgacgctggctaaccccatcatttacacaaccgaactctatcccggactgaaaacatcatga

SEQ ID NO: 244753 - DNA, 1005 bp, Klebsiella pneumoniae; identical to SEQ ID NO: 178004

SEQ ID NO: 244754 - DNA, 630 bp, Klebsiella pneumoniae; identical to SEQ ID NO: 18390

SEQ ID NO: 244755 - DNA, 1008 bp, Klebsiella pneumoniae
gtgttccgtcaggcaataacattaaataaaaagagacattttcaaggagacccagccacaaaggaaataataagctttcactcgccatattatttcgacattaatgaagtcatcaattatattaacaatagaaataatgaaagaaaaaataaggataatgaacatatttggtcagatgaggaaggaaatttcaagtttgacaatgaaaatgctcataggttattcaaagagaatgtaactcctgatggaagttcagccggtgctttaaatggaaaacttctcaattttgttgatcgattacaaagtaaaatatttgataagagattcgattttattctgggtgaaggtagtaaatccgtaacatttaaagaaacattagaaactttaataagctatggaaaagataaatcaaacataacaatacttgatgtaagcggtgttccttttgaagtacttagcatatgtgtatcattgatatctcgattaatttttgaatttggctatcattccaaaaaaataaaaagaaaatctaatgaaaaccaagatatcccaatattaattgtttacgaagaagcacataaatatgctcccaaaagtgatctgagcaaatacaggacatccaaagaagcaattgagaggattgcaaaagagggtagaaaatacggagtaacccttctccttgcaagtcagagaccttctgaaatttcagaaacaatattttctcagtgtaatacttttatctcaatgcgattaactaacccagacgatcaaaattatgttaagcgattactcccggatacagtaggtgatattacaaacctcctaccatcgctcaaagaaggtgaggccttaatcatgggggattcaatatcaataccttccattgtaaaaatagaaaaatgtacaatacccccatcgtcaattgacatcaaatatcttgatgaatggagaaaagaatgggtagattcggagtttgataagataattgaacaatggagtaaaagttaa

SEQ ID NO: 244756 - DNA, 360 bp, Klebsiella pneumoniae
atgattaaatataataaagctttcgatgaagtagagttgcttatgaatgaaatgcttggcaaattaaatatagcattaaatgaaacgaatttatatccaactgatgatatgtttcggataattgtgcgtgagattgatgttgaaaatttaaaaatactgtcttttatttataacgaaggatctcaagaggttatagacgatatgactcccgttataaaagaattcatgtactggtggggagataatttagattatggaactattaatatccaatctctaattgcaaaaaaagaagaaaaagtaatttcttcaatcatattagaaaattcagataaaggtaaaaacataaaaagaatttaa

SEQ ID NO: 244757 - DNA, 747 bp, Klebsiella pneumoniae
atgacagccttcaagagtcaatgtacagcgttctcccgccccattgatgcaggtcaactgctcaggcaaggcgcagcggggcggtctgatcaggcaatggacagcgcctggctcgtcagcctgcgtgtaccacaggcgcctcgatcaaacaccgatcctcacgttgtagccgagtgcccgcagccccttgctcgtctgcatgttccttggcggaaactcgtctgggcgcgcccagacgacgatttccccgaggctgctcaggctaacgtgcggaattgcccagtcgtcgctgcggatcgcgttccagagtcgggccgaaacacttccgttgccccagacaacgtagttcaacagtatccgtccggccaacacaccttcccgacaccgccgccgaaggccatggcccatcaagcggattttccatgtgccctcagcgccgtacctacagcaaatctttcaaggctcaggtcattcaggagtgttctgaacccggtgcctccatcgcaaacatcgccttgggctacagcctcaatgccaacctcgaccacaaatggattcggctgcctacccagaaaaccacggctatccagccagcgttcatcccgttgccttctcaaatgctcggcgtgggttcgcatactcaagcgcgctgctgcgatcatgagtttgatccagtcggcccgtaataatgggcacgatccgtatgcctatctcaaggatgtgctgacacggttgccgtccctgtaa

SEQ ID NO: 244758 - DNA, 570 bp, Klebsiella pneumoniae
atggacatcgatttcaagaagttggctccctggaactggttcaagaacgagcagcaagagcagcagaccgtctcttccctgccggtgcagcgcaatgacctgccagcggcgagcgggccagtcagcccgatcctgcaactgcatcgggaaatcgaccggctgttcgatgacgcattccggggcttcggttttccggcgttgaacatgccgcagtgtccatccgattggtcgggcatgctgaagccggccctggacatccaggaaaccgacaagcagtacaagattgccctggaagtgcccggtgtcgaggagaaggacatccagatcactctcgacaacgacgtgctgatggtgcgtggcgagaagcgccaggaacaggagaagaaggaaggtggcttccaccgtgtggagcgctcctacggcagctttcagcgtgccttgaacctgcctgacgacgccaaccaggattcgatcaaagcatcgttcaagaacggggtgctcacggtcacgatcgacaagcgcgaggtcagcgcgccgaagcagggacgctcgatcccgatcaacggctga

SEQ ID NO: 244759 - DNA, 681 bp, Klebsiella pneumoniae; identical to SEQ ID NO: 139460

SEQ ID NO: 244760 - DNA, 126 bp, Klebsiella pneumoniae; identical to SEQ ID NO: 221027

SEQ ID NO: 244761 - DNA, 138 bp, Klebsiella pneumoniae
atgaattttgacagcgacactaacgcgattgatgtcgccgtaaagcgactccgcgctaaaatagacaacgattacgggacaaagctgatccagactgtccggggcgtgggctatatactggaggccccggatgcatag

SEQ ID NO: 244762 - DNA, 234 bp, Klebsiella pneumoniae
atgatactcaacagggcccgtcatctgtcagaaatcaccatgaaaaatatccgacagaatctgttttttgcatttatctacaacgcacttggcgtgcctgtggctgcaggcctgctttatcctgtgtatggaatactgctgtcgccagttattgcggcggcggccatggccctttcctccgtcagcgtcattgtgaatgcgttgcgtctgaaaagtgtcaggctcgggaaataa

SEQ ID NO: 244763 - DNA, 522 bp, Klebsiella pneumoniae
ttgcccagccacgaccgccaggcatgggacaacgtggtacggattgccggtggcatcactgagaaaaacacgccacgtaatcttcagggaagggacagctacgtcgtcgcgctggagcagtacctttcaaccacccgattacacgacacgatcctcgacggtctacgtactgccgtgcgctatgacaaaacctatttcgataagatcgtcgcctcgctgctgccactgctggaaaaactgaccaccagaaaaatctcccaactgctggccccggactacggcgaccttaacgacccgcgcccggtattcaactggcagcaggccattcgccagcgggcgattatttatgtcgggctggatgcattgtctgacgcagaaattgccgccgctgtcggcaactcaatgttcgccgatctggtcagcgtcgccggacatatctacaagcacggcgtgatggatggctgccgcagacggaagagaacccggccatcagcctgcactgcgatgagttcagtgaactga

SEQ ID NO: 244764 - DNA, 234 bp, Klebsiella pneumoniae
atggatttcaaaatcctgaacaaggcgctgtcagcggagaaaacgacggatatgggcgacccggccgatttgggggcaaaactgcgtatcggcggcagttaccagtctgacctgacgaacgccgggattcaccgaatgtctgcgttacacaatgtcgcgctgaccgatgatgaaattacgaaagccgccactcagtggacagcttgggctaatgctgtaggtgttccgctctag

SEQ ID NO: 244765 - DNA, 297 bp, Klebsiella pneumoniae
  misc_feature (218)..(227): n is a, c, g, or t
atgataatccgtgacaagattaccgcagaattgaattaccaggcatctgtagaaggagagacgggtaatataaaaatgtgtcgtattattctggagtctgtgaacaacatggttgtttacaatacaatggtaaaggtaaaaaaagcaccaggctctgactcaaaaaccgacgatgagcagtatttccactatgtaaactcctgggtggttccgttcannnnnnnnnngtatttccactatgtaaagtcctgggtggttccgttcattgaaaaaatgcatgcagtcaatgacaaatga

SEQ ID NO: 244766 - DNA, 372 bp, Klebsiella pneumoniae; identical to SEQ ID NO: 191071

SEQ ID NO: 244767 - DNA, 3186 bp, Klebsiella pneumoniae
atgatatttaaaagggctgtttccttagccgtagctgtgtcaatcgtaactaatacgctcagttgggcgtattatgtcacgcttctcaatattgtgatggcaccgaaagtatatgcggcaaacgaaatttatgaacaactggaaaacaattttgatcttgctaatcctgcagcgaacagaacttcaacagtaactacagaggacattttagaaaaatataagaatagtgaaaatccttcttataccgacaaaataaatggttttgatagtactaacagttcgtcaatggacctgaagaaatatggtggaaaaacattcacaaatgatgatgttttgaattatgccaaaactgatggttcggacatcgctggtacggtaatgctacccaacatgaacggtaataatataaacataaaaggttcagaaaacggtggaaagttactttcacgtaaccaggatggaagtatatctataagtaacaaccccaatcctggaggcgcgatcactagtaccaatacagctgaaatgtatagttcagagcaaaataatgctgatgttcagtttaatgctggtgatagttatggtgacgagaaaggattcattaacgatataaaaactcgtaagagtcaattattcactgctaatagttatgatgggcaagcatatcgttcgctggtggctgcaacaaaatccaatccagcccctaatatttcgccaaatgacccaatgtttacaagtggcagaaatgaaatagcaaacgcagcggctggtacgggtcaatggttgcaaaactgttcaacacagaccacaactacaacaaaagaaaaacatattcctgattataaggaatattactgtaacgcacctaaaaaagataattatggtagttgcactattacacgtgacttcagtgtaccagtttacatctctggtggtaatggtgacctaagcgtatgtggcgataactgtatacgtatctggttcggaaagcgtggtaatgactactggtctggtggtgtttatgacaatagcatgacgcttcatttccaccaggacgctatcttaaaatcagcaagcatagtaaatgctgagtgggatgaccacatgcaagttaatcttgatggcaagcagatttttgctcatatcgatggtgaatatcgcgaacctggttatggcccaccacgtaatggcatggagagaaataaatcgaataaattaaaggaacctattgatataacgcgccaagtttcagaatccgtgtacaaagaaagtgaccacgaagttgaaatgtcatctactgtatgggtcgggggtaacggtgaagggtactttgaagtagaactaatttttgaaaatatcaaacttgaagataaacatatacaggacccacctggctgctacgatgttgttaaacaaacaggttcattttgcaggtttgatcgttttaccgatcttgatgtaggcactaaacgtttaccacaatcgatattgcaatatgcatcacctttatatgaaggagaccaaggtaacttaacctggaaaactaatctagaaggatatttttgcgatccgttagggaaagaaaaattatgtcagtatgatgcatcaggaaatattcttaaagatgagaatggcaatgaggcttgttacaattatgaccagataaagaatatgcctgatgcatgttcaaaatactctacaaactctgcatgcactatgtccagtcaaacatgcgctgagggatggttcgattctgctactaatcaatgttacatgtacgaacaaaagtggacctgtgatgaaggaataacaaggactgtgacagtaacaaacgaagcaaacacctgcgtaggcatgatcccatgttcaggaggtacttgtaataccggtgcgaatgaacaaaacagtgatttcggtaaggtcgcagcctatagcagcatggttcagaacatgcagggcgatgctatgtgtagtgaccctaacgaccccaatagttgcattgtcttctccggagagaagcaatggtgtggccgttctgtaggctttgtaaacgggttggcaaaaacagattgctgcgaagctcctaaaggtgcagccggaaaactagaggcaattatcttagccgggacaatgctcagaaacacaaactgggaaaaaatatcagcaaagctgacaacctggactggtggtgagtcaggtacgtgggcatcgatgacgaactctgtcggacaatggacctccggtgtatcttcaagcgtgggccaaatgtggcaacgcgtgactgaaccactaacttctgcttatgaatcaatagcaggaaacgtctcgagacttattggctcttcaacagttgaagggggaggttcagctgttacaacagagctcaccaaagatgggttacagaccggcggtctcgctgcaataaaacagcagttgatgaataaagcttacgatatgttgcccgatgcaatcagggactttgtgtttgataagacggccaccacacaacttggacaggcagttttctcaagtgctgttcagaattttatgttagctttaaacatagttggttggatatatactgcttatcaaatcacaaaaatgcttctcgaaatgcttctggcttgtgaccaaaaagagatggaagcgtcaattcacaaaaaccaaggggcatgttttgttattgatacagatcgttgcgttaaatatctcaacgttggcttcactaagaagtgcattaaaaaagcaaccgacatgtgctgttataactctttattatcaagggtaataatgcagcaggcatatccgcaattgggaattaatcctgtagaaagtggttgtgtgggattaactatctcacaggtccagcaacttgactgggataaaatagatatgactgagtatattgaatcagcagttgtcgcgggggaagtcccggatgaatacgcagcattcacagagagttctgtagctaatatgggtccatataaaaataacgaggcgcaattgtcctcggagcgaacactggagtcgatggggggtagtatcaatatgaccaaagcgagagaagagaatgtgcaggcaattaatggcaacaatgtagattgttcataccttccgagaccaagtgtatgtgaggtaggctctgtctacgttgatcctgtaactggtaattcaattaattaa

SEQ ID NO: 244768 - DNA, 174 bp, Klebsiella pneumoniae
atgccggtgcagaccagcaaaaacggcaacattgtcacctggagcgcaacggtcatcagcaacggtatcaaggacattaccgaggactatgacgactggattgttgaggcccagcctggctatggatactggctggattacctgatcaccgaagtgatgccgagggctgactaa

SEQ ID NO: 244769 - DNA, 1374 bp, Klebsiella pneumoniae
atgctgcattctgttgaaaagcattttgccgagcaggatgtcagcgatctgcaacaaatcagcaccacactgagccgtatactccagtccccggcagatccggatgaaaaaaaagtaagcaaaataaaggaatcaattgccagctaccgcaacgttgcccttttgctcctcaatcccaggggtgaagtgctctttagctcagctcagggggcggcactacgcccggcagtgaattcagcagattttagcgagcacagccgcgcacgggatgtctttctctggacggtggaggatcctgcgggaccgatggataccgggtccgaaatgaagatggaaacataccggattatcgcctcctctggtcaggcgatatttcagggcaaacagcagaactatgtcatgctgactggcctatccattaatttccatctccattacctcgatgcgctgaaaaagaacctgattgcgattgccgtcgtgataagcctgttgattgttctgatcattcgaatcgctgtccgtcaggggcacctgccccttcgtaatgtcagcaatgccattaaaaacatcacctccgagaatcttgatgcgcgactggaaccgacacgcgttcccattgagctggagcaactggttatctcgttcaatcatatgattggaaagattgaggatgtctttacccgccaggccaatttctctgccgatatcgcgcatgagatcagaacgcccatcaccaatctggtgacgcagactgaaatcgcactgagtcaggatcgaacacagagggaacttgaggatgtcctctattccagtcttgaagagtataaccggatgaccaaaatggtcagcgatatgctgttcctggcacaggcagataataatcagctgatacctgacagggtcatgtttgacctcagagcggaagtcatgaaagtcttcgagtttttcgaagcctgggccgaagaacgcaatatcacgctcaaatttaacgggatgccctgcctggttgagggagatccacaaatgttcagaagggcgatcaataatctgttatccaatgccctgcgttataccccggagggacaggcaatcaccgtctcaataagagagcaggagagcttttttgaccttgtgattgaaaatccggggaaaccgatccctgaagaacatttatcaaggctgtttgaccgtttttatcgggtggatccatccagacaacgaaaaggagaaggcagcggcatcggccttgcgattgtgaagtcaatcgtggaagcacatcacggaagagtgcaggtggaatcagacgtacgctccacgcgttttatcttatccgtgcccagactggagaaaatgatcccggaaacccaatgctga

SEQ ID NO: 244770 - DNA, 141 bp, Klebsiella pneumoniae; identical to SEQ ID NO: 185283

SEQ ID NO: 244771 - DNA, 432 bp, Klebsiella pneumoniae
atgctcgacggactatcctcctccgggaacgtgaatcactggctcgccaacggtggcggatggttctttaaccttgactacgacaaagaacgcctggctatcgcgttgtcccatttggttgctggtttgccactcatcatcgaggtaatgaccgagggtgagagggtggtggtctgccatgctgactaccctcataacgaatatgcgtatgacaagcccgtcgatgcagaacaggtcatctggaatcgtgagcgagtgagcgcggctcaggatgggattgtctcgccgatagccggtgctgatctgtttatcttcggccatactcctgcgcgccagcccctgaagtatgccaaccagatgtacatcgacaccggagctgtattctgcggccgcctgaccttggtgcagatccagggtggtgagcatgcgtaa

SEQ ID NO: 244772 - DNA, 126 bp, Klebsiella pneumoniae; identical to SEQ ID NO: 221027

SEQ ID NO: 244773 - DNA, 543 bp, Klebsiella pneumoniae
atgcctcccggtagtttaaacggaccagtgaagcttaccatagcgcggacatctgaattgagccacaggcggacattactattgagccattacaacattagtgcgcataatgtatattatgttaaatgcaatgtcgtactcaataacgtcatctttgatagctgcctcttcccacatcaacactatgaccgtcattcctttcatgcacgtgaatgctgcgctataaggcaaaatgttcgaggtgataaatcaagcatggcttttaacaatcacttcgcccactacagcctgttctcctacagtaaaagccagggaaattcattcagccacacctgctgcttgtactgtccggcatatcttactgctgttgcattttctgaccgaacgcgtcacgggcttcgttttccgcactcaaatggcgagtgccatcgcgaccataaacagaaccgccagctgaagttgaatggtgtactgaagccctacgcagccggcttccatgttgacaggctctgcctcacctccccctttccttgtatctggtga

SEQ ID NO: 244774 - DNA, 624 bp, Klebsiella pneumoniae
atgcaggtaagccagctgcagatcgagaagaatacctaccactccagctcagcgtactttcctgatggcgcggtcggtggcacagccagcgcgaaccgccaggcagacgcagcccgcctgctcgatattcctgcgggcgtgaaatcaaacttttcggcgtttgtgaagggagtaatgacacccgccccactaggtaacgccggcggtaatatcctgttctctctgctgaataacacggcgctgaaatacgttggtttcggtctgggcgcagctgacagctccaatgcgttccagtctcttgctgcgcacaatattaacgccggcagcacgctggcgggcattccgttcaccggaaaaatgttctctcagtacggtgaatatgcgctgatgatcaccctgaacaacggggtgctgaaagtatacagcggcatgaccgatagcccggaaactctgctgaccggatgtccggcatttgattacgtcatgctgggcagaaacagctcggtttctggttctacagtgtcaaactctggcttctggggcggctggctgcagaaagccgtactgttcgattcggcgctcagtgacgcggatatgattgcgcagtttgatttgctttcttaa

SEQ ID NO: 244775 - DNA, 1923 bp, Klebsiella pneumoniae; identical to SEQ ID NO: 229162

SEQ ID NO: 244776 - DNA, 783 bp, Klebsiella pneumoniae; identical to SEQ ID NO: 236907

SEQ ID NO: 244777 - DNA, 339 bp, Klebsiella pneumoniae; identical to SEQ ID NO: 199853

SEQ ID NO: 244778 - DNA, 330 bp, Klebsiella pneumoniae
atgacgtcaacacctgagtttttgaacaaactggactacagacagcttcagttctgccgtgatgagtgcgaggccagaatcagggccatagaggaagaagagaaaaaggtagcctgggcggttactgatggccaaattaattatggttggtatcgaacagaggactacctgaaagctgtcgaatgtttagcacgtgaagcagatgagcgctggaaagaagaagataaaagcaaccctgaaccgcgcaattggttgaatttttgtatcagggggcagcggctgccagtgtctgagtatgaagcgttatttgccgatggccagtgggggtga

SEQ ID NO: 244779 - DNA, 249 bp, Klebsiella pneumoniae; identical to SEQ ID NO: 206975

SEQ ID NO: 244780 - DNA, 609 bp, Klebsiella pneumoniae
atgattgatcgtatgaaaacacgaggcgaacgactgaaagcacgccgtttagaactgggaatgacactgcagcaagttgctaaaagtgtggatatctctcttcctggcgtccaaaacttagaacgtggtgacgttatgccgtcactgaagattgggcttgccctggctaaatgcctacgcaaacctgtgcaatggatactttttggtactgaatctgatcctgaccgcgttcctgttattggcacaacagagagtggtccggatagcgactggcagctaggagaacctgccaacacagaacgattcctgccatttgttagccaacgggaaaccgtttatgcgctcactgtcgggaaccaggttcagcacagctatcagccgggtgacgtcgtcctggttgactcagctctcacgccagttccgggtgaggatgtgttagtttgtgataaagacgggaaaatctcgatacagcggttagcgcgcttcgacgatgagcgctactacttagatggcgttaactctcaacgagttatccatgagaaaagtgatcttcaatttgtgcaccaaatagtcggtacgatcaaatcgttcatgatagagggtagatga

SEQ ID NO: 244781 - DNA, 738 bp, Klebsiella pneumoniae; identical to SEQ ID NO: 206978

SEQ ID NO: 244782 - DNA, 609 bp, Klebsiella pneumoniae; identical to SEQ ID NO: 199849

SEQ ID NO: 244783 - DNA, 423 bp, Klebsiella pneumoniae; identical to SEQ ID NO: 199877

SEQ ID NO: 244784 - DNA, 492 bp, Klebsiella pneumoniae; identical to SEQ ID NO: 236923

SEQ ID NO: 244785 - DNA, 816 bp, Klebsiella pneumoniae; identical to SEQ ID NO: 220143

SEQ ID NO: 244786 - DNA, 192 bp, Klebsiella pneumoniae
atgagcacgatgtttgccctggttctcaccgtcagcatgctgacgggcggtaatcaggatgtgctgctcggcgtttacgacactgagaatgactgcaaggtagctgcagaagagcaacacgtgaaagctgaatgttatccgctgaaaggtgtactggacgagcatccggccgggttcacggtgcaaatgtag

SEQ ID NO: 244787 - DNA, 156 bp, Klebsiella pneumoniae
atgcagaagaaatgcggttactgccgtaaagcaatcgagggaaaaccagtggtaagcaccctgttgtacctccaggggaaccagctcgcacggaaagaaaaagagtattgctcagaacgttgcgcctcttacgaccagatggcgcacgagggctaa

SEQ ID NO: 244788 - DNA, 1380 bp, Klebsiella pneumoniae
gtgctggccggaaaactggcgccatggcgcacagctgcagaatgcatcgactggtcaattccagcgccaagcattttcaaccgcaaaaagtctctggcagagaatacgctgaagcggatcgcgcgcggcatccaacgctttgttatcgagagcgcgtcgccgtttatcgtgaagtgcaatcacactaccactaaaggcaaatacgattgcttccgggggcaggctctctctgaaccgctgcagacgattacgaaaacccacggttttgcggtcgcagtaccacacctgacaaagtttcgtaacggcgccaccgggcagccagttaccgaaccggtaccaacggtgacggctggcacgtccaagcgcccgggcgggaatggtcatgcgctggggattgttgaggcgggccttgtcccgttcctcgctggcaacggtggcagcgaataccaggctaaaccgcgcccgcttgataaacctgctcacaccatcctgaaagagtcacgagcctgcgtcgtcgctccagttatcgcccggcaattcggtgccagcatcggccaccgggcggacgtgccaaatgcaactatcacggcgggcggtggcggcaaatcgcagttggtgacgccgacgctgattcagatgggatatggcgagcgcccagggcaggagccgcgcgtgctgcaactggacaagcctctgggtactgttaccgccggcggaaacaaattcgcgacggtgagcgcgttcctggcgaagcactacggaggaaattacaccggacccggtgttgggttggatgaaccgacacatgcagtgacgacagttgaccatcatgcagtagttgcggcgcatcttatggtgaacaataccgggcatcctggcggttccgtggaatctcctgcgcatacggttacaactggcaatcaccacgccgttgttgcttctcacctagttaagttacgtggtacttgccgtgacggacagcggactgatgcaccgatgccgaccattaccgctggtggtcagcacgtcggggaagttgaaaccactctcgctgttgagcattacgacgaagagcgtgcgcaacaggtgttagcgttcctgaaagagtactgcggagccgatagtaccgggctggtggaaatcgccggggtaacttaccgaatcgttgatatcggcatgcgtatgcttcagccgcatgagctgtaccgggcgcagggctttccggagtggtacatcatcgatcgggattaccgcggggtgaagtatgcgaaggataagcaggttgcacgctgcggcaatgccgttccgcccccgttcgctgaggcgctggttagggccaatctgccggatctatgtcaacagaagggaatggctgcttaa

SEQ ID NO: 244789 - DNA, 396 bp, Klebsiella pneumoniae; identical to SEQ ID NO: 180578

SEQ ID NO: 244790 - DNA, 1131 bp, Klebsiella pneumoniae; identical to SEQ ID NO: 236934

SEQ ID NO: 244791 - DNA, 921 bp, Klebsiella pneumoniae
atgacaacgaaattaattaacctgccgcacctggcagatatggtctttggcgtgccgcattacgtgacgcggcaaacaatggactccgtgaaagcggtgctcatcccccgtattcaggggatcaccgaagatgccgtcattcagatggcgctgaatccgggtaaatcacctgcagctgagcaggttcagcccaccggcggggtggcagtgatccccgttcacggcattcttgttccacgccgggggcagattacggcgatgtgctccgagctgaccagctacgagcggatccgcgggcagctgcaggcggcattaaacgacccctcaatcagcgaaatcgttctggatattaactccggcggcggcgcagcggtggggtgcaaggagctggccgattacatttatcagtctcgcgacacgaaacccatcacggcgattgtgaactacagcgcgtattccgccgcgtatttcatcgcatcggcctgcagcaaaatcatcgtcagccagaccagtggcgtggggtcgattggtgtgatcatggagcacctcgatacgtcgaagatggaagaaaaaatggggctgacgttcaccaccatttaccggggagataacaaaaataacggcacccaacatgaaccactgagtgaagagtcgctgggtatgttccagggcatgatcgacgaaatgtacgagacgtttacggggtcggtggccgaatatcgcggcctgaatcagcaggccgtcattgatacgcaggcggggctgtattttggccctggcgcggtgtctgccggcctggcggatgaagtctctgacccccaggcggcgatcaatgctatcgcggcaaagtatcagcaaccccgtcaaaaaacctccattcagatgcaggcagccgcgatggacctgcaaaccaaaatgtaa

SEQ ID NO: 244792 - DNA, 567 bp, Klebsiella pneumoniae
ttgggtaaaacttttgggaagcatcatcaaaggcttgtttcaaactcatctgaagctgttagagccttatgttgtaccttagagggttttgaaaaatttcttaataaaagcaaggaaaaagggataacgtttgcagtatttaagggcaaaaaaaatattggtgaacgtgatttatcatttcctcttacaggagaggttttacgcataattccggttgtcattggtagtaaaaaagcaggtgttttacaaacaattatgggcgcggcgttggttgcggttggggttatcgttggatatgtttctggatggaccggtgtaggttgggctgttggttctaagatggcaatgatgggcggtgctatgatgctcggcggcgtcgttcagatgctttccccacagccagcagggctggcccgaaaagaatctgctgacaataaagcgtcctacgcctttgggggcgtgacgaatactgcctctcagggatacccggtccctttgctttatggcaaacgccgaattggcggcgccattatatctgccggtatttacgtagaagaccagcaataa

SEQ ID NO: 244793 - DNA, 612 bp, Klebsiella pneumoniae; identical to SEQ ID NO: 180566

SEQ ID NO: 244794 - DNA, 1521 bp, Klebsiella pneumoniae
atgaaaatcacactaaaaaattttggtccaataagagaattttcaatagatctggacaaagactttcatttgcttattggtcaaaatagtattggtaaatcttatgcaataactgctatatatttaatcgttaaatcattgctgcaacttaaatctagacgctcatttccttttaccccttttgattattatcttgatttcgaacccacgcagcttaaggggagcgataggataaaagtttttaaagaattcgttgatggcaatgatatagaaaaaaatattacaagttttgtaattgaagacttaaaatcacttttctcaatcattctaactaatgaattgacgaattcatttacgaatacgtttacatccttgaataatttacaaaatcagtttaatggtgaacctgctattattgaattgttttgtaattatgtttcaatttcaattaaacttgaagggaatagatttgttgtttctgatattaaaaacgatgataattatcatataaaaaaatcaaaaagaaacagaaatgtgcataaaggggtaaatgcaacatatatttattaccgagaaaataatgccaatcctgacgagtctctggcgcgtttaatcggcgaatatacgcattattttgtccagcgtaattttattaccatggttgcagcattaacctttgaactaaaaaatgtgcattatttaccagcaagtcgatctgggttgtatcaggctttaagtgcttttgggcaaattattgcagagttatctaaaaatagatctttcttgtccaaaaaaattgaacttccaagtatatcagagccagtcagtgattactttataaaattgtctgatattagagtggtaaaaaggaattatgaagataaaaaaataaactttctcgcaaaagaaatagaagactcaattcttgatggtaaggtcgagtttaatccgcaaacaaaacaacttttattctacccgaataatacgaatttacgattagaattgtcctcaacatcttctatggtttcagagttggctccaatagtatcatatttgcgttatgtattaactaaatctgatgaaaatattattagaaaaatgacacaaactactcgggatagcaaaaaagcagaacctagatctcttattatgattgaagagcctgaggctcatctccatcctgaaattcagattcgattaactgaaatattcgcaaaattgattgatgccaatgttaaattgattataacatcacatagcaactttatctttaacaaagtaaataacttggttataaaaaatacatcaaatggttgtactgaaggaatacacaaagataatgtatcttcactggtctttaaaaaaacaaaaactggtagtttagcattgccactttcaatagatgaattaggtattgaggataataatttcggaccagccacagaacagttatttgaagaaaagatggatatttatagcgcaataaatgatgacatggaagatgaggctaataaaaaatga

SEQ ID NO: 244795 - DNA, 567 bp, Klebsiella pneumoniae
atgattcctgctatcttatcctctgaaatattatgtaagttcttgcgagtagacgttaaagaaaataacgtatttattaaattggatgatgatttttattctggggaaggtgagttgatcaatgaaaaaataatcaacttatcagttgatagttattataatagtcttcgcttacccattactccaccatcacccgataatttattggtaatacggaggggagataataaatattctatctatattatcgagcttaaagatgtggctagggtagctagacttgatcatgaaaatataaaaaagaaatacgaaacggcagttgatgactttatgtcagaaagatttaaagactgtttttataaagaggatattaagatagcagacttcaatgtttggatcgtttgtaatagattttcattcttggcagcaaatttaacagacgaagaatatgctaagagagttgtaaataatggtgtaatggaaaagctattgctttctaaaccatataaatttagaggtaaaatatctcctataactttccaactgagtgggacagaagtttgttag

SEQ ID NO: 244796 - DNA, 2154 bp, Klebsiella pneumoniae
atgaacaactatgcgtatcttattaaagccaaagcaaaggctacagattccagaagcttattctgctggttcaccgctaaatctgactcgcgtgctgaacgcaaaattcttgatctcctggaagatgctgatattgaagttggccgtggcgccgaccaccagcttcctatccgcactaactggcatgtcgttgatgatctcccagaagaaggcgtactggatgatacctggtgcgaacgctacgaactcggaggagatgacgggatcacctggggaaaaattgccgcaccagcacctgaagaaaaagccgaggtgttggaacctgcagacgatgccgccgatgaaaatgcggtatatccactagcaacaatgcctttccacactcagttactggctcaattcgtagccgatgaccgtcatacctaccacatcagcattccggagcgtaaccggctgtcaatcctggaaatggatgtcgataaccactcggtgcaggatctgattctggcggcggagaacgtgccggatattaaatcatacgatatgcctgggctttggaaatttaccagcgcgatgaaatctgtattccctgcagaaaagcgccatgagctgggcaagcaagtccagtttgcaaaattatggtttcagacgtctcaccttgatcgcggtctcctcacaaaagaatggacgcgcggtaatttcatcacaacggtcaatcgcactccatctggagcaaacgccggcggcggtaataaaactgaccgactcaccgagctaacggttttggggctggaatatgaaatagccctggggctcattgcgcgcgacaaagagtttgatatctacaatgtcccgatggaaatagatattcaggcgaatttcattatgaacaagtttgataacaaagagtttctggcaacccgcgaattatttatgtccataccaggtggacgagattactcacgcgcctgcaatatcgcaacggtgaaaaccacgcctgtgggtctgtgggaagatcgggttgctcaccgggagcacattaaccacgtaatgacagaaacggaccacgcgcacccggacgagctgatcgtggatattgcctgcggtcgttcttccatgccaatgcctacattactccgcaaagaagacgttacctacgagctcaccagcaaactgctggccgccgaacgtggcgagtttgtcgaaggcataagcgaccctaacgatcccaaatggttacgcgaagacctggcgaaaactcaacaagctgaaatatccaaccctgggaaaggtgagctcgcagctgatgtaggaacagctgaaaaaccgaaaaagaaaacatacgaagaactgcgtgaagaccttgatgaagcgagaaaaaatatccctccccaaaatattcctgtcccggagaccaccagccatgtgcagatggaagaaactggcggtgatgaagccgcggatcatcatgaaatgtcagatagcaaagcggcagttgagcatgctgcgtgcgacgctgagtctggtgatgcgccagttgccgtaaatattgaagccggtcatcataattatgatgatgaatcgccaactgaatatgttcacgtcatggtggatctggaaacgatggggaaaaaacctaatgcccctgtcgtctccatcggtgccgtattatttgacccggcaacggggatcctcggcgaaacattttacaaagttgtcagccttgaatctgctgtttcgtggggtgctgagattgacccctcgacagtcatatggtggttaaaacaatcctctgaagcacgttcggccatagcaaatgatgacgccataaagctggatgatgccctgctcatgttcactgacttcgtcctagagaacgtcaccggaggccgtaaaaaagcccaggtgtgggggaatggtgccacattcgataacgccattttgcgttcgtcatttgatatcgcctgcctcgattgtccgtgggactactggaacgaccgcgacgtcagaacgatggttgaactcggcaaagccattggcttcgatcctaaaatcgccatcccgttcgaaggtgaccggcataacgcgctggcggatgcacagcaccaggcacggtacgtttctgctatctggcagcgcctgattaaaaactga

SEQ ID NO: 244797 - DNA, 1284 bp, Klebsiella pneumoniae
atgaccgcagaaatagctgtttttaacaaatccgcagttgctcttgcagcagattcagctgtcacaatatcaggtggcggcaaacacaaaatttacaacggagctgaaaagctttttgcgcttaccaaacaccatcctgtgggggtcatggtgtacggcagtggtgatttatgttcagcgccatgggagctcgtaatcaaagcatatcgtaagaaattagaaagaaatcattttgatactcttgaagattatgctgctgatttttttgagtttttagaagaatcaacatgtatcgttacgccaggtatgagagaggggcatctttaccagtacttgtccgagggagtcttcaacctgttgatagagtcatttgctgcaaaaaaagaagacgcttactggaaccctttggatcgacaactctttttcacggagctcgaagcgtattgccaggagctcatggaacaccttgcaggtactgaatttttagatagtttttccgatacagatctggctgaagctcgagaatactgtaatgaattgacagtacgaattgtcgcggaaaagctatcagctataccgactgaagaaattccaaacacctttcttcaatctatatgcaatatattcgcagcaatgatctgtaaagttaatgacttaggaaatgttacaggtattgtttttgctggctatggtgagaccgattattatccaaaagttttatcttataatgtgtgcggattcttcaatgcaaaggtaagaagatttatcatttctgaaaagtgttctgccaatggtgaaagtggtgtgacgccgttcgcacaagatgaagaggtcggtgcattcttgcagggtgcaagtagcacattgattggcgaacttcataatgagtaccaaaattctatccgaaacttactggatgggattgacggagtagtcacaagaatggtaccaaatgataagcttgaagagacacagggtgctatagttgagttagttcgtagcactgttgctgaatgtgaccgcaggatcaatgatttcgtacacgaaaattatgtaagaaaggtcgttgatatgattaagtttctgcctaaacaagatctagcatacatggcagagtctttggtcaatttgacagctttcaagcgaaaggtttcagacgattctgagaccgttggtggccctatcgatgttgcagtcatctcaaaggccgatggattcatctgggttaagcgtaagcattactttgctcaagacttgaaccaccactattttgctcgttcctaa

SEQ ID NO: 244798 - DNA, 381 bp, Klebsiella pneumoniae
atgatagagctggcgattaagggtgcgctggagcgcatcaccggcatgaatgcgtatccgcttttactgccggacacggtccaggaaggggtgacatatcagcgtatttcggatgcgccggtaggggctggcctggccagaacggggctttcctctgtccgcatacaggtggcgatttatctgatcgataactacagccgcctgctgatgctggataagcagctttggtcagaatggaaagccattgtgcaaagccgtcttgaggattgtccggtcagttacgtgacgcgcggcagtatccagcaggacaagatcacgctgaccagtggtcgcatccagtaccgtctggtgcgcgactttatattcaccactccggagtaa

SEQ ID NO: 244799 - DNA, 414 bp, Klebsiella pneumoniae
atgcgcattgagatgaaattcccgtcggggaaggattttgaacgcctgatttccgagatggacaagaaggtcagcaccaggttgttgcgtgatgccgggcgccgggcgctggccatcgtgcaggaagatatgcaacaaaacgccggctacgacgagttaagcggcgggccgcacatgcgcgacacgatcaaaatccgtagctcaaccagcgccgcaaagagcgagcgctacgggactctcatcacgtttcgagtcggtcccagcaaagcacatcacatgaaagcgctggcgcaggagttcggcacggtgaaacaggtggctaagccgtttatccgtccggcgctggattacaacgtcgaaaaagtgctgtcgatactggcagctgaaattcgctatgggctggaaggccggtag

SEQ ID NO: 244800 - DNA, 468 bp, Klebsiella pneumoniae
atgggtgaagacgtcattaaaagcccctcggaatatgcaagcattccggcgggaacccgcacgtactggggtatgaaaggcacgctgaagacggcggcaaaactactgcaaagtacgatggccatcggtgccgtaggcaaaaagggcactttcatgaaggtgacacgcctgattgaccgtgatccgaaatatatggccgatatgggtgagggtgaggataaaaccttggtgtttattgccgatccgacggatgcgaatcagcaggcgttgctggaagcggcggaggccaataagaccgtggtgtttttcttcgacttcccaaatgggcgctcggcggaaatggagctggtgctgtccggatgggcacagcaggccgttgaccagcctgatggtaaagtcctgcaggacgaggtatacggcaagcagaacggcggcgtgaagtggactaccaatagtggtagtgaataa

SEQ ID NO: 244801 - DNA, 345 bp, Klebsiella pneumoniae
gtgaattatcaaaaccttctcaaccctattatcaaagcccacccgattacgctgcttggtcagcagatctttattcgccgtctgacgcaggaggaactatgggattatgaagccgatctgcaggcgctggaaaagagcgatgacaacgctcgccagacctctatccgtggcatcacactgtttctctctgcgctggtaaatgaggacggaagccgcccggcagcggatgaactcccggccgcagaggcttttctgtcagcccattcgggagcagatctgctggaggcggtcattgccgtacagcgtcatgctatcggcacactggaagatgccaaaaaaaactaa

SEQ ID NO: 244802 - DNA, 2997 bp, Klebsiella pneumoniae
atggctgatgtagcatcactcgctgtcgcgttgcacctcaaccgtgcgacgtttaattcgcagttcgctgacgcaatgcgtcaggcggatggcaacgcacagcagttcaacaaaaaagcacaggctgatgcggcaaaaactgaggctgcctttaaggggatcggcgtaggtgtaaaagccgctgatgctgaattttccaggctggataaacgtatcgaaaagctggggtcactaaggcttaccgggctggatgagatgcgtaacgtactggcgaatctgtctgccggtagtggcgttaccggcagcagtttcaccactgcggcaatctcggcgctgaccgaaggtatgagtactgcgctgaccagtagcacgcaaagtctggagctacagcgacaggctcagattgccgcatcgcaggcggcggtagatggcgcgcaggcgtctatcaacaatgcccgcacgctgcgagaagaggcactggcgcggcagaaagcagccgtacaaaccattcaggcagcgcaggcggatcgcgagaaggcgtttgcgctggatgagtattatgccaaacaggcagaggtgaataagcagtatggcatcacggccagctatgaagcagagcacgcgaaaaacgcccgcaccatcagcgaggccaatatagctgaggcacgcgggaaaaagagcctggcagaagccacaaaagaggttctggccgcagatatcgctgagtctgacgccaggcgtaccctgaccacctcaacgcgaacgctggccacggccagccaggagctgacgttccggcagcgcgcagcggcggcggcggcgggaacactgcgtggcgccctggcgctggtcggtggcccggtcgggatcggtatcatggcgatcgccggcgcggtgacgatgctctattcgtcgttttcaaagtctcaggaaactatcagcggctacagcaatgcgttattcaaatcagggcagcagtcgattatgtcggttcagtatctccagagcctgcagtcacagctgggagatactgacggtgccgtaaaagcgatcaccgcgtctgttaatgccggattcggtggtgaaatgctggaccgcgttgccggacttggcgcccggatggaagagctggggcagagttcgggggatctggtctcgatgctcacgaatctgcagggcgatcctgtccaggcgatggagaagctgaacaatcagggaattcagctaaacgcgacgtttatcgaccagatagtcacgctgcagcgccagggcagggaaagtgaggctacggcgctcctgcaaaagcaggctatggccgagctggaaaagcagataaaggatcaggaagataaggttgacgggctgaaaggggcctggaaatcgctgaaggattatgtcagcagcgcgtttaaaacaatgggtgacgcccagatggccacagcccaggcgcaggcgtcagcattgggaataaacctgacacccagcccggacccggcgataaaacagcgcgaagaggtggaaaggctgcggaaggagcaagagaagctgcggaaagatacagctgatcgcctgaaggccgaaaataccgttcaaggactgatggctgctggcgtgacaaaagagaagcagcgcgccgatgcactggcggttctcaatcgcactctcaagaaaggaacggaagagtacgcgcaggcgttacgcggtatagataaattgtacggggagaagcagaagaaaccggcggcgtacaaagatgaccaggccacccagcgtctgcagagtctgcgcgagcaggaatcggttcttcgtcagcaaaaccagcagaccgttaacctgaccggttcagagcgaaagctgctgcagttcaaccaggagatcgccgatctcaaggcaaaaaaaatcctgaccgccgggcagcgcagcattctcaatgctgagcaggagctgcgcgctcagctgaacatcaacgtacagctggagaaggcgaacgtgcagcgccagctgtcgctgaaaatgcaacaggagaataatgagctgcaccgctcaaccattcagctacaggccgagatggatgccaacgtggccaggatgacgatgagcagcgccgcctatgacctgatggcgaaggagcagcaggtcaggtcgaaattcgcgaagttgcgcgaggatgcagatagggattttaaatcagtaaacccaaccatttataaagcaaaaactgcagcattgaacgctgaggaacaaaagcaactgagcatagttcgcaatggtgccagggataaagcgcagattgagggttcctggaccgagggattacgagccgggctgcgtgaatggggcgccgatgcaaccaacatttatgcccaggttcgtgacacctccgtcaatgctatggacagtatggctaactcgatctggcaaatggcatcgcggggtaaatcgtcatttaaggagatggcgctgtctatcattgacgatattgggcagatgataacaaaaatgctcttttttcagtccatccgatctgcaggctcagctatgtcggggtccgggattggcatcctcgcggattttggcgggtttctgtctgggttctccggcggcgggtataccggtgacggcgggaagtatgaggttgccgggccagtccaccggggtgagtgggttgtgccacaggaggtggttaaaaggcctggcatgctcagctttctgaaccagttaacttacggcagtggctacgccaacggtgggctggctggcgcgccgagcggggcgctgccgatgagcggccagagccagcgcgcagcagggggaataacggttaatatcccgttacaggtggtcaatagcaatggtaatcaggaccagtccgggaagcggtcagagagtggtatcgctcagatgaagcaacaaatcattcagatagttttgagcaccctggataaggaaatgggtaacggtgggatgatcgatgtaaaactgaggagcatgcgctaa

SEQ ID NO: 244803 - DNA, 351 bp, Klebsiella pneumoniae
atggccgcactggaaacgttcgactggtcgccgctgaatggtcccactgcggatattaaatatgcgacgcggtccgtgaaatatggtgatggttatgagcaggtcactggtgatggtattaatcctgaatcgcaatcatggccactgacattcaccgactacagggaggaggtcatgccgatcctgcagtttttgcgccgtcatggcgaaacacgtgcattcatatgggttaatccgctgggcgagcgggggctataccgtgcgacacagataaagcctcaactgcttgattttgcgcgcatgaccgttactgttacgtttgtgacggcataccgagccgcaccgatataa

SEQ ID NO: 244804 - DNA, 360 bp, Klebsiella pneumoniae
atgcaaaaaatggtactggcgctggcaagcatcgccgttcttttttccggtacagcgacagcacgtgagttaacggcgtcggaaaaaaaggtcatcgaagagtctgcgaagcagaagctgaaagatccggatagcgccaaaatttattggcaaccggatatgggtggggatgcttattgcgctcaaattaacgccaaaaattcctatggaggttacgcagggaaagcgcttctgttggcaggtgttaaacgtgatagccaagggaaaatcattgaagctggagtatctattgacagtgatgatatagccgaactgatgatgccaatttgcaccgatgccggctaccactttccccgttaa

SEQ ID NO: 244805 - DNA, 750 bp, Klebsiella pneumoniae
atgggcattgcagccgacgatcaaaaactggaacccggtaacgttatcactctgttcgaagtggatggcaccacttttggtgcagacgtactgtattttcacaaccacgctatcccgtataccgaagaagaaattatcgccgctggcagcaatgcggaaaagctaacgggcaaaccgatttactggcagggcgtgaaatatacgctctggccatgtgagatcgaggacgttgagtccaacggtgaaggttcgccagcttcccccaagctgtccattgcgaacctggatggctcaatcagcgcgttatgctacatgttccaggatatgaagcaggcgaaggtaacggttcaccgcacgtatgcgcactatctcgatgccaggaacttccctgacggcaacccacaggctgacccgacagcagagcagattgatgttttttacattgacagtaaatccagcgatgacgatgaacaggtccagttcaaacttagctcgccggtcgacgttaccggccagaagttgcctgcacgccagatgaccaaccgttgtgcctggtgcatgcagggccagtaccgtggtgctgactgcggctataccggcacgcgttattacgacaaattcggcaatcccgtagacaacccggcactggacgtctgcccgggaacaatcgcgggttgtaagttacgttttggtgatgatgccatgctgccgtttggcggattcccggctattggcctgctgaggatgtag

SEQ ID NO: 244806 - DNA, 708 bp, Klebsiella pneumoniae
atgctgagccagagactgaaaaccgctattgaggcgcacgccgcggatgtttacccgaacgaatgctgtggcctgattatccgggtcgggcggcagcggcgatatattcgctgcgaaaacagtcatgaaatgccgacggagcattttcggatcgcagccggtgactggattgccgcagaagatgccggagacgtgctggccgtagtgcattcgcatccggatgccggtccgcacgcatccgccgaggacctgcagggctgccagaaaacaggtctgccgtggatcattatcagctggccaggaggcgactacaccgtcacgacgccggatgattccccgcctcttctgaaccgtccgtttatccacggtagctgggattgctacggactggtccgcgactggtatatgcaggagcgtggtatcgaactgcctgattttcccagagaggacaactggtggacccggggggaaaacctgtatgtgcggcactatgcggaggccgggttttattctcacgccagcgagctgcaggcaggcgatgtgatcctcatgcagtacagagcggacgaaatcaaccacgccggcatttacctgggcaacggaaaaatgttgcaccacatgtatggccagctgagtggtgaggttccatacggtgggatctggcgggagcgaaccatgctgacgctgaggcataaaaatgacgactaa

SEQ ID NO: 244807 - DNA, 600 bp, Klebsiella pneumoniae
atgacgactaatacgatagagaaaatggttctggttcgcctgtacggcaagctgggcaagttgttcggccgggagcatcgcctgtcggtatcttctgtacgggaggctatccgcgcgctgtgcatcatggttccaggactggaacgatggctggagaccagcgagggacgtggagtcacgtacatggtctttaacggtgaaaaaaacctgagccaggatgacctgtttctgaatggtgtgcatgacgtaatcaaaattgcgcctgtgattattggcagcaaaaaagcaggggtgttccagaccatctttggtgccgtactcgttgccgttggtatggtgctgagttttacccctgccgctgctgcctcgccgttcctctacaaaatgggggcggcgatgatgctgggcggcgttgtacaaatgctggcgcccagcggtacccagggtatgacaacggatcgggatacgaaaaaatcgtactcatttggtgcgcctgctaatcaggtcgctgccggcaacggtgtaccgatcttgtatggcctgcgtgaaataggcggcgtcattatcagtggcggtatttataccgaagaacagcaataa

SEQ ID NO: 244808 - DNA, 639 bp, Klebsiella pneumoniae
atgacaacattagaaagagcattatatacaatatcaaaacacaaggtaatttcttcttgcatccttatagtaattgcattggtacttttatcgcctttattactatatttttatcagttccatagtgagctatcctctcaacccgaaaaatggtcattttttggttcttactttggcggtatttacggccccatcattacattaattagcgtatttgtattagcaataacagtcatagaaatcaatgaatcaaacaaagcaagtattaatgagataaaacaaaaaacacgcatagatgaagaagttattttaaagatctgtaggaaaaaatttaaaataaatgaaaaaatagtatttgagaacgaagttgatatcttatatgaaattttatatagaattgataatatgccaaacgccgaattatcagagagagcgaaaggtatttttagaggagttatacgtaataatgagagattttggattgaatgttacatacactgttttagaacagatcttgttccctatctgtcgtcatggggcaagttcagtcagataccgctaaaactcctaagtctaatgccagaatcgttacaaaaagatggcgataaaatggcggtagaaatggcggacaatgggtaa

SEQ ID NO: 244809 - DNA, 1611 bp, Klebsiella pneumoniae
atgcaagttaatagaggcacagtttggcatacgtacacgacacaatcaccagaatatcaagatgccgaaaaattcgcttccgatctgattggcaccggcttattccttgcgattctaacccccgacaacacatttaaatatctcattgacaacacgtctgcatcaatcaagttaagcatggagttcgagaataacgataatgcagtaacagttaagggaggtggaaacgtccaggaaacagacacctgttccctaacaaaactttcctttttaaattgcattaacattagactttctgaaaaaaaactgttccacacaacaaacaacaaatactctgaaaacataatttgctgtaaaaaaccaattttaataaaaaccgacgaaagagagttcctcttacttccaatagtcaggctttacaggaacggcattgcacacattacatttatagacatgattgaacgtaatgaggaattaacccccttcataaatgaaatattacagctcccacataaaataaaccactctattacaacaagcctagagtttgctaggttatcactcttgcttgattgttcgggcatgtcacttttaaacaggatgaaaattaatagagcaacaaaggaaagcctagcaatattatccgacaatgcagaaagttttgaaatcaatgatgataaaataacaggcagttacgttaattacacagacctactagatataaaacataatctaagtgatatctcaagatacttgatagccataacatttaatgtagttaaaaagaaagggtttaaggattttatttttggacaaaacctatctgatttttataatttttggcaggggaagcctagcatttatatatttgaacatgaagaccaatgtttaagcgccttagataattataataaaaacagaaagttaatttactcattactaggaaagactcattttttagcaaatgcaaaatacaccagagattatatagattatcgtgcatttgatgatttcaatttcttttctgaacaaggaattgcactaaccatcctatccagaggagttggacaagagaagcttactggtgagtatacggaacaaaatctgatgtgggacaatcaattaaaaagtgaactcagagagttcatttcattcttttatgagtcaaaaacgaataaaatagagaatgaaaggacgcatcttggacttgcaaaaactcaagaggatattattaaatttgaagaatggcttcgtatattttctagaaaatatggtgagatacaggagtttgcacttaacaccttagaggcaaaagatataaaaaaatcacgacacaacatcatcgaaatgataagagcaaaaatgctagtcataaaacttacagatgcagaaattaacgagagaattaacagaaaaataaccatggcatttggtttgattgcatcaacctcgctttccccattcataacaaagcctttatcaaatacgctaggaattaatgagataataaataaatatggattcaaaaactatgaagatgctatttattttgttttctctctaattattgtatggttaatcataaaaacaatgaacttaaagataaaataa

SEQ ID NO: 244810 - DNA, 828 bp, Klebsiella pneumoniae
atgactggcgttgttaattatgatgtggttatcaagagtggtgaagagcccgttgatatggattatgcgttggatactttggggggagcatctgaagtcacatgtttactagcagaagcaatattgcaaaaaaaagtagtaaaaagaagaacttctgctaacaatgcgcgagccgttttacatcagagcttccaaagctcctatggacaaaactttgcattagctatagatgatccaataatgaaagctcgtttagttgaaataacaaatccagtacttgcagagattatgggcttttacatagctgaagcaatgtatatggaaccttctgcgttgtcagcgcgtgcaaggcattatatagatgaactcgactatttggaggatgaaattgtaagccggattaggaatcctttaatccgtatgcacaaaataaattatcgttgcaattgggatgttgatttcaactttaaaccagatggtagacaaagaaaaattgtgacattaaacacaaggactgctgccaatttaactcatacctcagttcaaagagagagatttaatattgttgcgatggttacaaggtttaattcacgaactgggaacggacgattagttctccgggatgagaatgaaacagtcgcttttggttttgctatgccactaggaatggtaccgcccgcgcagaagaaaatggtttctttgaatctgcataataataacggtagaggtgataattacatatatctaagtatgacggtaagcagagtggtaattatgagtggagagactgtaaaatatgcagtgcactcggttcgtgtattggaataa

SEQ ID NO: 244811 - DNA, 738 bp, Klebsiella pneumoniae
atgaataagataaaaggcatatgtgggttgatactggtagctgcttgggctggctactacatccactttggtatagatggaagcctctcccaaaaaactgaagtttgggggcagtttggtgattatgtaggtggggttgttaatcctatacttagttttgtaactatatatttgttgattaattccattgggttacagagagaatccaatgataacttgactagtgaaattaaaagacaggagaaactagaggaatataaaaaatttgaacttcgcttttttcgcttgatagaatctcaagaggaaagttttagtcgcttcaaaatctgcatctcccaaaaagaaaatgatgatgatcatcttgattcaaatgaagggattttgaatggtggagctgctgtgacattcattgaagattgtttgttaccgcttaaagaggcaggggttagtaaagaaaggataactgaatggcttcatggtttggatgatgatggttcatacttttcactggtaaggcgtttttatctcattcttaaattagtcgatgctaatacgcttactaaaagtgagcgggatgaaatgtatgagacattagttaacctaactgatattaaagtgattagcataattgcaatattaagcctacattatgattggtatgcaattaaatacattaaggcgacaaaaattcttgataaagaaggggttagggagtttgttaatatgtataaggtttga

SEQ ID NO: 244812 - DNA, 225 bp, Klebsiella pneumoniae
atgtcggcgcgtggcgccttatccgggctacgctgttgcgccactcttgtgccgttattttgccggatggcggctgcgccttacccggcctacaaaaccagggctgaccgtaccgccctcgcggcagaccccacgttcagcgccgccgggcagttattgtgcctgctgctgcgcttgcgccagctggcggacgatcgcctcgcgccgcgcatccctttccggtag

SEQ ID NO: 244813 - DNA, 1554 bp, Klebsiella pneumoniae
atgggcattcaaagtgaattgatagaattccttgagcgcagcatcaaagacggtgcgaataaggccagggatattgaaattgtaaaattctactatggcctaaatgaatcgccttggcccacattagaggaaactgcaagtcgatttggtattggtaccagggaaagaattaggcaattactaaattccaaattccgaaacaatgtcagccaaaactctattccgtcgcttaacgattttattcaaaatttgcagtccagagaatattggcggctctcagacttagaagaacaaacttataaatccggactggtcgggaaggaaagccacttaaagggaatatttaatctaattgaggatgtaaaccttgattgtgggttcgaattctacacccctgagttaaatcgagccacaagaaactcgatcgtaactagtaaaaacatattcttgattaggaattccagtatcaagagtatcgaaaagctgatcaaaaaagcaaaagatctcccgggtcgctgcggtattgcaaacttaaattatctaaaagaagagattggtcagtactattctttcgtttcattgctaattgcaagcttgcctacgtcttgggttagagtgattggcgatgattactggtatatttttgagaatagagacaacacaattatcaactacagcgaaaaggtgtttggtatttttgaaagctgtgacccatctagactggcagagacatatagaaatgcccttgacggaaggagctataagtatccgtatccacctgcagaaattatcgatgactacttaagaagttctatatatatggctaacactcattctggactgaagtttatcggtgaaactacaaaacttaatgagatcgaaaaggatttaatatctttttttaactcttccggaaacgcgtcatttccaacgctttataaatacttatcgcaaaaaggctatggaaggccgcacatattaaaaactacgaatttttcaccattagtatatgtagataagaccaaaggcagaaagcattatatgtacagcctagttggtcatcgaatttctgcacagaataacacttcaggaatggataaatatgaattttatcttcgtagattaagagctcttctcgatgttggaacggatgagacaagagagcagaaagcaagaaaagagcagcatatactacaagagtggctttttatggataaaactcatgaaacttgcgctatctgcggacaagagttcagtgtgagaactttagtaacggcacataaaaaaccgagatccgactgcaatgatgcggaacgcttagatccatatattgttatgcctgtatgtttgatggggtgtgattatctttacgaaaatatgtatatttatatcgacggtgctgaaattaaacgtggtctaacgctttcgaacgcaaggactgaatcaaaagtcattgatgaccttgttgggcggaaagttgaaccaaaatggcttttaggaaatcagtcttattttcgttcgcctaacaaagacttgctgcggataagtagctga

SEQ ID NO: 244814 - DNA, 3630 bp, Klebsiella pneumoniae
atgagtgatgatagctataaatttcaaaagttaacgccgttcagcgatgttgagctgggtgtatataaaaatgcgatagattttgtttttgccaatgacgatctaaaaaatgttgcgatatcagggcaatatagcgcagggaaaagcagccttgtcgaatcctataagaaaagtcattcgaatataaagtttgttcatatctcacttgctcatttcagagcgatggaggaaactgaaactaatgaaccaagtaaagatataaatgaaaccgcgttagaaggtaaaattcttaatcagttaattcaccaaattaatgctgatgatattccccagactcattttaaagtaaagaaaaaaataaaaacgagcagcgttgtgataaataccatcttcacggtgttattgatcgctacggtattacatatcactctatttaataagtggtcgaagtatgtttcacttttatctgatggtgatttaaagacactacttacattatcaactaaatacgatacgcttttaattagtgggtttatatgtactatcctatcttgtgtttttatttacaagttaataaaaactcaaaagaatcgtaatgttcttaaaaaaataaatttacagggcaatgaaatagagatttttgaagaaagtaaagagtcttattttgataggtatttaaatgaagtattgtaccttttcgagaacgttgatgctgatgcgattatttttgaagatatggaccgttttaatagtaataatatctttgaacgtcttcatgaggtgaatagactggttaatattcaacggggcatagcagggtacaaaaaatcgacgttacgttttatttacttacttcgtgatgacatcttcatttcgaaggatagaaccaaattctttgattatatcattccagttattcctgttgttgatagttctaactcttacgatcagtttatctcacattttgatgatggtggtattctcaagttgttcaatgaaagatttctacaagggatgtcactatatattgatgatatgagaatattgaagaatatttataatgaatttcaaatttactataataaattaaatacgacagagcttgactgtaataaaatgctggccattattgcctataaaaatattttcccacgagattttagtgagttgcaacttaatcaaggtatggtttttaccatatttagtgaaaaggataatcttattgtaaaagaaataagagaaatagaaaaagacattagcgatagaaaaaaagagattgaggtaatcaacggtgaaatactcaattctagtcaggaggttgatgccatatatgataaggaactgtctaaatataataattcttactatcatcaggctgagaaagctgatatagaaaagagaagggcggctagaaaagaaagtgttgaaaataaaatcaatgggaaaatagaagaaatcaatgaacttatatcaagattaagagagaatttggtttattctaggaataaaaagcttaaagaaataataacaagagaaaatattgatgaaatttttaagctcacctataccaatgaaattggagaaaaaagagattttaatgaaataaaaagcagtgagtatttcgacctgcttaaataccttattcgtgatggctatattgatgaaacctatgccgactacatgacctatttttatgaaaatagcctgagtcgaattgataagatgtttttacgcagcattaccgataaaaaaggcaaagagttcacttatcaactcaagaaccccaaactggtcgttgcccgccttcgagaagttgattttgaacaggaagaggcgcttaattttgatctattagcttatctgcttcaaacgccaacccaagtaaacttaataaaacgtttattcaaacaactaagaaaagatagaagagttgagtttattcgtggctactttgaaactgagagggttcagccaggtttcattaatcgattaaatacgcagtggcctgagttcttttcttatgcgctgacagagagtgaattttctgctgattgggttagacgctactctataggcacattttattattctgacagtaacgacattgaggccattaacattgataattgtctgactggttacctctcggattcggcggattatttggcaatatcagagccgaaggttgagaagttaattagtggttttaagttgcttaacgtctcttttgtcagtattaaatttgaaaacgcaaataaagtactctttgatgcggtttatcagcattcactttatgatattaattttgccaacctgaccttaatgctaagtaaggtttacacgcttaacagtgaagatgatattcgccataagaactatacactagtgatgtcacagcctgattcacccttggctagttatgttaataaccatattagtgactatctggatatggttttatctagttgtggtggttcaatcgtggatgatgaagccattgttttatccgttcttaataatgagaaaatatctgatgaacaaaaagggcagtatataaactctttgcaaactttcgtgacttctctgagtgaggttgagagcgaatccttatggtcatctttgttggataaagatagagctgtttgctctgaggaaaatattgtctcttattttgaacatgttgatggactggatgagtcacttatcgaatttatcaatagaactaatgtagagctgaaatttcaaaatattaacattgataatgagcttaaaaacaaattatttaagtcgattgttatctgtaatgatttatcaaatgataaatatgaaaaattaatttgttcactaaatcttatttataaaacctcctttagcgctagtaatatcgcgagtgataagttcaaaatattagtggataaaaatattattcgtatgagtgttgtctcacttaatttcatacgagataactattcggagcaacttttctattatattcataagaatatcagggcatacgttgaattaatgacgattgataactttattttggatgaggctatatcaatactttcttggcaagttgatgatgatttgaaagttaaactactcgagtttgttaaaacaccgttggctattcatggtaagaattactctcaggtcgttaatgattatattttagagaataattttaaaccagatgaacttctaatcttgtcgtcatcttataaaacttggggaacctctactcagtcgctcatcttgagtcgggcaatacaggatatatcagcattgatagcaagccctaatgatgtttctgaaccattactaaaaaacctgtttgtggcagagggactgaatatgcagaataaaatagcactgctaatcgctttgttgccgggtaaggatttgagtaagacgacttgcaaagagtatcttgatctgcttggtttatcggagttcagtaaaattttagggcgaggcaaacctaaaattgaagttgattcaactaatcaaagtttattaacagcattaagagataaccacttcttctctgattttgaggtggatgatgaaaatcccacttattataaaataacaaggcggcgctctatgtttggctcagatacatag

SEQ ID NO: 244815 - DNA, 897 bp, Klebsiella pneumoniae
atgacggtcgcccagtgtctcgactactggttcgacaactacgtctctacaactctcagagaaaagacccaggcactttaccgatcaacggttatgaagcgcatgcatgacgccttccctaatcgtccggcatcttctatcacggttaagcaatgggttgacctgcttaccgaagaagaaaaagataatccacgccgagcaaggcaggtgctaagtcaactaagatcagcaattagttggtgcatgcggcgtcagttgatagatagttgcgcaattatgagcatcaagccaagggacttcggctcccgcgctgaggtaggggatcgggtactgtcgtatcacgaactggctaagatttggcttgctattgaaagaagccgtgcgtctacgtcaaataagctccttcatcagatgcttatgctgtggggggcgaggctctcagagcttaggctggcaacaaagacagaatttgacctgctggacaacgtatggaccgtaccgaaagagcatagcaagatgggtaatgttatccgccgtccaatcttcgaacaaattaagccttttctcgaaaaggccatgacaacgtacaatgatgttcttttccctggagaagacataaacaaaccgatcagcatcgctgcagccaaccgattcgtaaatagaataaggggagggatggatctaggttactggcgaacacatgatttcagaagaacgcttgttacacgtctgtccgagatgaatgtcgagcctcatgttactgagcgaatgctcggtcatgaacttggcgggataatgtccgtatacaataaacacgattggatagaggctcagcgcaaagcgtatgagcttcacgctgataaattgttctggcacatcaggagcatttctgattaa

SEQ ID NO: 244816 - DNA, 192 bp, Klebsiella pneumoniae; identical to SEQ ID NO: 6974

SEQ ID NO: 244817 - DNA, 783 bp, Klebsiella pneumoniae
atgaccactattaccaaagaacgtattgaattgttcattaaaaatccgcttgaaaacgggcttactcgtggcgaacaaatggaactggcacgaattgcactggcatcactggaacgcgaactgattcgccacgagcatgccaaatggtctgactccacatttggctgcgttggccccattggtccactgaaacacctctcaaaagaggctctggaagccgcagccgaaccagacgatctcagcgagtgggctgatatacatttcctgttgtgggatgcacagcgccgtgctggcatcagcgatgctgaaattaccgctgctatggaagataaattgaagatcaacatggagcgccagtggcctgaaccaaaagatggtgagcctcgcttgcacattaaagaacccggcaactctccggtaattccggatggtttatccacggtatgcgctgaggcttatcaggttgtaggagttatggcagatgcgcttggtgtattcggtgatgcagcagtacagaaagttctggataacctgtcacagcaaaaacttgttcacagagatgtgctgccgttctcgcttccggtaactccgtatgtctggatgagctgtagtgagcgaatgccggatgacgcgcagtggtgcgtagttgaagccgcagacgggtattacgtgcaatgctggtctgaaggtcaaggatggcttggagatgacatcagcctacgtaattgcgatgtaatcagatggatgccgattcctgagccaccgcagcaggatggtgaatga

SEQ ID NO: 244818 - DNA, 210 bp, Klebsiella pneumoniae
atggctattgccgcaagttacaccatgcatctctactgtgattgtcgccagtgtacaaatggtaaatatcaaacgccagacttcggtgaatatatcggtacgtcatgggctggctgtgcaaaagaggcgcgcaaggatggctggcgaataagcaaagacaaaacgcgtgcttttgcgcccgggcataaagttttgaggattaacaaatga

SEQ ID NO: 244819 - DNA, 510 bp, Klebsiella pneumoniae
atgaacaagattgactatcaggcactgcgtgaagcggcagagaaagccggtgaagataagtggcaggctaaaaaaataaatggtgattttttcgttattcgtcacggtagctatacaagacagcatggctacacatcgtatcaacccattgcggagattgattgtaagccagtccgggattttgttgccaaggctaatccggctaccgtgctggaattactggatgaactggaagcagcaaaaaagcgcattgcagaactggaaagcaacgaagtccgtgaagtcggaaatcagtttcttgttgttcgccatcctgggaaaactcctgtcatcaagcactgcactggtgacctggaagagtttctgcggaagttaatcgaacaagacccgttagtaactatcgacatcattacgcatcgctattacgggattggcggtcaatgggttcaggatgcagttgagtatctgcatatgatgtctgacgctggcattcgcatcaaaggagagtga

SEQ ID NO: 244820 - DNA, 387 bp, Klebsiella pneumoniae
atgaaacaaatgtcactaattgagatggatggttttctgaaaggtaaatgcatcccacgagatttaaaggttaacgaaacaaacgctgaatatctggtgcgtaaatttgctgaagcggaggccaagtgcgcggcgctggcagcggagaatgcggcgcttaaacagtcggagaaggaatttaataacttctgtcgtcaggagtactacggttgggaggacaacttcacggaaaccccagccaccgatgctttcctggctgaagtacgggcgcagggtgtggagatggctatggagcatatgcagtcgagcggttcgttaacatttggagattgctacatatcacttaacgagttcgccgcagagcttcgcaaaggaggtaaccagtga

SEQ ID NO: 244821 - DNA, 294 bp, Klebsiella pneumoniae
atgccagcgcctctgtatggtgcggatgacccgcgccgctgttccggcaattccgtatcggaggtgctggataaattcagaaaaaactacgacctgataatgtcgctaccgcaggaaacgaaagaggaaaaggaatttcgccattgtatatggcttgcagagaaagaagaacgcgagcgaatttaccagacatcaatccgaccattccgcaaagccacatatacccacttccctgaaattgacccgcgcctgcgtaattaccgctcacgctatggcgctatcagtaatgactga

SEQ ID NO: 244822 - DNA, 549 bp, Klebsiella pneumoniae
atgaatcacttaatggttgaccttgaaacaatgggcaacgggccatacgcgccagttatttctattggggcggtattctttgacccgaataccggagaaacaggagaagagttctcggtaaatatctcgcttgagtcatcaatgcgatatcgggcgcgtcctgacgcttcaacgattttatggtggatggaacagagtgaagaagccagaaaatcgctaaccagcaacactcaggagctttcaacggctctttcatggttatctgaattcatcataaagaacgctaaccacaaattcgttcaggtttgggggaatggagcatcatttgactgcgttattctccgcaacagttattcgctgacagggcagccagttccgtggcagtggtggaatgaccgcgacgtaagaacaatcgtcgaacttgggaaagtaataggattcgaccctaagcgagatatgccattcaaaggaactcgccacaacgcgcttgatgatgccattcaccaagccaaatacgtttcagcgatctggaaaaagttagctaaataa

SEQ ID NO: 244823 - DNA, 516 bp, Klebsiella pneumoniae
atggcaagcagaggcgtaaataaggtgatcattattggtcgccttgggcatgatccagaaatcagatattcaccatcaggaacggcatttgcaaaccttacagttgctacgtcagaacaatggcgtgataagcaaactggagagcaaaaggagcagacggagtggcaccgtgtggtaatgagcgggaaactggcagaaattgccagcgaatatctgcgaaaaggctctgaggtttatcttgaaggcaaattgcggacaagaaaatggcaggatcaaagcggacaggatcggttcactaccgaagttatcgtgggcgttggtggaaccatgcaaatgcttggtggcaagcaaggaagcaatgaacagtcttcacctcagcgaaataacggccagcaacaaagacagcaatctcagcagcaggggaatcacagcgaaccacctatggattttgacgacgatataccctttgcgccagtaactctccccttccctcgtcacgctattcacgcaatttaa

SEQ ID NO: 244824 - DNA, 708 bp, Klebsiella pneumoniae
atggatttgaacaaattcgatgagccattcagccctgaagatatcgaatggcgaatacagcaaagcggtaaaacacgcgatggcaaggtgtgggctatggtgctggcttatgtcacgaacagggcaatcatgaaacgcctggacgatgtttgcggcaaagcaggatggcgcaatgaataccgcgatattcccaacaacggaggcgttgaatgcggcatatcaatcaggattgattccgaatgggtaaccaaatgggatgctgctgaaaacacgcaggtagaagccgtcaaaggtggtcgttccggtgcaatgaagcgcgctgccgttcagtggggaatcggtcggtatctgtataaccttgaggaaggtttcgcacaaacatctctcgataaaaagcagggatggcacagggcaaaactcaaggatggaacaggattttactggctccctccatcgctgccgggatgggcaataccagcatcagataacaaaccatcaccagaaaataccaaccagaaatctccatcggttgactgcgaacaaatcctgaaagacttcagcgattatgcgtcaacagaaactgacaagaaaaaactcatcgagcgttatcagcgtgactggcaattaatggctggcaacgaggaggcgcaggctaaatgcgttcaggtaatgaacatcagagttaacgaactaaaacaggcggcataa

SEQ ID NO: 244825 - DNA, 171 bp, Klebsiella pneumoniae
atgtcacttgcaaccacagtgaaggagagcaagttacagagacgcatgtacacgcagaaagctctctggtatcgccataatggcgaccgcgaaggaatgcgggtatgccttaatttgtcccgagtcgaagtattaaatcagcgttatttccttgggccgtgtccattctga

SEQ ID NO: 244826 - DNA, 969 bp, Klebsiella pneumoniae
atgagtgaagtaacagatttagttgttattgaaaaagcaaatgcaatgattgtatttcagtctgccgaccagattgaagaaattctccaaaaggttgaacgtgaagttatgtcctttgtgcctgatatcacaacggcaaagggcagaaaggagatcgcttctctggcgtataaagttgcgcagacgaaaacatatctcgatggtcttggcaaagaccttgttgctgaactgaaggaaattccaaagctaattgatgccaaccgcaagacagtgcgcgatcgccttgatgaactgaaagccaaggcgcgacagcctcttactgattatgaggaagaacaggcgcggattaaagccgaagaagaagctaaggcagcagctgaagctctcgcaaagcaaattgagtctgaccatgaaatagcgattttgatggatcgcgaatttgaccgccaaagagaagaggcaagactcaaagcggagcaggaaaagcgagagcatgaagaacgcttaaaaagagaagctgaagagaaagccagagcagaagccgaagcaaaggcaaaagccgaaattgaagcagcagcaaggcgagaagcagaagctaaggccgcagcggaacgtgcagagcgtgaacgcattgaagccgagcaacgagcacagcgcgaagcaaaagaggcagcagaacgagctgaaagagaaaagcaggcggcaattgaagcagaacgccgaaaagcacaggaggaggctgaacgaatccggcgcgaggctgaagcaaaagagcaagccagaatagcagaagaaaaaagaatcaaggaagaggaagagtgtagagcaaaggataaagctcaccggaaagaagtaaataacaaaatacttgctgaccttatcaaggttggcgcatcagaagatgttgctaaaaatatcataacagccatcgtaaaaggcgaagtattcgcaacaaaaataacctactaa

SEQ ID NO: 244827 - DNA, 186 bp, Klebsiella pneumoniae
atgcataatgctctgtctgatgaaaagctatatattgaagtgcgaatatttttatcccatcttcttcaactgtcgcctggaatctccagaaaacaggcattccatcatgttcagtttctgattcaggaaaaggtacgctccatgattttgtcatatctcacctcaaataagtggtttgctgcctaa

SEQ ID NO: 244828 - DNA, 186 bp, Klebsiella pneumoniae; identical to SEQ ID NO: 8666

SEQ ID NO: 244829 - DNA, 273 bp, Klebsiella pneumoniae; identical to SEQ ID NO: 8664

SEQ ID NO: 244830 - DNA, 888 bp, Klebsiella pneumoniae
atggagaaccagaaaactggttacattccgttgtaccggagcattctgaaacagtcatgggcgaaagatgtttatcttcgcaccctgtgggaaaaccttctcctgaatgccgccagaaagccatacaaatcgaatttcaaaggtcatgaatggcatctgcaatccggtcaactggttgtgacagcagctgacttaggtcttcagttatgtgacaggcatggcaagccagcaagccgcgatcaggttgagcgcatgcttcaggtttttgtgaaagaggggatgatcaccattgatggagagaagcaaaaaggtcgcgtgatcaccattacaaattaccatgaatatgctcaaaaaatggacaatttacccgcacatgaagccgcacaaacaaccgcacatgatgccgcacatgacgaagccagtaatggcgcgtctttcagcgtacatgccgcacatgaaagcgcacatgaagccgcacaaacaaccgcacatcatgaacaagaaggtattaacaagaatataaataatacccccctaccccccaatgggggaggcgatgggcaggttaaacctgaacgtcgtaaggcagaacgaatcgactacgaatccttcctgaacgcctacaacaccgaagtcggtgacagacttccacacgctgttgcggtcaacgagaaacgaaaacgccgcctgaagaaaatcattccgcaactgaaaacgccaaacgtggacggtttcagagcgtatgtcagggcgtttgtgcatcaggccaagccgttttacttcggagacaacgacactggctggacggcagattttgattacctgctgagggaagattcgttaacgggagtacgggaagggaagtttgcagacagggggattgcatga

SEQ ID NO: 244831 - DNA, 1377 bp, Klebsiella pneumoniae
atgaaacaggatatcgaagcgagcgttatcggtggcctgctgattggtggattaactccaaccgccagcgacgttctggcaacgctggagccggaagcgttttcaattccgctctaccggaaagccttcgaggttatccgcaagcaggcgagaaacagaaacctaatcgacgcactgatggttgccgaggcgtgcggagaggagcatttcacgtcaatcctgatgaccagtaagaactgcccgagtgccgcaaacctgaagggatatgccggaatggtcgcggataactatcaccgccgtctggtgctggaaatcatggatgaaatgcgtgaaccaattcagagcggaaccatcgatacatcgagtcaggcgatggacgagcttgtaaagcgtctctcagccatcagaaagccccgtgacgaggttaaacctgtacggttaggggaaatcatcactgactacactgacacgcttgacaggcgcctgaggaacggagaagagtcagataccctgaagaccggaatcgaagaacttgatgtcatcaccggagggatgaacgcggaagacctggtgataatcgctgcccgtcctggcatggggaaaaccgaactggcgctgaagattgccgaaggcgttgcaagccgcgttattcctggttctgacgtccggcgcggagtattgattttctcaatggaaatgagcgcattgcagattgcagagcgaagcattgccaacgccgggaggatgtcggttagcgtactgcgaaatcctgcatcgatggatgacgaaggctgggcgcgtgttgctaacggcatgagtcagcttgcagatttggatgtatgggtagtcgatgcctcgcggttatcggtcgaagaaatacgctcaatcgcagaacgacacaaacaggaaaatccaaacctgtcactcatcatggcggattatcttggcctgattgagaagccgaaagcagaccgcaacgacctcgcaattgctcacatctccggaagcctgaaggcgatggcgaaagacctgaaaacgcctgttatctccctaagtcagctttcgcgcgatgttgagaagcgaccaaacaaacgcccgacaaacgcagatttgcgtgattcaggaagcattgagcaggacgcagactcaatcatcatgctctatcgggaagcggtatatgacgagaacagtagcgccgcgccatttgctgaaatcatcgtgacgaaaaaccgttttggctcgcttggtacggtttaccagcggttctgtaacggacactttgttgcatgtgaccaggatgaagccagacagatttgcacagcatcaaatgcacctgctgcgcgtggcagacgatatgcacaaggggcggacgtatga

SEQ ID NO: 244832 - DNA, 546 bp, Klebsiella pneumoniae
atggggagatcgggctgcatgactatcaaatcaaatacgccagcacacgacaaggactgctggcaaacgccgctttggctttttgatgcactggatattgagtttggattctggctggattcggcagcgagcgacaaaaatgctctgtgtgctcactggctaactgaggccgacgacgcgctcaattctgagtgggtaagccacggtgcaatctggaataacccaccgtacagcaatatcaggccgtgggtggaaaaagctgctgagcagtgcatacaacagcgacagacggtagttatgcttgtgccagaggatatgtcagtcggatggttcagcaaggctctggagagtgtcgacgaagttcgcattatcactgatggacggattaattttatcgaaccatcgacagggttggagaagaagggaaacagcaaaggctccatgctgctgatttggcgaccgttcatcagtcctcgacggatgtttactaccgtatccaaagcggcattgatggcgatcgggcagggtgtcaggagggctgcatga

SEQ ID NO: 244833 - DNA, 651 bp, Klebsiella pneumoniae
atgataaatgtcgttagtttctcaggtggcaggacgtcagcatatttgctctggctaatggagcaaaagcgacaggcaggtgaagacgtgcattacgttttcatggatacaggggcagagcaccctaaaacatatgagttcatccgaaatatcgtcagtaactggaaaatagacttacattgccttcgtgtaatacctaatccagaaatggggaaggccagtagttatgaagagataggtgtcaatgatattggtccagatcttataccgtggaaaaggatgttaaataaatacggacatccatatatcggcggtgcgttctttaccgacagaatgaagtctgttccattcaccaaatattgtcaggaaaagtttgggaaaggaaattacatcacatggcttggcattcgcacagatgaaccaaacaggcttaaaagggctaatggttttcggtacctggctgatataagcgattttgaaaaacaggatgtgcttgattggtggagtgggcagaagtttgatcttggcatacaggagcatcttggtaattgtgttttctgtataaaaaaagtatgcaaaaggttgcgctggcagccatggatgagccagaacttgcagatgcatttatcaacatccttgatacagaaataa

SEQ ID NO: 244834 - DNA, 210 bp, Klebsiella pneumoniae
atgcttacaagcgactttttaatggtgaaagccatgcttagtccatcccaatctcttcaataccagaaagaaagcgtcgagcgggctttaacgtgcgctaactgcggtcagaagctgcatgtgctggaagttcacgtgtgtgagcactgctgcgcagaactgatgagcgatccgaatagctcaatgtacgaggaagaagacgatggctaa

SEQ ID NO: 244835 - DNA, 612 bp, Klebsiella pneumoniae
atggctaaaccagcgcgaagacgatgtaaaaacgatgaatgtcgggaatggtttcaccctgcattcgctaatcagtggtggtgctctccagagtgtggaaccaagatagcactcgaacgacgaagtaaagaacgcgaaaaagcggaaaaagcagcagagaagaaacgacaacgagaggatcagaaacagaaagataaacttaagattcgaaaactcgccttaaagccccgcagttactggattaaacaagcccaacaagccgtaaacgccttcatcagagaaagagaccgcgacttaccatgtatctcgtgcggaacgctcacgtctgctcagtgggatgccgggcattaccggacaactgctgcggcacctcaactccgatttgatgaacgcaatattcacaagcaatgcgtggtgtgcaaccagcacaaaagcggaaatctcgttccgtatcgcgtcgaactgattaaccgcatcgggcaggaagcagtagacgaaatcgaatcaaaccataaccgccatcgctggactgtcgaagagtgcaggaccatcaaggcggagtatcaacagaaacttaaaaaactgcgaaacagcagaagtgaggctgcatga

SEQ ID NO: 244836 - DNA, 666 bp, Klebsiella pneumoniae
atgaatatctacgaaagaattgatggcagcaaataccgaaatatttgggtagttggcgatctgcacggatgctacacgaacctgatgaacaaactggatacgattggattcgacaacaaaaaagacctgcttatctcggtgggagatttggttgatcgtggtgcagagaacgttgaatgcctggaattaatcacattcccctggttcagagctgtacgtggaaaccatgagcaaatgatgattgatggcttatcagagcgtggaaacgttaatcactggctgcttaatggcggtggctggttcttcaatctcgattacgacaaagagattctggctaaagctcttgcccataaagcagatgaacttccgttaatcatcgaactggtgagcaaaggtaaaaaatatgtcatttgccacgccgattatccttgtgatgaatacgagtttggaaagccagttgatcatcagcaggtaatctggaaccgcgaacgaatcggcaactcacaagacgggatcgtgaaagaaatcaaaggcgtggacacgttcatctttggtcatacgccagcagtgaaaccactcaagtttgccaaccaaatgtatatcgataccggcgcagtgttctgcggaaacctaacattgattcaggtacagggagaaggcgcatga

SEQ ID NO: 244837 - DNA, 624 bp, Klebsiella pneumoniae
atgagactcgaaagcgtagctaaatttcattcgccaaaaagcccgatgatgagcgactcaccacgggccacggcttctgactctctttccggtactgatgtgatggctgctatggggatggcgcaatcacaagccggattcggtatggctgcattctgcggtaagcacgaactcagccagaacgacaaacaaaaggctatcaactatctgatgcaatttgcacacaaggtatcggggaaataccgtggtgtggcaaagcttgaaggaaatactaaggcaaaggtactgcaagtgctcgcaacattcgcttatgcggattattgccgtagtgccgcgacgcctggggcaagatgcagagattgccacggtacaggccgtgcggttgatatagccaaaacggagcagtgggggagagttgttgagaaagagtgcggaagatgcaaaggtgtcggctattcaagaatgccagcaagcgccgcatatcgcgctgtaacgatgctaatcccaaaccttactcaacccacctggtcacgcactgttaagcctctgtatgacgctctggtggtgcaatgccacaaagaagagtcaatcgcagacaacattttgaatgcggtcacacgttag

SEQ ID NO: 244838 - DNA, 477 bp, Klebsiella pneumoniae
atggtggaaatcaataatcaacgtaaggcgttcctcgatatgctggcgtggtcagagggaactgataacggacgtcagaaaaccagaaatcatggttatgacgtcattgtaggaggagagctattcactgattactccgatcaccctcgcaagtttgtcacgctaaacccaaaactcaaatcaacagccgccggacgctaccagcttctttcccgttggtgggatgcctaccgtaagcagcttggcctgaaagacttctctccgaaaagccaggacgctgtggcactgcaacagattaaagagcgtggcgctttaccgatgattgaccgcggtgatattcgtcaggctatcgaccgttgcagcaatatatgggcttcactgccgggcgctggctatggccagttcgagcataaggctgacagcctgattgcaaaattcaaagaagttggcggaacggtcagagagattgaggtatga

SEQ ID NO: 244839 - DNA, 186 bp, Klebsiella pneumoniae
atgctaacgcgactatcgaaagtctccgtgctgatgtttctgctgggcgtaagcgcctgcaagtcgccgccacctgtgcaaagtcaacgaccggagccagcggcatgggcgatggagaaagcccaggacttacagcagatgctgaactcaattattaccgtctccgaagtggaatcgacaagataa

SEQ ID NO: 244840 - DNA, 159 bp, Klebsiella pneumoniae
atgcctctgatgtggaaggtgctgaacgctatttattatccgcaaaacaagcttgggaaaggatatctagcccggactggggagggcgtggaagtaatccaaacaaggatgccaggagggtgcaacaagcaagagaaactctcgaatcggcaaaagtaa

SEQ ID NO: 244841 - DNA, 888 bp, Klebsiella pneumoniae
atggaaagtgaagaaatgctacaaatgccatcccctttcgctaaatggaaaggaaaaatcaatcttggtggtgaggacattgattgttatgttcttgacaccggtgaacgagtaattgccctgcgtgcgacagtaaaagccatagcagaagttgaatcgagtgcgctggcggactacattggcgcaaaagcaataaaaccttttattaacagcgacttaatcctggcggaacttattgaattttcaatcccaggaacccaattcaaaagccaaggattaaaaacagagcacttcgaactaatatgtcgtggctatgttcaagcattataccaagacgctcagctcacggaacgacagcgtcaaatagctattaagtgtgcagttcttaccgcgggcttaacaaggacaggtctggatgcccttatcgatgaagcaaccggatatcaatacgagcgcgctgaggacgcactccaggtaaaactcagggcctttattgctgaagagcttagggcgtgggaaaagacatttcccgatgagctctgggaggaattcggcagacttaccggatggagtacgccgcttcaaactcgaccaaaatggtggggaaagcttgttattgagcttatctacgatacgctggatgccgatgtagcaagatacttaaaagaaaataaaccggctgcgggagttcattggcacaggcaattaacagagaacttaggcgtaagacaactggtgtcacgatgctgggaggttattggtgtagcgaaaacatgcgaaacaatgcatgaattgagagcccgagtggctcagcactatggtaagaagcaagtgcagatgaccatgtaccttccccctgctaaaaccgacgataaagacactgattaa

SEQ ID NO: 244842 - DNA, 1155 bp, Klebsiella pneumoniae
atgaaaataagaaatatgtcatctgtttttctcactatgcatgacatgaatttagatgcaaacgaatttttggataattgtagtgatgaggagtttttcaagtttaggagggaaattgaagaagctcgaaaaaaatttcctattgcactatgtagtgtgtgctatcaaccagtagtcttacgaggtgacgcgcatagaacaaagttttttgcgcatacaaaaaattcagccgattgccctatcaagactacaacaaacttaactgaagatgagttacgtgctctaaaatacaatgggcaaaaggagggggcggcacatagaattaacaaagagaaaatagcgaaactattattgcttgatgatttatttgaagatgatgttaaagttgaagcaacatttcgtcaagagaatcatgttgggatttcgaaagaatggcgtaggccggatatcagttgtgtattaaaacattctagtattcaattggttattgaattacaggtatcaactacatttttagatgtaatcataaatcgtgaggcattttatagacgtaatggggcatatatattatgggtttttatatcattcgagcctgataaatttacaactttagatatagcatatggaaattttgcaaatgttttcgtatttgactccgaggctgaagtcgagtctgaaaaatttaataagctcatattgaaatgttactatagaaagccatatattactgaattcaatacaatatcttatgcctgggagtgtgagttagttgattttaatattttatcattcaaagaggaaagtaagaaagtctattataaagatactgagaatatgaaggaaatagcaatgaatgagctctattatagagatcaagaagtgaaaagaatgcgagaacaggttgagctggcgcgacaaagtatgaataatttaaatagaaatcaggcttctgaaaaagttgatagagttaaaaacgaacaacctatcaattctcaatataaaaacaagcaacatagatttaatgcttcttcattaaaatcagtacaaaatataaaaaatcatgagcgggttcaatgtaataactgcggatatattggaaaagtaagaaaaataggaacgtcagtgttatgtgcgaaatgttttcaaccaatttag

SEQ ID NO: 244843 - DNA, 243 bp, Klebsiella pneumoniae
atgtacgatagacctaacgcaataaaagggaggtatgtcaaaattcccaacatgttgatttttgtagctgaaccagtgaatcatgaagtaatagacccatggaggttatttaacataacgtacattatgcgcactaagttattgattttacacgttttgtggtttggtgtggctatggccagatataccaaatgccaatatgaacacaacaaactcaggctgacacatacatcattacaatga

SEQ ID NO: 244844 - DNA, 1098 bp, Klebsiella pneumoniae
atggatgtaaccctctgtttacccgcactttatccgttaaggtatgtagttgaccatctggagtatcgctcgccctcaactcaatcagcctccctccaggcaattaagtttttttatgatttttggttcatgaagcatagaactacattctgctatagcttttatttctccggacatgaccctgcaatcgctatacatgagatggctgacttttttcaatatttagaaaatggtcggatagtaaactccacaccacgatcactgccatttaaacattctagcagcgtgacaaatgccgccagagtacgtgcagtgattagattcataggctacctaatcgctacctatatatctccttactatcgaaatgaaacacctaaagaattgtctcgtcatgcatcccgcctgaatactcgtttgctgatatgtaaagaggaatttaaaactcttgaaagaagtaatcatcggtattatcgcgtcattccgggatttcgcagtatgactggtgatatggttgaaaacgtttatcgtatagtagtaccaaattcaaaacataaaaataactttctaaaccccttcccttctgggtttatccagtttcgtaattatttgattttgcggttaatgctcaactatgggctgcgtgtcgctgagctgttattattagagtgcacatcggttaaagctagtataaaaggtgataaatttagcttaatcattagcatgcctagcaacataactgatccaagaatacatgccccgtcattaaaaaatgattactcacatcgagttttggagcttgacaagcttgattatgaatttcttatgatttatatgggaaaaattagaaaatcctcgctgactcacaactttatatttacatcgagccaaaaccctgataaaccgttgtcctataatgcagtgcatttaattttttctgagatagataaggttttttcacattactatcctgaatgtaagtctatagaacactttgatactataataaaattcacaccacatgtcacacggcatacttgggcttacttaactttaaaaaaaatttatcatttgcagaataaaaaaatcaatatgtaa

SEQ ID NO: 244845 - DNA, 195 bp, Klebsiella pneumoniae
atggcaaatcttataacaaaagaaagtatcagaagaaaactacgtttgctaagagatcttcgtgagtattgtttagatgatagggaacttgttaaatttttgagcaacgaaatccatgtattagagaagttactagatgatattgtaatggaagaatacaacccattgtcaacacgctttgataaatgggattag

SEQ ID NO: 244846 - DNA, 1071 bp, Klebsiella pneumoniae; identical to SEQ ID NO: 200237

SEQ ID NO: 244847 - DNA, 630 bp, Klebsiella pneumoniae
atggatcaatatgttcaggaaggctttaaagcctcagaaggttcttcatggtcatacgatgcgcagacaggctcactgtctgtatcggccctgccggaaagcgatatttatatcgatccctcgtgcagtaatccggactcaatgatcaaggcaaggcatgatgctgtgacgatgatgaccccctgcccgcagggcgactttcagtttagcgctaccgtagaagtggacttcagggatacgttcgatgccggtgtgttacttctgcgcgcgaatgaaaaaacctgggcaaaattgtgttatgaaatttcacctgatggtgaacccatggtggtttctgtggtgaacaagggagctacatctgatgatgctaacgcatttgttgttaccgctccccgggtttccctccgtatttcacgacgtgacaatatctacgcatttcatgcctcgctggaatcaggaaagtggatatttatccgcgcattttcatttgatgatgcactcgataatgattcagaagagatgacggtaggttttgaagctcagtcacccaacggcaggggatgtctggttaaatttgaagatatttcattttccaggagcacactgaacctgctgcgtgacgggaattaa

SEQ ID NO: 244848 - DNA, 1182 bp, Klebsiella pneumoniae; identical to SEQ ID NO: 200235

SEQ ID NO: 244849 - DNA, 759 bp, Klebsiella pneumoniae; identical to SEQ ID NO: 200234

SEQ ID NO: 244850 - DNA, 1224 bp, Klebsiella pneumoniae; identical to SEQ ID NO: 200233

SEQ ID NO: 244851 - DNA, 837 bp, Klebsiella pneumoniae; identical to SEQ ID NO: 200232

SEQ ID NO: 244852 - DNA, 1464 bp, Klebsiella pneumoniae; identical to SEQ ID NO: 200231

SEQ ID NO: 244853 - DNA, 1812 bp, Klebsiella pneumoniae; identical to SEQ ID NO: 200230

SEQ ID NO: 244854 - DNA, 327 bp, Klebsiella pneumoniae
atgattgcacgctatatcagccacgtgccggcgaagcattgtaagatggtgcgtgactacggttttttgtcaaaccggaaacggggccagctgctgccaaaagtctatgaagccctgcagatggaggtgaggaaaaaaccagagcagccgggcttcgccgcgctgatgaaggcatttctgcgcacagacccgtacaaatgcatcctgtgcggtaaccggctgcgttttgtcagcgcagaagcgggcaggcatgcttcggtgttagtggccgaaaggctgcataacatcgaccggaaacgatggcttctggggcagactgcaggataa

SEQ ID NO: 244855 - DNA, 228 bp, Klebsiella pneumoniae; identical to SEQ ID NO: 200228

SEQ ID NO: 244856 - DNA, 399 bp, Klebsiella pneumoniae; identical to SEQ ID NO: 200227

SEQ ID NO: 244857 - DNA, 363 bp, Klebsiella pneumoniae
gtgacagccccggcactggcgctgttcgtggcctttgtcggcctgtcattcaatgcctcggtttccgggtattttctgctggcggcacatgagcttgtcgacggggcaccgcccggtacggtgaatacgcaggtctgcgagccgcccgccgcactggatggtggtgaggtccagacgctgacggaggcttacccgcccctctgcaacaatctccagaaagatgaccgggtatggcagcgcgacacagaccgcagccttcgtacgctgtatctgctgacgtccctgctcgggctgggtgtctggctggtcctgaacccggtcagcagtctctggagcagtctgttccggcgaagggtcgattaa

SEQ ID NO: 244858 - DNA, 258 bp, Klebsiella pneumoniae; identical to SEQ ID NO: 162563

SEQ ID NO: 244859 - DNA, 153 bp, Klebsiella pneumoniae; identical to SEQ ID NO: 162564

SEQ ID NO: 244860 - DNA, 1437 bp, Klebsiella pneumoniae
atgaaaaatctgcctgtcattttcaacaatcaacattcagatacccataccgtatcagctgctttatgtcagctgaggcacgattccagatctaaaccgctcccacacgagcaacgttattcccttcttaagggttgtattcgtttgttgcaggaaaacaaggatgaactgtgtgaggcctacagtcaggattttggtcacagggcacatgccagcacattactttccgatattttgggttcaattgaagcactgaagcattcactgagcggtctgaaaaaatggtcgcaggatgaaccccgtgaatcacccttcccggatacgtgttcttacattcaatacagaccgctgggggttgtaggtgtaatgagcccgtggaattttccactggtgttaactttcggaccactctccggtatcctcgcagcaggtaaccgggcaattattaaaccttccgaattcacgccatcgggaagtcggctgctctgtcatttgatttcagaatatttccctccggatgaaattttgactgttcagggtgatgccggtgtctctgcattcttcgcttcccttcctctggatcatctggtgtttaccggtagttcagcaacgggccgacatgttatgcgtgcagcagccgaaaatcttacgccggtaacgctggagttaggcgggaaatctcctgtcatcatttcagaaagcgccaacctgaaaacggctgctgaaagaataatgacggccaaagcatttaatgcggggcagatttgcatcgcccccgattatgttatggttccagcaagatacgcagacgagttcatcggttacgctgtagcgttcctgagaaaatcatacggttcttatcttaagaatcctgacttctcgtcaataattaatgcagcccacagcagcagattaaatgaattgatcgacgatgccacgaaaaattgtgagcgcatcatttcagccagtgaggagctggatttgccgtctgaggggagaatcattccacgactcattctcaatccctccgacaattcacgcatcatgcaggaagaaattttcggcccgctgcttccgattattacgtatgaaaaaacggatgaatgcattaatcggatccggaatggagaaaaaccgctggcgttgtactattttggacaggatgaaaatgagttcagagagttacaatgttcaaccgattctggtgcccttgtctttaatgatgtgatgagtcatgttttggtgcacgatctgccgtttggtggcgtggggcattccggtatgggagcctatcatggagaggatggtttccgtcgattttcccatgcacgcgccatttttattcagtctgatacaggtttatcgaacctactcatgcgggcaccatttacggacgaaaaaattaatcaaattacctccctgataaatcagccctga

SEQ ID NO: 244861 - DNA, 468 bp, Klebsiella pneumoniae
atgctgcaactacttgaaataagtcagcgcagtttcccggtgcttgctgggattgtattcgttatcggcgcaggtggagccttcaactctgttctgctcaaaagcggagtgggggaagttatttcaggaatgttgctcagcacccatattaatcctgtcatactggcctggtttattgcctggataatgcacctggcagtgggatcggcaaccgtggcaatgataagcgcagccagtatgatcagtccgatgcttgccgcagatcatcaactgactccagaaattctggtaatagccattggtgcgggttcaattagctgggctcacgtgacggattcagccttctggatagttcgggaatacctgggaatttcattatccgaagcgctgaaaaagtttacgggggcaacgatccttgcttcggttgtggcgcttattgccacccttattcttgatcacttcatctga

SEQ ID NO: 244862 - DNA, 1224 bp, Klebsiella pneumoniae; identical to SEQ ID NO: 200216

SEQ ID NO: 244863 - DNA, 777 bp, Klebsiella pneumoniae
gtgaagattataatgaagtacatattatggacattattaatagtgacaatcggtgctattgctatttattcctaccatacataccacttcaaaaaagccagcagagatattttatatcaactatcgaatcagattattgtgaagcaagggcttaacgaaaaattgtcgactcatcttgtatttgatacgttgtatgtggatgggaatatttctaaaaacgatgacaaagtactatcagaaataatagaaaatagcctgattcctgtccgtacgatatcaattaacagtggtggtggcgatattgaaacagcaattaatttcggtcgtattatttatgatagggggattagcattgaagtgagacgactttgtctttcttcctgtgctaactatcttttccctgcagcaagaaataaaattattaattatggttcaatcattggttttcatggctcgcccaattcagatgacagtaagttaattactacggttgatggggcaagaacgtcggatccggctataacagataaaattttctccgaaataagaaaaaccgataaattattctataacaaaataaatgtgtcatggatgatgccactttgtgggcaaaaagaaaatattggcgatccagacacaggcctgtctacgtacaacgagaaggattttgcgcaatttggcgtaaaaaacatttcatacacggatggtgaaatgatatggaaaaagtctatggatattatgggtataccttttgctcactattgcaaggaaaaataa

SEQ ID NO: 244864 - DNA, 282 bp, Klebsiella pneumoniae
atgcgtgaactgaatgaaaatgaattaagccatgtaagtggcgcgggtatgtggggttctatcggtaatgctatcggtgggatgtttggcgggggcagcgcaggttgtaatggtagctattctcataccagcacaaccaacaaagatggttcccactctgaaagtacctctttcagcggcggttgttcggtcaacgtcggtggcaaaagtggtggtggttcgaaaggtaatagcggttctaaccatggtgggggccacaacaccgaccatgggagacactaa

SEQ ID NO: 244865 - DNA, 1275 bp, Klebsiella pneumoniae
ttgtttcgcaaggaagccattgaatatcaaaagaaacgatgggaaggtaaagctattcttcttcctggtattccatttgtgtatattatttttctcagcatcttttttattagcgcggttactgttttccttgcaaaaggaacatatacccggcgagttgttgttcatggtgagattaccacctttcccggcccgattaatatttatgcacctacacagggaacggttgtgcagaaatatatctctgaaggagaccacgtaaaaaaaggtgacaaactatttctcatccattcgggtatatccactcagtcaggtttcgtggatgagaacaaaaaaaaggatattgacctgcaaattaaaagcattagtacaatgatgcttgatttaaagtcgacaaaacaaaacatgcttaattcacttacggtgcagaaacaacattatcagtccagttttaatacctcttccggacttcttgctcaggcgcagatggaactgaaccagatagcaaaaaacgtttcggattaccgctcctatcaaaaaaagggactggttactaaagatcaaatgagcagccaaaatgcccttctttatcaacaacagagtaatatctccgacctggtcgccagaaaaaaccaggatcagatccagatcgatattcttaaccaccagtttcagtcacaatcatccgactatgaccatcaaatttatcagcttgagcaacaaaaatatgagctggaaaaagaaaagctgaatactgaagctgagggaaactatgttatagaagcaacaaccgatggttctgtcgattccataaatactgaacgaggaaaaatgctaatttcaggagatatattggtgcgtattcaacaacgtacaaattctcctttttatatcgaaacctgggtttcagatcaggagttaccttatctggcagttggccaaagagttcatgtcagttatgatgctttcccttatcagaaatttggtctgttcagagctaaaatcgcggaaatatcaaggctacctgttccgaaagcggaattgcagtcgaagctgactatcgcgaacgaattctatgacgacaaaaaatcttggtacaagatcattataaaaccagacctacagtctgtgcaggtttatggcaaatcacttgatctcggagctggcatgaaagcgcgaataacactttttctggaagaaaaaagtgtctatgaatggatattatctccattttatgaaatgaaaatgagcgtaacggatgcggataatgaatag

SEQ ID NO: 244866 - DNA, 2118 bp, Klebsiella pneumoniae
atgaatagcaaataccgaccagaaatgctgatgcataaacttgatctgacgttatttaaacgcgtccccgtggtctttcaaaccgaggcatccgagtgcggactagcctgtttatctatggtatgtagtttttatggtaagcaggttgatttactacaactcaggcagcaatttaatttatcggcacgtggagttaacctgaagtctttgaaggcgattgcaagtgaacttggcatgtcctcgcgcgctttgtccgtggatcttcaggacctgcacgacattcgcaagccctgtatcctgcactgggattttaatcatttcgtcgttttgataaaagctgataagaacaacgttgtgatccacgaccctgcactcggaaaacgggtggttagcatgccggagatgtccagacacttcaccggtgtaatgcttgaaatatggccaggagtcagctttacaggtgaaacaagtaagaataagttaaaaacctcagccttattgaaaaatattaatggtcttgcatcttctttgggaaaaatatttttcttatcgctagtcattgagtttatcagtctcttactgcccgtgggaacacaattagtcactgataatgtcattgcctccggggattacggtttactgaatgtcatctgtcttggtctgtttattcttattctgttacgcctaactgtcagtattatacgctcatggagcacgttgatattagaaacatccatcaatgtccaatggagtttcagtctcttttctcacctgattaaacttcctataacctatttcgaaagacgcaaactaggtgatattaattctcgttttcactccctcgacattatccgcgccatctttactacaggactaacaggcagcatcatcgatacaattatggttacaggattactggtgatgatgttcttatacaatctgcaactcagcctgattgtggtttcttttacagccctgtatacatttatccgatttactacctaccgttattatcgtcagctttctgaagaagaattaatcaaagaggcacgtcttgactcctattttatggaaaccctgtacggcattgcgacaatcaagatccagggtatgactgacctgagaatagataactggtttaacctatttacggataagatcaataccggcattcgtctgacacgaatggatcttttctttggtggtgtggtctcgtttatcgccgcttgcgatcaaactgttattctctggataagtggcaggttgatggttgataaccacttaactatcggtatgtttatcgcgtttaataccttcagaagtcagtactatgaccgtattaacactctgatcaactttatcattcaaacaaaaatcatcagcttacacaatgaacgtatcgcagatattgccctgcaggagactgcgtcttcaagggcaacgagtcctctgattttgccgcaaggtgcattaacactggaaacccatgatttagcataccgctatgataaccacgctgatgatatcttcagaaaactaaatctgaacattcacgcgggagagagcatagctattaccggtgtatctggtgcaggtaagagcacgctgatgaaagtgctgtgtgggttattcgaacccactaaaggctgcgtcagaataaatggagtagatattaaacaactcggtttcgatcattactccgaacgcatcgcctgcatcatgcaggaagacaaattattttcaggttcaattaaagaaaatattactggtttccgaactgatattgatgaacagtggatgatagaatgtgccaccgccagtcatatacatgatgatattatgaaactacccatgtgttatgaaacactaattggtgaactgggcgaaggtttatccggcggtcaaaagcagcggctttatatcgccagagctttataccgcaggccagggattttgtttatggatgaagctaccagccaccttgataaaaaaagtgaaagccaggtaaatcagtccataaaagcaatgaacatcaccaggattattattgctcaccgtgaaacgaccatttcatcggcagaccgtgtattttctctggatctggaatgctcaccgtaa

SEQ ID NO: 244867 - DNA, 933 bp, Klebsiella pneumoniae
atgctcattgatagcggtactgcatccactttaaggaagaaccgtaatccttctttacctccgttcagagaaattgagttttatctactcacgcacatcgattacgatcatatcggtggttttttaaattttttatccaaagctcaaagaaatgatctacatccagacttaatttttttttgcaatacattagatctaataagatataaagacaatgatgaagttggttttcaccacggctctgcactatcgactcatatatctacacttaagttaaacagtaaaccgcttttttcagaagatgtgttatgtttcaaaaacattaaaatcacgattttatcgccaacattagaacatatccatatattaaaagaaaaatggatagaaatagagaaagaattaaataaaaaagattacggcgacgagtttgtatcggtgcaaaaaaagaaattcaaaattgacgttaaagtagcaccagatgattcagtaaaaaatccaatcaaggatttattaaactctacatctatagcatgtcttattgaatataaaaataaaaaagccttgatgttaggggatgcccaccctgaaataatttcaaaacaattaaaaaccgttcttaaaaaccagcagattgaaaaaataaatgttgatgttgtaaaaatatctcatcatggaagcaaacataatacaacatcagaattattaagtttaatcagttgcaatagatttattatttctaccgatggtagccgtccttacaaccaccctgatatagagacaataaataagataattattaactctattaacgcgggtttctcaaaggtttatttttatttcaattatcaatctgcatcagagttcgaaatcataaatgaagcagagcttgatatcgaaatttgcaaaatcgtcactaatgagattattttatga

SEQ ID NO: 244868 - DNA, 123 bp, Klebsiella pneumoniae
atggctgatgttctggaaggttttatccccatgggaaatatggaaaacttacggttcgaattttctcttaaagattcacatgagaagcttaaattattttggcgatgtctggatgtcatataa

SEQ ID NO: 244869 - DNA, 291 bp, Klebsiella pneumoniae
atggaattaacgcaagataaggctgacgcgtttgcccgcattcctttgacctatttgcgcctggaagacccgaaccacatcatgcacctacttaatgatgatggcgacgtgctgctgcctcgtgaactgcacccgattttttacggttgttttgactggcattcggcggtacacggctactggctactggctactggctactggctactggctactggctactggctactggctgctgctgcgctgcgtgcgtctttatccccacttaccgtgtcagaaggcgatcgttga

SEQ ID NO: 244870 - DNA, 321 bp, Klebsiella pneumoniae; identical to SEQ ID NO: 94160

SEQ ID NO: 244871 - DNA, 255 bp, Klebsiella pneumoniae
gtgcaggccgaaaccagctgggccgacgctgccgcacagtgtctggggagtctgcgaccagatatcgaggcgctgagcgccgaatttctgctgcgtccgctggcctcgcaggtattccccctggaacggtatcttgcagagtgtctggcacagatctgcacgccggcccgcctgaaaaaactgctgccgctggcagtccgtcaacgccgccacacgccggagcagcgggaccggttcgcccaggaaaccggctag

SEQ ID NO: 244872 - DNA, 330 bp, Klebsiella pneumoniae
atgaatcaagctgctctcctgaccattgcaaacgagcttaaccatgagcaaatgcgcgttttaatggcactgttagccgagctcgattacgaaaactacatacaggtagcccaaacagatatctcaatagcgctcaagatgcagaaggccaacgttagccgagcgattaaaaaccttctggagtttggcatcatccttgaggggcctaggatcggacgttcaaaaacatatcggctaaaccctcagttcggttggaaagggactgtgagtaatcacaaaaaggccctcaaaaacggcctgagcgtcattcagggcggccgggcggtgtaa

SEQ ID NO: 244873 - DNA, 282 bp, Klebsiella pneumoniae
atgaaaaaagctatcttttctctgattgtaactcttggtttaactgcctgcgccggaaaaccgaccggggatattacgttactttctgaccctaacggcgggaatgaggttaaaacctaccgcatggggtacacctgttacgttcactataacccggagaactaccgttcagcggacgttctgcgcggtgtggacacctgcggggagatggttggcgccactaactcggaaaaattcctgaaatacagggccgatgtggaatctaaactgagcaactcctga

SEQ ID NO: 244874 - DNA, 897 bp, Klebsiella pneumoniae
atgaaaagtaactttttatatgtagcgcttgctgcatctattattgcaggttgcgatcagagttcgccagcaggagctggcgtaagctcgggggagagcagctcacaggaacaaacacaacaggttcagcgaaacaaacagatatctacggggcagggggctaacaacatcactgaaaccgccgctttccctatgattcaacgggccatcgccagcatctatcctaatcttgatccggggataggtgcgaatttgtgctctcctgcccgggaaggaaaaacaatttctgaaatcaacgaaatggtaaaaaatgagataaagccagctgaatatacagagtatctaaagaatgttgatggcgtaactaatatatatctcgcctgtgccgtttctcttactagatcgtctatcatgccaatgaccgggtggacttttgagcgaaactttgatgaagaagcaaagctcattcttgcaatgggcctcgctgcctccagagttttatcaccgatagctgttgaaatttcaaaaagacccggaatggatgagggtaaattaacaactttaattcaagacagatttattgatactaatgaagatgtacttaatgagttcattaaagaactacaacaaaccaggtctttctcaatagatggaacgggtgctaaagggattcattttacttcctctgatggttatgacgtggttggaaatggtaacgggattattgtttccagttatggttcaacctggtatggaaacggatattttgagggtgttttttataaagtatccactatcagaagcaattcaacaaacatgacaaaagacaacacaattacctctggaagttctatttccagcggggaaagctcatccgcagatgtaagtacaaaataa

SEQ ID NO: 244875 - DNA, 330 bp, Klebsiella pneumoniae
atgcctagtccgttagcgattattgctgtaattgccccctcggcgcttctgggggcgcttttgtttttctttgtttatgacgaacacagcacaaaaaacgatatacagcgcgacagacaccaacttgaaaccatgaagtttgaccgtgacttctcaaatgcatggaatggtgacagcgtcaccccacaaaaagaaaacgacattaccagcatggaagaaaaaataaaaagaaaggagaaaaaggtagaggaagaaaaagaagaaagagaacggagaatgaagaaaattcgtgaagatgttgagaataaaatagcaaactctggggagtaa

SEQ ID NO: 244876 - DNA, 732 bp, Klebsiella pneumoniae
atgctgatttctgatccgacagagcgccgccttgcgtctgaaagtaaacgactgaaaattcttaaatttctcagggatgaaatctggagttctgccaacgtcctcgctgctgtagctggactacagagtgctcaggcaatccataaaacgctcacgcagctggagagggacggaatggtcagacggcacctcttcccgatagctggccgtgtaactaaaacaatctggggaatcactccgcacgggctagcccatgcgtggagtgatgatgagcagtacgaagaccgaccacgattcgaaccatcaaaactggttctggcgcgggttccgcaccagttagacatgcaagaggctaggttaaaggctgaggctagcggctggggtgagtgggtgagaggggagcgccttgggtttaaaccggctattcgccctgacgcaatgactgtaagcccaaaaggactaaaggtcgcggtagagctggagaggacaatcaaaactaagctgcgctatcaggtcattatcagagagcatctcagggcgatcagaacaggtcagtggcaggtcgttgtatatattactcctgatggaatgcccctgcgcctgaaacgtattttcgactctattgattatgtttctattgatggtcagcatgaggttctctctgataaacaccggaacctgttcaggtttattagcctttcagattggcccaacatggagaagtctatttaa

SEQ ID NO: 244877 - DNA, 1746 bp, Klebsiella pneumoniae
ttggggctaatttacctaactgccaacccggaaaaacggcaaaaattgcagtctctgggtctgctgtctctggtaatcggattaattaacccgctaggctatttctggataccgttgctgcgatcttatgtctacagcgttgattatgagctgctgtttccccttgggtttctggcgataactctgggatctgcatttctggggttcgcaacatggctgggatggactaggtattgtgtcccgttcatcaacaaatatttgcaccagttcacccggcggactgaactggagcgtaaccgcaaaaccgatgtgcgggagattgaaaaatttctacctactgcaaaattggactacaacccggataaatggctctctgtagatcctaaaaaaacaggcctgtttgtcgggattaatgagctgggtaaaccaattttcatcccctacgagaaatggcgttccgcccacgtccagattgttggtacttccgggtttggtaaaggggtggcaactgggattttgctgtcgcaggctatgcgggcaggggaaactgttattgtttttgatcctaaaaacgacgagtgggcaccccacgttttgaggcagtccgccgaacaagctgaggtgccgttctacctggtcgatctggagtccgatttcggccagctggacctgctggccggtgctactgcatttgaggttgaggaactgctctctgccgggttctccctcggggattccggggatattgccgaccactacagactgaaagatcgcgctgctatccgggacatttcacagctggttaacgccggcgcacgaactgtggctgatttggcctacagcgagttggccaactcatacgaaaaagagtgtgaaggggcgatttttaaactgcgtgaactggcgctatgccgcgccatctctggtgttggtggtatcaatatgctggatgccgtcaaaaatgggtggtgcgtttacattatcggctcgatggataattcccgtctgatgatggcgcaaaaaatgctgttggtgcgcctgcaacagatcgttaaaaaacgagaccggattacagaaacaccgcggcctgtctgtgcatttctggatgaggttaaataccttctgtccagaaaatctctggagggcttgggcgctgcccgggataagggtttgcatttcgtcctcacacatcaatccctcggcgacctgaaagacggcccacgggatttgaaccccgaggcggttgtaggggccattgttgaaaactgctcgattcgtattgcctacagggttcaaaaccctgatacggcgctctggctggctaaaatgacaggggaaattcaggtcgatgatgaaacgcggcgggttgagcgtaacgcgggcggagctgagctgctcagccacgaacgcactatcaggcagtcaacccggaacctgatcgatacaaacatgcttttaaatctacctggcagaaccgctgtggtttttggctctggtcaaccccaattcgcgcatatttgcccgattctggccgaaaaaaaacctctgacagtttacgtagcacctgaaccggttgtgccgctagtcgagccactaatccctgccccagctgtaaccactgtaccggtggaaaagaattcgaaacctaaatctcaacctaaaaaaacagtgccggtagaaactcggaactatgaggacgatgatatgcacgactatctacaggaatataacaatgctgatttctga

SEQ ID NO: 244878 - DNA, 243 bp, Klebsiella pneumoniae
atgaaactaaatgagacgtctggcgcatgtgatgatgtgcatctaaatacatttgtcatcgacccggcaacagcccgacgttttgagtgcgttaaagagatggttcgtaagcaggggttccataatatcacggagccagaaattattgatgctatattgtctgaaataacaacagcagatgctgccgaaatttttattgagtacaagttaaaaaccacaaaacctctgctttctacagactaa

SEQ ID NO: 244879 - DNA, 228 bp, Klebsiella pneumoniae
atgttgccgggtggcggctacgccttacccggcctacataatcatttatatatcagatggataccattcccccaggcccggctgagtaaggcgcaaaccgacgatcatctctaccgctcagcttcccccggggtattaatcatccggttcagccacggcaccatcagcgccatcaccaccgtgacccccagggtcaccaggccaattttactgaacacgctggtgtaa

SEQ ID NO: 244880 - DNA, 129 bp, Klebsiella pneumoniae
atgcacattatcaatgctgaagagcagcacattcccgccatacgccgcatttacgcccatcatgtcctgcacggcacaggcagcttcgagacgcccccccgaacacgcaggaaatgcttgcccgggtga

SEQ ID NO: 244881 - DNA, 1044 bp, Klebsiella pneumoniae
atggcgctacgcttatccggcctacggggtcctctcacaggctcatacctcgtaggcccggcaagcgcagcgtcgccgggcaggacaccgcaaacaccgtcgccgtatttatgcaggatggcgctacgcttatccggcctacggggtcctctcacaggctcatacctcgtaggcccggcaagcgcagcgtcgccgggcaggacaccgcaaacaccgtcgccgtatttatgcaggatggcgctacgcttatccggcctacggggtcctctcacaggctcatacctcgtaggcccggcaagcgcagcgtcgccgggcaggacaccgcaaacaccgtcgccgtatttatgcaggatggcgctacgcttatccggcctacggggtcctctcacaggctcatacctcgtaggcccggcaagcgcagcgtcgccgggcaggacaccgcaaacaccgtcgccgtatttatgcaggatggcgctacgcttatccggcctacggggtcctctcacaggctcatacctcgtaggcccggcaagcgcagcgtcgccgggcaggacaccgcaaacaccgtcgccgtatttatgcaggatggcgctacgcttatccggcctacggggtcctctcacaggctcatacctcgtaggcccggtaagcgcagcgccaccgggcaagatatcaggctcgatacccgtcatgttgccgggtggcggctggcgccttacccggcctacgttcgtacgacctgtcgttaatttattcaccattgttgctgaaactgccggtgctgacggcctcaaaatcgctgagacgttcccgcaaggccggggcagcccgcatggatgcgggctgagggccgtgttttgcacggacgctgcctcggcccgacccgaagcctgcagggataagtcgaaggtaccgcgtagcggcgattttgctggccggagcccgggggtacagggggcggcggcgactggccgccccctgtgcgctccctgcgccatgccaggcataacgcagaaaattaaccgggagcgcaaatttcactga

SEQ ID NO: 244882 - DNA, 705 bp, Klebsiella pneumoniae; identical to SEQ ID NO: 8686

SEQ ID NO: 244883 - DNA, 1044 bp, Klebsiella pneumoniae; identical to SEQ ID NO: 244881

SEQ ID NO: 244884 - DNA, 243 bp, Klebsiella pneumoniae
atgaaatctgcattaataagcccgctgctggtggggctgctgctgttaaccggctgcgcgcagccagccgcccgggccggaggcggaacaataaaagccatcaaccatacaaagtgggcaattaatcacttcagcgtcaacggccagtcgggcatcgacaataggcccgttccagggaggcggtggcggctgctgcttcagcgtgcccgcccgctggacgccgggtatgacggtgcgcattga

SEQ ID NO: 244885 - DNA, 522 bp, Klebsiella pneumoniae
atgaaatctgcattaataagcccgctgctggtggggctgctgctgttaaccggctgcgcgcagccagccgcccgggccggaggaggaacaataaaagccatcaaccatacaaagtgggcagttaatcacttcagcgtcaacggccagtcgggcatcgattcaataggcccgtttcaggggggcggtggcggctgctgcttcagcgtgcccgcccgctggacgccgggtatgacggtgcgcgttgactgggaaactggggtggggtactccatggactttccggggtatcaggataggcaaaaataccttgcctggaaaaaaggaattgatgcccaaaagaggcagcacagccaaaccgtcccgctgcccgactataacggccaagaggtgtgcggtattacggtgcactttttaccctgcgatgacgtgaaggtaaccaccagctgctggtcaccgagaaatgcgaactacccgataaaagagcccgtcaggatgaaggagccggccgtctgtccgaagtag

SEQ ID NO: 244886 - DNA, 411 bp, Klebsiella pneumoniae
atgcgctatatattttttatctttatgctttttttctccatcacaagcgctgcagaacaaaaatttctactaggggttggtgttcacccttctaaatactctctcacaccgcagcaattagttagcttgttagtaaaatataaaatcaaggtgatacgatatgattatccttggtcacaagtagaattacataaaggccaatacacccctccaaactataagttggatgggctggttaagcttgccaacgataatggcattaaagtcattttgatattaaactataggaacaagttatatgggaacggtaaacctgttacttatcaagaacaagttgctatgaagtttatcaagaacaagttgctttttctaaatatgcagcttgggttgcaaatagatttaaagggttag

SEQ ID NO: 244887 - DNA, 237 bp, Klebsiella pneumoniae
atgaaattatgggaatatgcggcgtcagggttacaggtcctatattcacaagtggagcatgaaagtacttatgattttctttttaagtatgataaatatgatctggtagaaaaatatcttttagcatatcaaatgccttacaaccaagatatcaaaaaatcccttatgcaatactcttggcacaacaaagttcgtgaaattgaaaatataattagcgagtttattaatgaccaatga

SEQ ID NO: 244888 - DNA, 771 bp, Klebsiella pneumoniae
gtgggcgaagtatttgccgccgaactgcgcgccgaggccgagattttgcgcctccaccagcagctcctgctccagctgaatgtcgcggaacgcctggccatgctcattaccttcggtcggcagaccgtcgtagtatttggtggacgccagcttgaccgtcttcagcgtcgcttccgccgaggtaccgccgatgacaaaggcgatgtggtacggcgggcaggcagcggtaccgagggtacgcatcttctccaccagatagtttttcagcttcgccggggtgatcagcgctttggtttcctggtagagataggttttgttcgccgagccgccgcctttggcgatacagaggaatttatattcgtcgccgtcgacactgtagaggtcgatctgcgccggcaggttggtgccggtgttgacctctttatacatatccagcggggcgttctgcgaatagcgcaggttgtcctggatgtaggtgttgtataccccctgcgccagcgcggcttcgtcgccgccgccggtccagacgcgctggccttttttacccatgatgatggcggtgccagtatcctggcaggtgggcagaatgcctttggcggcgatatcggagttgcgcaggaactgcagggcgacgtatttgtcgttttcgctggcttccgggtcgttaaggatatccgctacctgctgctgatgggccgggcgaagcataaaggaggcgtcgtggaaggcatgttgcgccagaagggtcagcgcctgagggtcaacttttag

SEQ ID NO: 244889 - DNA, 243 bp, Klebsiella pneumoniae
atggcgttgctggtaatgcccagcgctaccggcacccagatcaccagcaggaagcgcagggtcacgccagcgccccagaacaggctggtgcccatcagcgaaaagcgggtttcgccgttgcgccacagcgtgcggcaggcgctgaagaagctgtgcgtcatcggcttaaaacgccatgactgccccggacgcgccgccggcagcctgggtatccacaggttagccaccaccgccccgccgtag

SEQ ID NO: 244890 - DNA, 759 bp, Klebsiella pneumoniae
atgactactttctcacatagagttcgagctaatgccaatgcttcgattatatcaatggttcaacgtttttcagatatatctataattttcattggccttttcgttgcttgtatattaaatggtgttaatttccaaaataaacatgttttgcttgttttgaccgttcttgtcatttttcaaatgattggcgggattactgatttttatcgttcatggcgcggagtaaaactatcatctgaattagtattaattcttaaaaattggaccttaagcattttattaagtctgggtattttttctcttttttcttctttcgatataagtttggcaatatttcttctgtggtattgtagtgtaaccgttggttttattacttgtcgttcttctattcgcttgggggccggcctgctcagaaaatttggatataacacacgacgagtagctgttgttggttctacccctgcagggattagtttattaaaaggtttcttggatgaaccatggcttggtttcatcgttttaggtatttatgatgatcaacactcacatgattttcagggcattccctatgccggtaatgtttcacaattagttcaagatgctcgtgaaggtaaaattgaccgcatttatattgcactaggaatgaaagatgagaatcttataaaggatattgtaagccgactaactgatactacgtgctctgttttattgattcctgatatttttacatttaatattctgcaatcaaggacggaataa

SEQ ID NO: 244891 - DNA, 438 bp, Klebsiella pneumoniae; identical to SEQ ID NO: 99028

SEQ ID NO: 244892 - DNA, 723 bp, Klebsiella pneumoniae
  misc_feature (7)..(16): n is a, c, g, or t
atgtatnnnnnnnnnngtgatgtatcaacgctaacaagcgtcgatctacactcatatgaaagaaagttagttttaagatcatcactgattgaactttacaatgattcaaatgataaaatttcattccttagttcaatattacaatcacctaaaaagctttgggatttattttcaataaattatgaaatatatatcaacaaatattccataaacaaaataatacatgaggtcgaaacgcaaaaattagacttcctctcgaagctgaactcacttgttcaggagcatcagactaaatctttatcaattccagccgttctggttagcaccgccataattaaaggctggacaccttcgggtctcttacttatttttatagcgatgcttcttacatgtgctgttgtcattttaggtatgcgtaatgcaagaaattcacttgcagatataattgagtcatcgaataaaacaatggttctttttacaaaggaaaacgttgatgaaaatgatgctgcattaactaaaaaaataaaccagattacaacagatgctgttgagaagcttaaaatcaaaaagagaagtgctgaaaagaccttaacgatactggaaggtttagttttcttcggtgtatcggtttggacgatgtttgtattgtatcaattcaaagatgatataatttctaaagcattaactataatccaatcagtaaaagacttccttcctaattaa

SEQ ID NO: 244893 - DNA, 561 bp, Klebsiella pneumoniae
  misc_feature (548)..(557): n is a, c, g, or t
atgaataatcaagaaattattaacctcctgcttaaggtcaagcaagaggttataaagattgagtttgataacccataccatgtatgggtttttgataattcctcttattcaaagatagaggatgatattactcgtctgcaagaaattgcctgtctagaattagaaaaaactaaacgagcagaacaaacaaaagtaacgctattattaactacagatatatgctggtattcttctgttgatgactatttcaaagctttaaggttaagaataaaaaataacaaagaaaacattgatggcttttacatagaaaatctgcaacaagaagaaattgaaagcatttcaaattcatcaaaagcatatatacaatggtgtgagatcttttcgaaaatatcagaccatgtagaatatgacgactccaatgcatggccaagttatatatttgtaatggagggtggtaaatctaagaagataacgacttataatcttccattaaagaacattgaaaaggacttcctaaactcaattgatattagtccatgtgatgtatnnnnnnnnnngtga

SEQ ID NO: 244894 - DNA, 819 bp, Klebsiella pneumoniae
atgcctgaacgtcaacctcaggaagcggcgcaatccgtaacgattagcgtggaaaccatcgcacttaacgatatcttccccgatactgacgattcacgaaggattgagagctatcaagaacttccgcaaggaaatgccttattcgcgacaacacgcttcgatcgagaacagcaaagtcaagtggcagaactatatatcacgaagccagaagacccacggcaggtcacccaactctggcaaggaaaaaggttgtccaggttaatattggtgcatcagggagcaaaggcctggttcgaagcgttcccgcgacaatggttcgcactggatatctcaaaccataaaatcacggcaatgaccgcaccgcagacagaatctgacgcttattcattagcatcatggttccacgatacgcacgatgagcccattgcttactatactgattacagtgacgaaggaaaaggatgtctggtttttcggcgtatggatccccgtcttccggcgacggaaaatgtcatcttcagaacatgccgtaattattacgccagcggtaactccattcaggccgtacgcattataacctcaggctatttctggctggaagacagcaatggattagtcaaacttaacgctaagactggtagagcggaatcatcgtattcggttcccttccgtacggaaggggatcccagaacgcgcaccatgaagttatcgaacgatgatattgcccgaaattcgccgtcaccgctgggttctcgtgaagcacactggatagcgttacattatgcatatttgggtgatgctgccaacttactgatttag

SEQ ID NO: 244895 - DNA, 546 bp, Klebsiella pneumoniae; identical to SEQ ID NO: 223176

SEQ ID NO: 244896 - DNA, 861 bp, Klebsiella pneumoniae
  misc_feature (347)..(356): n is a, c, g, or t
  misc_feature (793)..(802): n is a, c, g, or t
atgaagctattacgcctaaaaatctctgatccgtccggcttccgtagtctgccctgtggttttgaacactattttagaaccgaatgggatttacaggaagaattgaatcaacatgaaggctttgcgccttttgtgtgtgctggtcccaacggcagtggtaaatccaatctgcttgaagcattagcagctatcttctttcagttggaaattttgcgggtccgtcgaagttttttgcctgaggtattgcaaagtaccgatcatgatttatcaccaatctcatttgagctggattatctaattcgagtaccagaagagtttcgaatctctggcggacaagaatgggcaannnnnnnnnncaacggggaatctgtgcgtttccattgggtaaatcagagtgactttgacacaaatgctgatgaagttttcaagggaagccatgccgatattctattgcctcagtatgtgttgggctactcgtctggcgagaatgaaattctcagtctaccgtttttcaaaatgcgctttgtacagttcgacgagtactggaatgccttgactcgacaactgagctactctggccatccggagtcgaggttggcctatcttgacagtggtttcagccaagctattttactttgtaatctgctttttcaaaacgaaactgcgcttcaacctttccgtgaggatgttggtatagaggcgttgcgggagtttcgtattattatccgtcgcagtattcctcttgcgccggagcagttgacctcgtttgccagcgaggataaaaaccagcacnnnnnnnnnntagtaaccctgctctgcatgtggatatggatgaagaaagtggtcaaagttaccatttaa

SEQ ID NO: 244897 - DNA, 810 bp, Klebsiella pneumoniae
atggcgttgagacacctgccgatggtgtacttaatctatttagctatggaggctgttttgaaaaagattcttgcattacctcttatgttcttttccttctcctccttctctgaaggcgttctgtttacatatgtacaaccataccctgactatctggcggcctatgtcaaaacgttgattactgttggatgtgaacaaacattgaaaggcggttctgaggacctattgatcaaacgggcaacgaagggtatgaagaaggacacggcgagttacgatattgtacacaatactatcgttttgggggctggtttcggtaacggactgaaggaaaaaggtaaacttatcaccaaagaaaaaatcgcgattgatagttgtggtggtgcagcggcctataccatgatgcaaaaagaatttataaaaacggttgttgctagtatgactaatccggaacaatcgcaggttgccgatagtaaacccaaagtgccagcttctgatgatggaatttaccgtacaacggcaaaagctctggctgaattgtacagcgccaatgaagttgcagctgatgacaaaattgatggtcgtaacgttgaaatcaccggaactgttcaggatataacaaaaaatttcgcgaacgatgtagtacttaaacttgaaagcgataatcggttcatgcctgtcagcttgagcatggaagacactgagaagtcgaaagcgtcaaaattgaagaaggggcagaagatcaccattacgtgcgaaaagatgcagttattcattggtgcgccatcgggtcgcaactgcacgtttaattaa

SEQ ID NO: 244898 - DNA, 1326 bp, Klebsiella pneumoniae
ttgaccaagatgaataacccaaagtttacgacgccctcgggcgacaccgcgccacggcaggtctggcagcagaccgttgacgcagtgctggcgcagaccaaaagccaggccgctgggttaagttccgcagacgccgccgagcgcctgaatacctgtgggccgaatgcgctgccggaaaagaaaggcaaaccgggctggctgcgctttctcgcccactttaacgacgtactgatttacgtgctgctggccgccgcggcgctgaccgccatcatggggcactgggtcgataccctggtgatcctcggcgtgacggtgattaacgccctgatcggccatatccaggagagcaacgccgaaaaatcgctgcaggggatccgcaacatgctctccagcgatgcccgcgtccagcgtaacggcaagcatgagactatcccgacgcgcgacctggttccgggggatatcgttatcctgcgcgccggcgaccgcgtgccggcggatatgcgcctgattgaaacccacaacctgcgagtggaagaggcgatcctcaccggcgagtcgacggtggtggataaaatcaccgacgcgctggagggcgatctgccgctgggcgaccgggtgaacatggtcttttccgggaccaccgtcagcgccggcggcggcgtcggcgtggtgaccgccaccggcgcgcagaccgaactcggccatatcaaccagatgatggcgggtattgagaagcaccgtaccccgctgctggtgcagatggataagctcggcaaagcgattttcgccattattctcgccatgatggtggcgctgtttatcttcagcctcgcgctgcgggatatcccgatgggcgagctgctgctgtcgctgattagcctggcggtagccgcggtaccggaaggactgccggcgatcatctcgattattctgtcgctcggcgtgcagacgatggcgcgcaagcgggcgattattcgtaagctgccgaccgtggaaaccctcggcgccatgaccgtggtctgctcggataaaaccggcaccctgacgatgaacgaaatgaccgtcaaagcgatcatcaccgccgactgctgctatcgggtggaaggcgacagctacgagccgcaggggcggatcttcctcgaggggagcgatgagcccgtgcaggttcagcccggcaccgtgctggagacctggctgcgcaccatcgacctgtgtaacgacagccagcttacccaggatgagcgcggtctgtgggggatcaccggcgggccgaccgaaggggcgcttaaagtgctggcggcgaaagcgcagctcccggcggtgtag

SEQ ID NO: 244899 - DNA, 381 bp, Klebsiella pneumoniae
atgactctgatgactctgacggtactgatgactctgacggctctgatgactctgacggctctgatgactctgacggctctgatgactctgatgactctgatgactctgatgactctgatgactctgatgactctgacggctctgacggctctgatgactctgacggctctgatgactctgatggctctgatggttctgatggctctgatggctctgatggctctgatggctctgatggctctgatggctctgatggctctgatggctctgatggctctgatggctctgatggctctgacggttctgatggctctgatgaccctgacggctctgacggttctgatggctctgatgactctgacgtctctgatggttctgtaa

SEQ ID NO: 244900 - DNA, 174 bp, Klebsiella pneumoniae
atgcaaccctaccggtacaacgagccgtatcccctcagactgcatttccctgaactgggccacagagacgccctgctgtacggtgaacaggtgtactgtatcaattctgtcagcctcattcagtacctgccgccagcggtccttacaggtggttttaacccccaacatgcgtaa

SEQ ID NO: 244901 - DNA, 1071 bp, Klebsiella pneumoniae
atgattgagttatcggtagaaaatctgcatctcacctatggcgacaacccggtgttgaagggggtgtccatgacgctcggccggggggaggtagtatcgctgctggggccttcgggaagtgggaaaaccacgctgctgcgggcggtggccgggctggaaaaaccgacgagcggacggatcgccatcggcaaccgcacggtgtacgacggcacgccgcgcagcgagatcccggccgaagagcgtaacctcggcctggtgttccagtcctatgccctgtggccgcacaaaacggtgttcgacaatgtggcctatccgctgaagctgcgtaaagtggccgccggggagataaaagagcgggtgcagcgtgtgctggatcagctggggctggggcaccttggcaaccgccatccgcaccagctctccggtggccagcagcagcgggtggccatcggtcgggcgctggtttacaacccgccggtgatcctgctggatgaaccgctctccaaccttgacgccaagctgcgcgaagaggcgcgggtgtttctgcgcgagctgatcattaagttgggcctgtcggcgctgatggtcacccacgatcagaatgaagcaatggccatctccgatcgtattctgctgctgaacaatggcgtcattgagcaacaggggaccccgcaggagatgtacggcagcccggcgacgctgttcgccgctgagtttatgggcagcaataaccgcctgcacggcaaagtgatggcgctggagaacggcagggcgcggatcgaaggcgccagctggagcctgtgggggcgagcgggcgagggggttagcgttggcgagccggcgacggcggtgatccgcgtcgagcgcctgcgacttgacggcgccgcgcaggataatagcctccagctaccgctgctgaccagcatgtacctcggcgaccgctgggagtacctgttccgtaccgaaggcgacgactttccgctgcgcgcctacggaacggcgctgcgcgatgccgaacactgccatctgacgctcccggcggaggatgtgtggatttttccgcagcagtaa

SEQ ID NO: 244902 - DNA, 150 bp, Klebsiella pneumoniae; identical to SEQ ID NO: 8261

SEQ ID NO: 244903 - DNA, 1344 bp, Klebsiella pneumoniae
gtgtcttaccaacactcccccacaacagaagacccgatgaacatatggtatatcgttggcaccatatgtctgctctttgcgcttctcatctggctctttttacccgacatcgtctttgccacctgcctgatcctgcacacaatgtgggggatgactgactgggggccttttcaccattttgccgccccccgttataacctgctggccaacaccgccaacaacgctgcaacgatcactttcagccagtggctggatgtcatgtcacagaccgtggggatcctctggctgattctgcttcccatgacgatcggctttctgtggatgtggtttcagcatccggcccagccccgcttcacccgcagaccactgaatatccacacgctgccacatctgttttcatcactgtcaccggcgatcgcccccgttctggctgacggagacagcaacagactcttccacggacaaaaacgtcccgagcgccgtgtcgctctaacccccgaagcctttgtggagcagaacaaccttatccgcaacatgcagctcgatgttgcggccacgcgccagtgctttatggcgcaactgggccagcctctgaccacctggaaagacatggctccacatgaaaaagcactctttgccgtctttggcctgcagttcttccttggggaccggaaatcggctgtttccctgatgaataacctcaacctctcctgcagactcaaaagcaagcgggaccaggggcgtttcagcacgccagtgtattcactggccagaaacgcctttatccgggtcataaaaacagaagacgcacaacagtggctcaggcagcaccgttacgttcgcagcggtcttgtctggctttacgcacatgatttgcgcctgacgccccccaactggctgtggctcaagggcgttgaccggacgctcttctatgcccttcaccgggcaaacaccacaaaaggcttcatcgaaggggccggcgtggtggccgttgcccgggcagaaaatgaagccagccgtctcggcctcccctgcccggaaccctgtgtggaagaggccattgaagggcttcgacgggacatgctggggctgggcctgatatgggacgaacctcagccagatcgcgatcgtaaacgtcagatcaggacccgctggtcactcacggatgacgtgataccccgccgccatgataacgacgaagacactgacactggtgaaaccaccgaaaccaccgaaaccaccgaaaccaccgaaaccaccgaaaccaccgaaaccaccgaaaccaccgaaaccaccgaaaccaccgaaaaacagcatcccgccgacaaggaaaaagaacaatga

SEQ ID NO: 244904 - DNA, 546 bp, Klebsiella pneumoniae
gtgaaggctgaaaataaaatattaaatctttttcatgcgacaacaatgagcagaggcctgcaaataataaaagatgggaaaataagaactgatgctccttctgttatatgctggtcgttagagacgacaccaggatggatttatttatcggatcaacttgataatgcggtgcattgggggaataaaatagcatgcctttcaaaagatgaattatttttctatattttcagagttcaggttcaggaagaaaattgttatcctgatacagatgatttgcaatatgtgtcgtggttatctcctgaggaggcagaaaacacagacctgtatacatgtctttctctttgccattcctgccgaactgacaaagaactgtatacaggttgtgaaatatcagattatgcagtccttcctgcaacaacactgtatactgacaattcaggacatcctcaatatgatattgttaatacgcttaaaaaacatataggcaaagatgagtataatcagtatgaatcacttcgtcagcgtattgaatgggtttgtttataa

SEQ ID NO: 244905 - DNA, 381 bp, Klebsiella pneumoniae
atgaaaattcaccgcatatccccggagacgcttataacactcatccacgcacacctggccggaaaagctgacagtaccgccaaagaagagcaccggctactccgtcgtttcctgcgggatgatgacggcaggctggccggcgtactgctgaatattgccggaatacttcagttcaacagggaattaagtgcgcggcataattatccggccacacccctgactgaattttcattaaggaaacggggaaaacaacttcatctctgtctctgcagtctccgtttcttttatattcctccggtatttatacaaaacaaaagaagaaaatctattgttgtacaccttaataagatcacttataaacaaacccattcaatacgctga

SEQ ID NO: 244906 - DNA, 360 bp, Klebsiella pneumoniae; identical to SEQ ID NO: 14013

SEQ ID NO: 244907 - DNA, 144 bp, Klebsiella pneumoniae
atgacactgacgttacttaccgcgtataacgcaccctatctggcagccctgacacgtccactggtcatgcctgccccggaaaaggttccggatgtcagcgaaccggtaaccgctccggataactcagaaccacaacaggtttaa

SEQ ID NO: 244908 - DNA, 2172 bp, Klebsiella pneumoniae; identical to SEQ ID NO: 226550

SEQ ID NO: 244909 - DNA, 1356 bp, Klebsiella pneumoniae
atgacacagaccatcgagctgattatgactgaaaataccgtcagccagacctaccgggcaacctattcacccgatgacaacaaactgcgcctttacgcatcattacggctggatgaaaaaacgtattccctgatcaacaaagctggctttcgctgggcgcccaaacaggaactctttgtggcgccagcctggacgccgggacgggaggatgtcctgctttccctcgccggtgatatcgaggacgaggacagcaccctgtttgatcgccaggagcagcgcgccgggcggttcagtgactacagtgaccggcgggcggttgaatcggagcaggcgcttgcgcatgttgattcgctggcatcggctgtcccgctgggacagccgatcctggtaggccaccacagcgagcgccgcgcgctccggcatgcgcagaaaattgagaacggcatgaaacgtgcggtgatgctgttcgagcgcgcggaatactgggaacagcgcgcgcaggcctctctgcaacacgcgaaatacaaggagcgtccggatgtgcgttaccgccgtatcaaaaaaatcgaggcggaattacgcaagtcccaaaagcacattgcccggtctgaaaagtatatgacgatgtggcgtgcgcagacgctcgatctgaatatggcgttactggtcagtaattatgaccatatttatgcctgcttcacgctcgacaaatacccccgcccggcagaaaaaagccagtatgagggttcgatgtctctccattctgccctgactgaggagatcattacttttgaacaggcgcgggatattgcgatccgctgtcatgagcgcacgattagccaccaacagcgctgggttaatcattaccagaaccgcctggcctacgaacgcgcgatgctcaatgaaaacggtggcgttgtcacccgaacacaggaatttgaaccaggcgggcaggtactgagccggggagaatggttaaccattatccgggttaaccggagtcagggggaggtgagttcagtcgaaacgccctgttatcgctttctgggctacagcggcacgatgaaactcacgcccgaccgtatcacggactacaaagccccgacagcggaggaagccagcgacgcgaagaaagcggcgaagcgcccaccgatcgtcaactatccgggggaagggttccgggaaatgacaaaggccgagtgggcgaaattacccgctgattataaaggcgtgcggggtgctgcagaaaccgaaacacacggcgcttaccgcttccgccggtgcatgacgcacggctgtacgcttgtgaatgtgtatatcacagacatgaaaaccgttgaaattccgaaaaaatga

SEQ ID NO: 244910 - DNA, 564 bp, Klebsiella pneumoniae; identical to SEQ ID NO: 235905

SEQ ID NO: 244911 - DNA, 147 bp, Klebsiella pneumoniae; identical to SEQ ID NO: 139223

SEQ ID NO: 244912 - DNA, 561 bp, Klebsiella pneumoniae
atgactatcaaaaatgcccgtgccgggcagagcttcgcttaccctgaaaatagcagcgatgatatttcggtcattaaatttgaggatacaaaagttcgaattgttaagattttgggcgaaccttggtttgtggcggcagatgtatgtgcggctttggaaatcaccgatcacaaggttgctttgcggcgtctcgatggtgatgaaaagggggagtgtttaatacccacccttggcggaaagcagactatgcgaattatatgcgagtcaggtttctacaaactgattgctcgcagtcgtaaggccacaatacctggctcgtttgctcacagcttcagcaactgggtattccgcgaggttgtcccctctatccgtaaaacaggaacctacggtgtgccattcgcgttcctgaatgaccatacccgccgcaaagaactctatatgaagaaggctagcaggcgcggtaaagaccttcagtcatgcaaaggtgagaaagctcgcctagccgccgaagaaatcgagctgtggcgtaagtatcaacctgacttgctggaggttcattaa

SEQ ID NO: 244913 - DNA, 1752 bp, Klebsiella pneumoniae
gtgcttgattatatatcagaaataccattgccggttgaccaaataccacaaggcctaaaggatctactatttgttgaagacaactccaaccctcaacgagatattactgtaactcatcgttacgaaagaaatatacatcaagatgattatgaatatactcatatgatcatggctgtagttcccgaagatgatgtcacaaaattaaatgttttacgtgaatcaagtgaaggtgttgtaacatattccacgccacattgtacagagaaaggtggagctagggggatagatatatctatttctggttatggatatatagtagcctcttggggatctaatgctcactactccttttttttggccgaagatgtctggatgaagctgggtttaaaaccaaggctcataggtgatgatgaacaaaaagtaatatttgatgaggttgcctcgccatcttatggtgtcgcccaaggggatgtctcaagcgaatactacttcaaaagcaagaaagatgtaaaatggacaatgaggaatgaatttctaaggaaatacttatggatgaaaggttgcataggagtaaaggtttttttcttcgaagcttatatcgaacgaaccaaagaggtactaggtcttttatcagggtctaatcactttgtattaaaccttccttggattgattttgaaatagttgatcatggaaatagagtaatacttcaagcatggggaaccgtacaatctgttctgcccgaactttgtggtgaagtggacatcaacaaattagtatggcctggccacaaagatccgatgacagcgtcccgagctcgcgattttagaaaagatgaatatgtatatgttgatgatgcttttcttattaaatatgagaaagataaaacctatgaagccattccatttctttataacggccattatcaagtagcccctagttatggaggacagtgggcctttagagactgtgtcagggtcggcagaaacttagtaaaaatacctttttatgagctttaccgaggggttccagaaaaggaagtgtaccatgtattcgattatgcgaaagatcagaaccttatcgacgttaactcattaaatgtcgaacatattgtttctaagacttttagatttgcaagagaactagcaaatctaaatgataacttagtatccttaggatattttttaaatgttcccctatctagttatgatatttttgaatataacaatgatgaacttaatgcagagggattaagaaattatcctgtattgcaaaagctttctcatgtagcctcatgcgatatgcaagagcaagattttttagcgagatgcaaaactataaacgagattacaaataagattaaaattggttcattaaagaaattaagtatcgcaatgggcgtagccccaaaggatgttgatagattgcaagcactgaaattattacaaggaatattaaaccttactgatgctattattgaacagaatgaggataaatcagcacttaaacatgctaatgaacttgcaacatttagttcgcctaatcctaagttagcctctctcttcattaataatgatttgagaaatgctgaagcacatgaagcagtaaataaatcaatcgtacatttatctaatcttggctttgatagtgcaactttagcatccggttatagccatgcgttagattttatatttgataaaataattgaaagcattaaaaatttgaatgctaatttaaataaaattctgaattag

SEQ ID NO: 244914 - DNA, 1161 bp, Klebsiella pneumoniae
atgagtaagaaatatttatcgataattacccgcgccgggcgcgaaaaaatagccagtgccattattgccggtgagaaaatttttttttccacaatggctgtcggtgatggcggcggtatcagcgtgtcaccagacgaaaatcaaacaggtctggttaacgagtctttcagaactcatcttaacagcctgaaaattcccgataatgataaaaatatcattattgctgaaatgataatccccccggaaacaggcggtttcactataagggaggcggcccttttcgatgatgagggtgtgtgcatggctgtcgctagcgtcccagaaacatacaagccactactggctgaagggtcagggcgatttaccataatgagagtctggctcgcggtcagcagtactgaaggcatcgagatactgacggaccccgggattgtcctggccacagttgaggacgtgatatctgtcaggaatgaagcaaaagactatgcagacgagcaattgagtgaacacgcacaatcccgagatcatcctgacgccacgctgaatgagaaggggtttacacgactgagcaacgcgattgacagtgatgatgaaacgaaagccgcaaccccggcagcggtaagggctgccatccgcgcagctatccgttcggcgtgggagctggataacccagtcggtacggtgaagttttacgcgcagaatattgaccctaacgagcgatacccctggactgagtgggtttacacgggggaaaacaaaacaatccgcgtggcaaaagccgacgcctcaaacgtgggattggctggcggcaacgatagcgtcacgctccagaaagataatctgcccgccgttaagattgatgtaagcggcgaaaccagcgagttgcctgaagcaacgctgaccactaaacctgccggcaggcacaaacacgggggagtgcccagcagggttaacccgtgggagattggcggcgatatcagccagcgctttaacccggcaaacctaggtgatacggatgaggctgaagaccatcagcatgaagttgtgcaaccggcacataagcatacgactagcggcaaaaccgctaatctcggcagcggtcagtcattcagcgtggtggaagcgcacatcctgctgatgtgctggagccgtgttgcctga

SEQ ID NO: 244915 - DNA, 276 bp, Klebsiella pneumoniae
atgtcgttcacagtaacaaaagaagtcaaagaactggtttcgtatcctgagctgggcgcgtcgtgcccgttaaccactgccagcaaagaaattacctacaccgcaaatcgtctggtaagcctgtcaggtgccgtcgctcaggtgctgtttgctgtgcaggttggggattccgaaacgccgggagagcgctaccacctgttcaactactccggtacgggcaacccgctggaggaagcggagctatcgctcaggatgagcctggaaaataacgaataa

SEQ ID NO: 244916 - DNA, 2226 bp, Klebsiella pneumoniae
atgacgaatatgattgaatcgccatcgtgggacgatgaaatagccattatcgccagaaatgagcgtgtctctggcggtcaggatggcgttgccaaccggccattaaagaccctggcgaatcgcacgcgttatcttaagcaagcatcggataaagcgctcggtgatttatcgggaaaagtaagcgcagtgaaaactttttccgaaggtgcggtgctggattcgccacgagatgaaatcctttacggaaattaccggatggtctggacgggagacttccctaaggtcgtcccggctgacagcacgcctgacaacaccggcggaacaggcgcgggagcctgggcgtatacgtccgatgcaccgctgcgcacagaaatgcgagcgacgggtgataaatccggcggcacactgctttatcttaaacacggagaaacggcacaggatgccattaagtttgtcacaccactgacaaaaaacggtgtcgaaaacgcggaatataactaccagctggtgcagtcgctgctcaataaagggctgcatgtcgatttgaaaatgggcgacatttatttttcgcaacctgttcagacccggaaagggcagattattaaaggacagggcgcgccaaacttttcaccatattgctatacgcgggttatatgcctttccgaaggggggggctgtttctggtataccgacgactcatctaccggacaggtcaggatgccgcagattatcaatatggggctggtcggcgattaccctgtccgctttaatgacgaacgcacagcaatcattaaggacgacacggccgtttcaaatgtcccgtttggaatgcatccggttgtccggttatgccatatcagccccagggtgaacggtgtcggaattggcgtgtcatggtccaaaatgtttgatggcgccattgagttttgtgaaatagcaaactttgatattgacctgctgttgaacggctgcgacctgaataaaatagcccataaccgcatcagaaatggctggcgttacatggtgctggaattaagcgcgagcacattcggttctcaaaatgaaatacaccacaacgatattttgcatgccggatcgccaaattgcatcatggttaagaccacggcccgtcacgcccgtatttatgataactacctggagcaggccacagggacagacggggaagcactcatagggtttattgatgcgacagatgtggatgctccatcctatgcgggtaacgtatcagcgggtcgttactcaactattctcagggataaccggatagacggtttttcaaaatcgaaaaactttatttataaatatcaacccgaaggccagacatacggggaaatcgttgatgtatcaacggtggggtcgaatgtcggtctgggttcaaatgccctgacactggttgatagcactggggctacagtagacagagtgcctcttttgtataaccagcagcagccgtgttcgttcgtctttaaaggtccgcgtttcggtaaatggaacgggtatacctctcagggtcagttcgctgatgttatcaacggactcaatgtcggcgctttcggcacatcgctgtacggtaacctgttgtcaaatcatctgcgtgctcgcggtaatgagatggtgctgatggccggtttcgccagttcaggcgtattcagctacgccgcgactgcgggaatgtttgagcctgagaagacctatattatcgaggtagaggcgtattgcatcatcggtaacgaagatttcaccttcggtgggattgtatcgggaaccgggaaggtggcgacgacattcacgctgtcaacgacaccgcgaaaaatgcgggtggagttcgtgacaggaattgctggctcctcgaacggtatttacttctcacgttcaaataacggcgcggatattgtgattaagcgcgtccgcttcctgaagaaataccttcatgaaaatgccatgtcagcgagcgcgacaaaaaccctgaagataaccacgcagtccggtgagattcagatagccgccaatggaggttttcagttccctgcatacaaaatactgagattcatcaatggctatctggtggatacattttcacaaatcaataatgccgccgagatagatatcgcctggacatattcatcagggctcctgacggtaaacgtcacaggcaaaggcggctctaaacaactggcagtcagtcagaccagccagccgggataa

SEQ ID NO: 244917 - DNA, 597 bp, Klebsiella pneumoniae
atgactagcagcctgttaccgccgggttcgtccgcgctggagcgcagactggcgcaggcctgttctggcattagtgatttaaacgtgccgctgcgtgatctgtggaacccgtggaaatgcccggaaaagttcctgccttatctggcgtgggcgttttccgttgatagctgggatgaaaactggagtgagcaggagaaaagaacggttgtcagtgaatcattctggctccatcagcgaaaagggaccatagctgcaatccgccatgtagtcgaaaaaatgggttattccatgtcgatccaggagtggtgggatattgttgacccggcaggaacattcaggcttgaggtagatgtgaatgatattgggctcacgtcaaaaatgcttgatgaacttttcaggctggtcagtgatgcaaaacccgtcagcagacacatggcgcagttcagtatcactgccaaagtgaaaggcgatattcatatcggttccgcctcttttgcaggggaaattatcagtatttatcccgaagagcatgatcctgaagacggcattttctataacggcatgatttttcacgatgggaattttggttacaggtga

SEQ ID NO: 244918 - DNA, 597 bp, Klebsiella pneumoniae
atggcctttgagaagccaaaaaaacaaaatatgcctacgttgcgcccagaagaattgcctatgctgatgcgttctctcgtcatgtcaaatttgcctgttccgactcgctgcctcattgagtggcaactcctgactctagttcgtccttctgaggcttccggtgctaggtgggctgagctcgatctcgatgcaaagctctggactattccagccgaacggatgaaggctaagcgtgagcacattgtaccgttatccccccaggcaatagagattctggaagtcatgaagccaatcagtgctcaccgagaatacgtttttccgagtagaaatgatcccaaaatgccaatgaatagccagactgcgaatgcagctttgaaacgtattggttatagtggaaaattagttgctcatggtttacgttctattgcaagtacagcaatgaatgaagctgggttaaatgcagatgtgatagaagctgctctagcacatacttacaagaatgaagttcgtaaagcttataaccgctcaatctatttagatgcgagaatagaattaatgaattggtgggggcaagctgtccaccaacaatacaaataa

SEQ ID NO: 244919 - DNA, 345 bp, Klebsiella pneumoniae
atgaaaatgaacataacggaaaccgtaaaacaggctcgcggccactggccgcacatactcccggcgctgggcgtgaaggtcattaaaaaccggcatcaggcttgtccggtatgcggcggctctgacagttttagctttgacgataaagaggggcgcgggaggtggttctgcaatcagtgtggcgcaggtgacgggcttaagctggtagagaaagtgtttggcgtgaccccgtcagaagctgccgggaaggtgaacgccgtaaccggcaacctgccgccggttgccccggagattattgcggccgtagaggccgaaaccgaggccgaccgcaaagcggcggcgtga

SEQ ID NO: 244920 - DNA, 690 bp, Klebsiella pneumoniae
atgcagatcccaatacctacgccaatccatgattttagctttaatattagcctattgcgtggattcatatatcagacagaagccgcaattagcgaaaatataggtaaatacgaaaaagatgggccagatacctttgtcatagaagaacatccagaagataacatttacatcacattaaaccactacatgggtatcgatgatcagtctttcgacctcgataaaactttcaaaatacgttacccaagcataatgcggcgatcagccttcctgactatatttggtttattagaacacgaaatggaaaatttctgtaatatttattccaaggaaaaaaaaacgaatgttaaattatctgatttaaagggttctggctttgaaagaatagacctattcttgaaaaagatagtcggcctaacatcatctacaaattatcctgaactaaaaaaaataataaaacttaggaatagctgcgcccataacgatgcccgctttgtcacaaacgacaaccaaccgattaaagaaatagatgatctaatcaaaaaatatccagctctgcttgaaaaagatgaagagcaagtactattcaaaggtgatgtcttactgacatttctcaaagtatttgaagaatatatcaaagagatagaagccgtgattaccccccctcgtcaaactaagagtctctttcaatag

SEQ ID NO: 244921 - DNA, 1074 bp, Klebsiella pneumoniae
atggaaaacttatactacacacagttcagccatatagattttaaagatcccttctttgattcactaaaaaatgattatccggactttgcaggatggattgaaaagaaaaaaaatgatccatcagcattagcctatgttctttttaatgaacaaaataatattgaaggttttttatatctgaaaatcgaaaatgagaatgttactgatgtaacccctcaattaccgatgagaaagcatctaaaggttggtacattcaaatttgaatcacgcggaactcttcgaggtgaacgttttattaagaagatattcgaccatgctttagaatgcgatgcggaagatatttatgtaacggtttatccaaaacacgcttatcttatcaggttattcaagtcgtttggatttgatactgttggttcgaaaggtcctgacgataatgcggaagacgttttactaaaagaattgcagaacgttcagttgaccggggatatagtaaatgactatccattcgtacatcattcagataataatagaaaatacatcctctcggtagatccccattaccatacaaatcttttcccggactccatactccgtacagaatctcctagcattgtcagcgacgtgtcgcatacgaatagcataagaaaaatatatatttgtgctatgcacggagttacatcatttagacctaatgaccttgtgttaatctataggacgaacaaaggactttccggcccagcgtattataattcagtaatcacttcgttatgtgtggttagcaatgttaggaatatcgatgaattcgatacagaagacagtttcataaattattgtaaaaaatatagtgtttttgacattaaagatttaagttatttttatcgttcaaaaaaatatccatttatagtttcatttacatataatttagcttttcctaaaagaccaaatcgtgctaaacttatttctgaagttggtttgaattctaatgcctactggggggtattagatttatccaaccagcaatttgaacatattattaaacttggtgaagtagatgaaagtgttattatcaattaa

SEQ ID NO: 244922 - DNA, 585 bp, Klebsiella pneumoniae; identical to SEQ ID NO: 152044

SEQ ID NO: 244923 - DNA, 561 bp, Klebsiella pneumoniae
atgaatctggaaaaaggcggccgtggtgccatagagcgtatggttgaagcttatggtttcaagacaagacaagctttgtgcgaccatttgggaatttcaaaaagtaccctagcaacacgctatatgcgtgactcttttccggctgagtgggtgattcaatgctccttagaaactggtatctctctaaactggctcaccacaggacaaggttcaaagcaaggttcacataaagcaaacactaaagaacttgaaaagcatgttttgaccaatgggtcattacgcaaagacggctcatatgtttttgatgcaagctttttgcctgataatctgaaaaatcctgttgttgtgatcgacggaacttcagaatttatctgcgatatggattatggggatgtgcgtgacggcatgtgggtagtgagtattgatggagaggttgctctaaggagtttgacacgtcttccaggtagccgacttcgcatagatgggggcaatagttcattcgaatgcgcaattgcggatattgagatacttgcaaaagttttggttagttgcctccgataa

SEQ ID NO: 244924 - DNA, 342 bp, Klebsiella pneumoniae; identical to SEQ ID NO: 158474

SEQ ID NO: 244925 - DNA, 237 bp, Klebsiella pneumoniae
atgcgaaatagtaaaacctgtaccaacaaaaccggaacggatgatgctggtttgttccagttgtttaacgacactcgtctggatgagcgcaaaagctgtgcctttgccgtttccctccgcatggaggcgctggctatccacatcctaaaagagggaatgaacggcgtggaggcggcggaattgctgcgccgtgaagttgcccgttatgaagccgaatcacgcggggactggcactga

SEQ ID NO: 244926 - DNA, 1686 bp, Klebsiella pneumoniae
gtgcagatcccattatttttagcccgtattgctcaccctaataaaaagcacaagtggcaattcgaaggctttaagcagcagttttatttcgcctatgtggctgaaacgagcattaccgccaaaggcgtgtttaatgactggatgtggtggtgtggagagctgaacttactcacgttaaccaatccaacagaaaaacaggcaatttgggagcactatccgcgctcccgcttagaaaatgccattagagaagcacaaaactggttcagcggtaacgatatgggcagctacgcagccaatgtggaagtcatgagccgcgtgtatggttatgcacgcattaatgaaatgttcgcgccactgggtacaaataagctgggttttgtcaccgtggaagctaaagagcagctggaaaaagcacaatcactatttaacgtgctcaaacaccaagaagaacaactggctgatattgtcgaggccaacgacacgcaagtactggcagggcttatccacaagcgtgctgaagtgctggagttagtagcaaaggttaaaccgcttaatagttccaagcccatgctaaaagatgcccatattcttagcttagaagacaaaacgacctcgctttatcaacgcattgaacaggcctgtttatttgccgaatttgttgagcgcagtgctgagcgtatcaacaaccgactcgctgatttaatcatagatgttgaaacagagtgtgccccactgacgaatttcccgaaacgtctgtacaccaacacgctgcgcaccataggtcatattttagacggcgcgttgaaagacgataccagcagtgccactggccaaaaagagcagcaagcagacagcgataccttactgcattacctgcgtaaactcgatttaggtaaagcacatgacaagctttcagccttagcgcaagaagtgggtttaaacctgcacagtgatcaacagctgccgatagtggagatccagggacatattttgtctagctaccgcaactgcaaagaacgatttgggaagctggtaaataacctcgcagagcaaaaccaacgcgcccaacagttgcaacaatggcttagtagcgccacggctgagtatgagtacgctgatgacattgcagagctaccaaaactggtaatgaaattacagctcattaaagacgctattgccgatctccccaacgatgccgagagcaagcgtcaaagtatgcaaaacagtttgcgcaatgggcagttttcatcgttacgggatttaccagaagagcttttaaaaccggcacgcggtcaacttacaccgattcaaggtcagctacttaaaattgaagagcgtcttaaccaattcagacgcagctccatcgagcaggtaaacagctggctgccgttattaaaaccgctattggcttctcaaaagcaagcggaaccagcagcgttgactctgggggatgtgagcaatttgggtgtcagtgaacttcaactggtgtgtgaaagcacccaagccaaatggcagagccagggtgagcaaatattaaaagatacaggcttaacactggcggattggcaaccgatttatcaggctttgagccaaaaccaagaacccgcgttaacacctgagcaacagaaaggacttgtagacaaaggtattgtaaaaatgcgcctaacctttgccactggtttatag

SEQ ID NO: 244927 - DNA, 708 bp, Klebsiella pneumoniae; identical to SEQ ID NO: 10371

SEQ ID NO: 244928 - DNA, 402 bp, Klebsiella pneumoniae
atggccagagtgtctattagtgaggcagcccgattgacgggtaagagtagaacaacactgcacaggttaattaaagcaggtgacctgtccacctgtagcggtgaacgtaatgcaaaaatggtagatacgtcagagcttttgcgtgtctttggttcctttgagcaacctaagggtgaacatctttctggacaggtctctgaacagcgtgatacagcctttgctgaccagaatgaacaggttattcgtcatctgaaacaggaaattgaacacctgaacaccttacttttgtccaaggattcgcacattgacagcctgaaacaggccatgctccttcttgaaaatcaccaggcaaaattaactgaatccccggcgccatggtggaaattctggaaaaagtcctga

SEQ ID NO: 244929 - DNA, 483 bp, Klebsiella pneumoniae
atgcgtgaacccgaggaagttgaacgtttctggtttaccttttcccctgctggcgcggttttcggctgcgaagcggccgaactccgtcagtcgggttttcttcggatgtaccgtgagtccgaactccttcagtctgcgctgcatggctatacgaaagcattgagcgtcgattcgcttgtcgaacccgatgactatgtcatctgcgtatctgaccatgaccacattgcctgtggcatggcggcgtcgccactgatgcgcccacagatcgaagacatagtggaggtagatgtttgccagcagcggcgagataaccgcaccctgtggggtgccttcctccgatgcccgccattctccttcctccgatgcccgccattctccttcctccgatgcccgccattctccttcctccgatgcccgccattctccttcctccgatgcccgccattctccttcctccgatgcccgccattctccttcctctga

SEQ ID NO: 244930 - DNA, 1002 bp, Klebsiella pneumoniae
atgataaggggatgtattttgaaaagaaaatttgttactgaatatagtataggctacttgaatagctataccggtatgataacagcacatcaactgatgaatgcggataaaatgacaccgaaacagaacgctgaattagccgagtgtcatatttacgccatcaccgcgatacctagttcatatttcaagcagcactctttaaaacatgatgctaatggattatctggatgcttatgttacaaaatagagggtgtggaaaaagaaatagaatttcaaaatttcccttgggttttagatgataacgcagtatctataggttgtaagtatccattcaaagaagtaataagttacgatgcaaacggtaaagagtgtgcatacataccagcaaattatctttcatctgtttttctaaacaggcaaggcagaacagagttgaacgattacgaagtattatatattgggcaagccattggtaatacaggaaatcgcacggcaattgacaggcttagcagtcacgcaacattacaaaaaattctagctaaaacagcgtatgattatccagataaagaaatagtaatatttatgtatgaattcaaacatgaaaatatgttttcatcaatggatggtcgagcggtgcaagcagataattcaagtagaaatgaagaaaggcttttcaacgcgattgaaaatccgcctaataaaaaacagaagatcggtctaattgaagctgggttaataagatattttcaacctccttacaataaaatttttacaataaaattcccatccaccaagcacaagactttaaactcttgttatgagcttgacatatcaggttttgtcgtagaaataaactgtgaaaatcttaattactatcttcattccgattccgtaaaatcaagccaccatcacattgctaagattgatctttttaattcaatagatagatcttctttcttttcacctaccgaattcaaagttgcccctgatgttattgtctaa

SEQ ID NO: 244931 - DNA, 2283 bp, Klebsiella pneumoniae
atgttagaaagaataagaaaaataaaaaacattggtctttttaatgatatacagcctgcaggtgttagatttaaaaaactatctctcgtttatggcgataatgggcgaggtaagtctacgttggcttcaataatgcgatcttatactcattcagagcctaatgttattatccaaagaaaaactttaaattcagtggatgagcaagctgttcatattttatttggcaatggcaatggtgttaagtttgaaaataatctatgggatagtaagttcactgatatacatgtatttgatttggatttcattgataataatgtttattctggaggtgaaattaaagcagtacagagaaaaaaattgctaagttttgcgttaggtcatgcagcagttactgccatgacagagtttaatttggctacggattttctgactgaatgcacgaaggataaaaaacttgctgaagctaatttgcttggatataaagagggtttaactacagcgaagtatattggtttaaagaaaattgaagggttagatgacaaactagctgttaatgctaccaaacaagccgaagcaagtaagattgatattctgaaagctaagggtaaagccaaaaaaatgacctctttcgatgttgaattaggcagtttttttacgattttaaatacgacagcagagaaagttaatgacaaggtagaagagagggtcaaagaacatatagcattgctcaattctgagggtgctgagaaatggatttctcaaggccaaagccatattaaaagtgacgtatgcccattttgttctcagaacctaaatggaaatgacctagtagaagcatataaaagttattttaatcaagagtacagtgattttattaagaaaattaataatctaacatctttgaaagatagtttgttaaaaaaaataaattgcccattaattaatcaggagtttactactgcaagtgaggttttcgcatcttgggcagattctattgcattagactcaataacaatagagtttgctaaaattcaggatttaaaaaatcaattagatgacaaactgacagggtatatttcatctaaaaatggagatcttttcaaggtttttgtcggtgatgaacttgaagattgtaagggattaattgatgctattaaaggaataatcgaaaaaaccaataactttattgatataaataatgctgcaatcgatgagtataaacaaagtcttgaagcaattgatctcaagtcgttggtggatgaaaaaagagaattagatcgaataaaaacaagatactctgatgatgtcatcggtttaatttccatttatgaaagtgctaaaaacgacgaaaaaaatgccagccaagataaggaaaggaaaagagaggcacttaatcagattatgagcgccaccttaggaaggtatgagtcttcaattaatagtttgcttttaaaatttggggcatcattctcgattaaggagataacatataattataatgggggaggggaaccaaaaaccgagtatgcaattgagttaagaggtaaggaaatttcactgcaaggtgaagattctggctttaaaacatgcctcagtgaaggcgataagaggactttggcatttgccttttttgtttctgtgattatgtcggatgcggatttgattaataagattgtagttatagatgacccaatgtgcagcttcgatagtcatagaaaacaacaaactattactgtgttaaagactatttatgataattcaaagcaacttatcgtattagcccatgatgctttttttattaaatctctgcgggatgagttctataagaaaggtgttcataatgatatgtcccttataaaaataattcatacccaaggacagtttagtaatattgataacttggatgttgatattgagtgtgagtcagcttacttcaaaaatcatcggttggttagcgagtatgtggcgggtgttcaacataataatagagacgttgctacagcaattagacctatgcttgaaggatacttacatcgtcgatttcctaagctaattgctccgggcttgctttttggcgctattgtacagttaatatcaaactcacaaccaggtgaaccattgtattatgcattctcacttgttgatgaattaaatgaaattaatgtgtatgcaggtaagtttcaccatgatacaaatgcaaacgctgctgatgaatttattcaggcaggtgagttgcttactttttgtaaaagagctctgcaagttatttataaaggcgcttag

SEQ ID NO: 244932 - DNA, 276 bp, Klebsiella pneumoniae
atgagcatgtttaccgaagggagaacatcatgggcacaggaaatgctgatccgcgaggcggtggagaacgcgaggcagggcttcacggtacagcttaaaaatggcgctcgcattatcgtacccgcgaatgattcatcaattgatttaattattcacggtttagagaaatcaatccgtggtgattatgaacgcgatcgcctgacgtttatagattttatgtattactggcacgaaaggatatttaagcaggttaaaagaaagaaaaccgcgccctaa

SEQ ID NO: 244933 - DNA, 240 bp, Klebsiella pneumoniae
atgaaacgcctttatgctgagcagattaataaaatgctggaagattattatttcaatctggaaaacaacccgcagggtcgcgattcacattatggcgttttggctagcgggatccagcatatttatggtgccgctttctgcctgaatgacgatgacacgcttatcgagcttcgcccattcgtcaacgccatcatgaatggagagataccgcctcctgtgtttgcggggattgctgcatga

SEQ ID NO: 244934 - DNA, 243 bp, Klebsiella pneumoniae
atgagcaaaaatactaacgacaaactttgtctcggtaagccaaaagtaattgatggctccactttggcgatgggactttattccaaaagaacaggacgtttaggtcaggtgttaatttcagttaatactgtcgccatctacggaggtgcggttgaaacgccgccagagttaatgggaaaactcaaagaattattaactcctgaaaaaatcacaagttttaaacggcaggaaaagaattattaa

SEQ ID NO: 244935 - DNA, 648 bp, Klebsiella pneumoniae
atggatgttaattctactggtaatcaaaatcgtatctcaggtcgtgatttcaatgagaacaatatccagatagataaatttgatggtagtcacacaattaacatcgcaatcccatcggaaaagcatgatgaacggccactagtaaaagcacaacgcaaagagcttaacactctcgttgcaacagtctccgctacatgtggtggcgaagcatatgagatttggcaaaagttgcatgctgaaataggcgtttccagtattgaggaaatgactgtcaatcaataccaaactgcgatcagctatttacaggctatgattgagcgcgtcaaggatagggatgcaagtaaggtgctggtcagcctcttgctacgcaatagtgaggatagcgaattaaggcaaaagttgattcgctactgccatgtcaactttggaactggcaggttaaatgatcttacgcgttcccagcttcagatgtctctctcgtggctagatcagcaaattcagaataccggttccaccatcccagaacaatctaaccccagatatggcttattcgccttactgaaaacctacccaaaacacaccacagcagttttcttatctggtgccattgtgggggcattgctcgttgtaatcactaatacgctataa

SEQ ID NO: 244936 - DNA, 327 bp, Klebsiella pneumoniae
atgactgaagaaaaagtgattccgcgtgaaggcatttacgtatctaaaactgatcccagccttcggattacagtaacagacgttgtggttgtcgatgatgaagatgattctccagaagatgagttgttttacttagtaagctttatcgagggcgaggatgaaggagatctttccgcagcggagtttgaactgaataccggggaatggctttcattcgtcaaatctgaacaattggttttcgaacgagatccatacatggacaacatccccgaaggctcccacctagctaaaattcgagacttactgcttaaggctaaaaaacagtga

SEQ ID NO: 244937 - DNA, 732 bp, Klebsiella pneumoniae
atggaatgtgtaaaaattgagaaccgtcaaggtatcgaaatcaggactattcgtgatgataatggagagttttcgagactatacagagagaaaggaaaacttttgccaaggttactactggaaggattttacattgaacaaatgaaagcctttcgctcacttgataaagatttaagaaacatccaaacgtgggtaaaaatacttaatgatctgaacattaagaacgactttcaaaacaatcgttatccagcaatggataatgaggatgctgctttatctaaaggtctgttttttgccattttggcgttatatggaagatgctttactggagcccaaaaccgcaagtttacctttgataaaaagcacgtcccggaaaaataccgtgaatttcatgaagagctcatgcatgcacgccacaactttgcagcacataaaggagatttcgaagccgaagactgtcaaatcgcgcttgtggtcaacatcaggaagaacacgttacgcccactgtttttctctgaattacagcaaccttacatggcccaaaccttcttagacaatggacacgaaaataccctagtaaatctttgtatagctcttcgtgacgtagtcgccgaaaaatatgagggtgtgtgtaccaaaatcattgatggttttgttcgtactaaacccccagtctattggaaaaatatagatgttaaaactgtaaatatcgattcatattttaagaagtga

SEQ ID NO: 244938 - DNA, 531 bp, Klebsiella pneumoniae
atggatactataattccgattttgtttttaggcctgtcttttttttcgatgattacttattttaagtcaccggaaaaattagcaatgcgagtggctaaaggagttgcagcttttcttgcttctattgctgcctttggggcctttttaggtggtgattatgcactatcacttcctatcgcctttattgttctttttctgacaattcgccagttaaaaacatctaaaaccctatcatctgtaacacatcaaccaatctcttttagcacaccaaaagagcctataagtaagcgtaagcccgatagtgagtttagaaatattgcatttgagtacacagacttaaatggcaattcaactcatcgagaagttgatgtaaaagagattactgaacaacacattacaggatattgtcattcgcgcaggcaactaaggaccttccgtttagaccgaattgataatagtgagattgtcgtccgtgatacgggcgagttaatcaatgtctatgactggattgtccagctatatggagaatga

SEQ ID NO: 244939 - DNA, 723 bp, Klebsiella pneumoniae
atgattctttataaatacatgaagtacgatgctgccgtcagattgctaacatctaataccatcgcattttcttcatatgtcaatttcaatgacccttatgaactgagttgtttggcctacggccccggcaacataaacaacatgatgaaaatgcataaccaaataaatctatggggtcgaaattcagtcattctttgtctcaccagagacccgctcaacccgttgctatgggctcactatgcggagtcacacaaaggcatcgtcataggcatcgatgtatcgacccctcaatttacaagtcttgatgaaaacataatacctgttcagtttggcaatgttatttatactaaaacacaaccaaaagacccatttttcacagccaccttcccagaaactgaaatagataattttataggattcaacgcaaattatttggaaaagctccaaagagcatttctatataaatcacaccactgggcatatgaagaagaagtgagaattgtcaaacataagcgatgcaatcatttaactgagttgccgggacttaatgtaagcacaatgaagttaagggacaatgcaataaagcaaattcacattggcttaaaaacaaaaaatcacaatgagtttatgtctatatgcaaagagaaccatcctgaagccgaaatttatcaatgtatgattaatgggttaagctgggacatgatatctgtattgcaggaataa

SEQ ID NO: 244940 - DNA, 156 bp, Klebsiella pneumoniae
atgtgcacggagaccctgtatgatgttcaatggctggcgcagctagcactgctggtggtggtgcgagtggcggtaaatccgcacccgaagcgtctctgggttcatggcccaaagctgatacacgatgttgattactacctaaagatttcacaatga

SEQ ID NO: 244941 - DNA, 1815 bp, Klebsiella pneumoniae
atgcctgttagtatttcaaagattgagatatttaattttagatcaatccaaaagatgagtatcgattgttcgagacttcagctatttgtaggaaacaatgatgctggaaaatcgaatatattgagagcattaaacttatttttcaatggcgttacaaatccagatgaagaatttaatttcccgacagattacaatattcattcatattcatccgccatcactagcaaaaaggctcgggaaataaaaatatgcttaaccttgcaaatacccgagagttacaagaaaaccaatggtgattatattgaatggactaaaacgtggcgattacataaagggtacaatgaaactataattggtgtaaaaaatgttaatggccccaggggcggcaaaaccattcaaaaaactccgatgcccgccaggtccaatcttcgtgtattacttaacaatatcaattatatctacatccctgcaattaaagacaaagaatacttgtcaaaacttagaagtgagatctacggtgttgtaaatgaagcatttagcgaaaagttcacaaaatctagccatgattttgaagaaagcatcgctgaaaatttacaagaacttactgatgatattagcggttctcttggcttccaatcgaaactatccttaccaaaggacttaagtcatttgtttgaaaagcttgattttttaaatgaaaaatccatctcactgaatgaccgaggtgatggagttaaagcacggcatatacctttgattctgaaatttattgctgaaaaaaagaaaggactacaagcgcaaggcaatcccccttatacattcatttggggttatgaagagccagaaaataatttggaaatcactaatgctattaaactagcagaccagtttactagcatgcttcataatccgatatcacagttatttttaaccactcattctcctgccttttacaatcttgctaagcagaactccgttgccacgggttgctattacattgagaaagatgctaacgactcaactttttgtgaagttaatcttgaaaatctagatgcgaaaatgggtgtcttagaactactatccccacacatagaatctttaaaaaaagaactgcaaaatattcaagaagtatgggaactaggtaaagataagcctgtagtatatgtagaaggtcctagtgatgctatcgttttaagaaaagcgatcttacatcacacccccagcatcattgataaaatagatattataacactcgactttggtggtgggacaaattatgtttgcgatatgctgacagcgtactttcatatgagaaaacatcaccaaaaccgtcatcgtgcattcggaatagtagatcctgatagtgatggtaaagattgtagaaccgcgattagtaagcttcttgaaaattctaagcagaatggaaagccctcaattaggtgtgttttaatgagattatctactgatattcttacagcaagaaaggacgggtttaacatacccggagttttagaggataactatccaatatcaatttgggtcgatgagaaaaacaggggaaaactccaagagagaaatttaaaagaagttttaagtgataatcactacaatacacttgcatctagcaataaaactattgatgatttacttgatcaaaaaccatactcattaaaagtaaaatacaaaaccgatccgcttcgaaaagtccaacttgctaataaagttaacgcattaggcgatgatactgctgccgaggatttacaattcttaactccttgcatcgacgaaatgattaaattcttagaccttaaataa

SEQ ID NO: 244942 - DNA, 672 bp, Klebsiella pneumoniae
atggcgttcagagcagaagagctagtcaaagctaatttcgataaagcttacagatatttggttcctgagggagcatctcgcgagatgagagttgcggtaagggataagcttgaggagattgtaggtgagtgtgggccggtggttgatgggtatccagcatggcatccgttcatgttcgatgcaaataagacgaactgggctccaatgacgccaaaaagtacgcctgcttttagttacctggaccatacgatttattttcagaatgggatacttacctgtccttatgggcatggagtagaagagttcattaaaaaggttaggagcctatcgcataaggatgctgggtttaccattgagaaaatagatgatgttgtgctctatcacgaagaagcggtaccgttgctcataaaatgtaattggtattttacttatgagatggaagacgacggcactttcccggcgagagttgcaatgggcttgatgttggaaaacgaagtgccgaactggcgaactgcagtttacagcgaaagttgggaagaaatgcggggacagattatgggatacccacatggtgcaagatcttctctgtttgttaatcagcagaccggtcaaaaaatgaaaaacctctgggggcagctaataaaaaccgggctcttaggtgaagagcgttaa

SEQ ID NO: 244943 - DNA, 1236 bp, Klebsiella pneumoniae
atggacacaatatcagagaaaaaagaaatatttgcaatcctagataaatatgatctacttagccctccatatgagtcaggctcaaatttaatagcagatttcgaaaaaagaatcgatagttatataaatgcaatcgacacaatagcaacaatacatccaaacaatcttataatcaaagatgtgagaaagagaaagcaaacaattacctcattttctgaaaaaatagttgaaacccttactttgtttctacaaggaaacataagagaggcatattctacttttgactacgctttaacgcgcacaaaaatgaaaaatcatgtatttaatatgacaaggccactttctacaatatgcaacagtgagagcccgttatttagagtcagaagaagtgataatgttttaaaggaacgtaaggaattattccatatacctttcgaaaatagacatcttgtcggggccatgcgtttttccgtctcaggattaccttgtttatatcttggttcttcaatatttgtatgctggcaagaaatgggaaaacctgactttgataaactatatatttcttccttcaaaacagatgaacaatctcctgacctaatgatattagacttaggttatagcttaacttcagcagtacgtacaactccaatggactatttttttctctgggaagaagaggatcttgaatttgaagaagaagatggggagaatgaaaataactcgaagattccacttttaaataaaattgtatctaaattggttgcttggcctttggttttagcttgtaattattcaaaaacatacatcaacgcaaactttcataaagagtatattattcctaatttattgatgcaatggattagcagcaatagaaataaaaacatttccggaatttcttatcgctctactaaaattctaaatcaaaaaaataaaggtataggattaaacattataatcccgccaaaaatggaaaatatcccaccagattttgttggccattgccctattttaaaagaaaccttcactatgacaaatcctgtttcatggaccgtatttagtacgttagaaatccaaccaaacggatttaaaggtagtagatcaaacatgccaagcccgagtttgcattcaaaaattgaaaattttgatgagtccttggtcgaactatacgagggctcaacattcaaaaaagtagaactactagtggatcagatgatggattataaacgcatgaattaa

SEQ ID NO: 244944 - DNA, 198 bp, Klebsiella pneumoniae
atggtatttaaaagacaaacagaagagcaaaactttttattctcaagaagcgagaatgtaacacaggaagatctaattgaaactcctgatggtgaaacttatgatgatataatgaaagctttatataagcttaaagacgaggctttagcaaaacataaagctcgtttagttagtgaagctatgttaaagcataactaa

SEQ ID NO: 244945 - DNA, 822 bp, Klebsiella pneumoniae
atggctactaaaggtccgtacaaaatacgcaaaaacctggaactcgcttccggcgatattctctaccgggaaggcgggatctatgataccactctcggcctcattgactttggcgatacctcgatggggggcgggaagaccgccggctatcaggaaaacgaccagattaaaaacctgtgctatgtggacgattatgcaactccgaacctggccatgctctatgatggcggtggcattcgcgttgacgcgcataacgggagcaaaatcacactgccgaattcattcattgtcccagcctcctgcaaaaaacagctagtgcgcatgtggtttaaactcccaacgtcggatataggggacacaactgttttatataataaccagcttcttttgattggtgggtcgtattcttccagtcaggcgctgacatatctcggtgctaacaacaaggcggatgggacgctgaacaatatcactttggccgcgttcggctccgccgttgttgaccctgggtcggttatcaccaacgcggccaaagttgggaatgtgattcagctcgcgtggctggcgacaaaaatcgacgctacatatgtgcagattagagtatatttgaacggtgcatatgtctccgacctggctccggtggcgtttggcacgcgcccggcgtcaattccggttcatcagctgaataataaaggggcgtcggaaaaatcggtacgtaacactacatatcgcgtcgctatcgacgatctgactgatagtgacctcgaccccgccgatatcgttgcagctgattacgcagataacgcatcgcgctttagctaa

SEQ ID NO: 244946 - DNA, 2247 bp, Klebsiella pneumoniae
atgtctaatttacctgaacagaccgcgtgggaatcgggaatccatcagcttgaagaggcggatcgggctaaggctgggccgggggggatattaaatatccaggctaatcaactggcgaatcgtacgcagtggctcagggcgttagtagaatccgtccaggactaccgggaatatacgttttataaatcagaatcggaccctgatggaacaatcgccggccgtgcaaatactccagcgggaaaaatattccgtgttgctcaggggttaaatgattacctggcgtttatttattatctgaatgactcaggtacagcaatacccttgacggcacttattggtcgtggagcaattattaacaatgtcagggaatattcaaacttaaccctcgctcaaaatgatgttgaggccggtaatatcctcgacggttcaaagtgctgggtgacgagctcagcgtatgaaatgctggcagacgagtacatcaacaacggcggtacgctggaggctaccgggcgtaagatgccgtcatatcagcttattgaaccgctgatcaacctcatcgaatctgttttgtatgccgacaatgacgagtattcccgctctccggcagattctgcaatcatggacaaaaaccaccgctggttattgcagtggcatggtgatgaaatctggctgaagaacgcggatatcaaaggcactctgaagattaaagaccttcaggtctccggtgacgtctcttttgacgatgcgacaatcaacagactgagtgtttccagcctggacactgatacgatttctattggcggtgttgaaataccggtgtcgttcgcgagtcccgatgagtatgcccgttcgcccgcagactccgcgattatggataagaaccatagatggctgatgttctgggatggggatgagttgaatctcaaaaaccttacggttaaatatgggttgaccgccgggaaaatcgacactagcgaattgagcatcaacggcgttcaggcgccgctggattatctgaatcctgacgaatactctcgctctccgtatgcggaggcggtggttgataaaaacctgcgcattatgcagtacactgacgacgatggccatgttgtcattgctggtacgctaattaatccggcgcctcctgccagcgattcgtacgaggtttatgcggacgcgggtaaattataccggatcaacaaaaatacctcagaccgggaagttattgattccggtacggataacgctaacgtacaaaatgagccggagatatttacgttcgaatctacgcgagacgacactgtcatcggcaataaatggtttagcgcgtacgacccctataaaccggcagcgtattacgggcgacgggccattgtcggatttggtcattcattcatggctaacccgcggttcctgcgcacgctgtctgatttaaccggtctgccgacctataattttggccgatctggcgggctgtctcgcacgatggcactgcgcgccggggcatacaccgtatcctatgcgccggtaggtggcgttatccctgaatccggcagtgttgcgctgacgccagcggatccaggggtgctgcaaatcgttgataatgcgtccttgaccgaggtggttcgggggaacctggctggtgtagacgggacgctcacctgggatgggacgacgctgacgtttacccgcgatacctcgggtgatgctgttaacgtcactgagctaaccccatttatctattacccgtacacgatcgatgcgacgagcaccgtggcaaaaggtgtgcggtatgatgcgcatggtgatgcgataaatttgctgtggccggggcgtaacgatgcgagacaggtaggtcagatcctgagtaatacgaaaaaaactattgccagtttgaccgcacgtaatattcgttttctgctgatgcctgaattcccgatggcctccgagacaaatggcacgtccggcaatggtggaattttgaatctgaaccgtgaatacaaaaagctggcacctaacaattattgtgaaatagatggcgttgacttgttgcagaatttcaaaaaccattacaaccctgcatacgagcaggatgtaacggatattgccaacggcatcaccccaacgtctttacggcaggataccctgcacccgagccagacgctgcaggcgaacgctctgtatatcggcgcagatgttaacgcgcaattcgttgaacaagttctgttgaataaaggttggttataa

SEQ ID NO: 244947 - DNA, 624 bp, Klebsiella pneumoniae
atgtctggcgatattaaagcagtatttggtagaaatttaattgcaactcaggcaggtaccgttcaggtatttcattttgatatgactacccgtgagtttatcggtaccgaggaagtttatattcatgtcggtgttggtcttccggctttttcatgcctggaagaaccaccggtacaaagtgaatatcaggtagctgttcgttctgaagataatttgtcctggtctgttaccgaggattatcgcggtatcactgtctatgacattaagacgctggccagccacgttattaccgagcccggccccatacccgatactgtaacgcgttctgtgccattaaccccttacgacaaatgggacggttctgcctgggtaacagatgcagacgctcagcatgcggctgatgttgctgttgctgatttgcagaaaaaagagctgattactcaggcgtcggcagatattgccattcttcaggatgcagtggctcttaatatggcgactgaagaagaaaaaacacgcctgtcctctttacaggcatatcgcgtattgcttaaccgggttgatacatcccttaccctgaatattagttggcctgttatgaatacccaggggggtggtaatgtctaa

SEQ ID NO: 244948 - DNA, 618 bp, Klebsiella pneumoniae
atgcgctttcatgttgtgtgcctgcttttatccacttcaggcgaggtggttctcgtgtacccctacagcgagaaatcggttaaaatcttctcacccctacagagcgatggattttcaccgatggacaacaattggttgcaggagttattccgatctttcctgcgtgacatagactttaggcgtctgatgcacatgcttattatcttcgtcttactgcttgttgttactcctgagtccctgaagcaatctatcggtgctcacaacccggagttcctcccagaattcagcctgtattacttgctggttgtttgcatcagcttctttttgtcttctgtaaccagctttacaacgcaatctgcgatgcagtttttgataggacaggctcgtaatctcaaagtcgctttactgtctgctcaagaaaaagactgcctttcatacatcatcgaaactggccagcatgttgtttattttaaaaatcaccaaccaatcattgagttattggttcataaagatattcttcagcgaacctatgacatcaattgtggtaatggttcggacggctacgtgatatccagcaagtaccacttctatgttgtgaagcatctatctatcagatag

SEQ ID NO: 244949 - DNA, 192 bp, Klebsiella pneumoniae
atgctaaatcagcaagatatgacagaaacagccaaagcggttttgagcgccttaagcgagaagcctgcaacggctggggagattgcacagaatacgcacctgacgcgcgaacgttgccagttaatactgacgcagcttgtgatggcggggttatctgattaccagtttgggtgttacaagcgcctccagtaa

SEQ ID NO: 244950 - DNA, 243 bp, Klebsiella pneumoniae
atgaattgctattgtggtaatcgtgcaactcatgtacttgttacttatgaccacgacatagttttgccattgcaagttttctgtaagacacatgcatttgaagacgatcgagaagaatgctgttgctgcggtgattacggtatcgaagttgaaaatccggtcaactataaaacagaggaactgttacctacatacttaccgggttcgcttgatgaaggtaacgtttgcagcgaacatccttaa

SEQ ID NO: 244951 - DNA, 792 bp, Klebsiella pneumoniae
atgaaaaaaaatggagtaaaaccgataacctataatgtctataagattgtcttttgtctttttctatcaatcattagtttgagttcaaatgcggagtcagtgttatctaaaaaggatattgcgtggctgggaagcaaagctcaaataaaagaattaagttgctccgcttactataattcttatgcgagcaaaggcgaagtatctatttcaaaaaacgctacctttgagattaaggaggatttttttagagaaaagcatgtttttaaagatagtaaattgatttgttatttcgaagttgacgcgttcgataaaaataaagttaccgtttacgttaaggaaatggccgcggttgataatgcaaatgttttattttatcactggggcggttcaggtactataggagaccttggcaaggataaccatcaatcaaattgggacttgatgtgtagtgttgattccatgaatgatgaactaacctgtgcaataagtcagaaaaattttgttctctataagaaaaatgatgggtattctattgtggtcggtggtgggggctatatggggagcaagtcatacattcgagtcaataaagacaagccctttgtttctgatgctggtgggtacttttcgccagaggacacaacaaaaataataagctcaattaataaagattcgaaactgacgatcagatacactgaagacccatcaaatcgaaccattgataccataatggacatgaaatactttaattctgctgtgaaagtcctgggtgaaatatacaacaagcaacaatga

SEQ ID NO: 244952 - DNA, 837 bp, Klebsiella pneumoniae; identical to SEQ ID NO: 137381

SEQ ID NO: 244953 - DNA, 429 bp, Klebsiella pneumoniae
atgaacaaaaccaattataattcagtgatgacactggaagaacagcttgttgtcattgtagataaatacatatcaaaacggtaccagtcgcacgataaaagtttctcgtaccagctatacatccttttcgtaggatatcatttaaagtatttctacccaagacagctatacactcgttctaatcgcaacatagacaacgttatgacgatgttcagttctgtatacaaatgcctgacgagtaatcttttacagcgattaaacaataaggaagctgttatcagggagctaaactatctcgttaactatatcgatagcaatcaagaaaaggcagaagaaatctatgctacggttagagcacaatatgaaatgaaaataatcgagaaagagctaacccatgaagtcgttagagtaaaaaatgttagattataa

SEQ ID NO: 244954 - DNA, 1197 bp, Klebsiella pneumoniae
atgaagggaatgcaacggataaagaggcataagaactttatcaatgtcgtaaagtatgtgttgaagccaggttctcatcacagaagtgatcctgtggttattggtggcaacatgacaggtgattgtgccaatgaactgatagctgagtttgatacggccagcaggctcagaactgacattgctaaaccagcatggcacaattcgcttcgtcttcctaagaaggatgaacttacaaatgctcaatggataaagatcgctgacgattacatgaatcaaatggggtttagtgatactcaccttcgttgttatgtattacacgatgacagtgtgggtcagcacatacatatcattgctaaccgaatagattcagtctcaggaagggttaacttaggaagacatgaaagtttggtcagtggtcggataattcaagagcttgaaattaagtacggtctaaccataacaaaaggaccagaatcagagaatacgggaaaagagaaaaataatgtaataccaacagaagccaagaagctttcaagaaatgaaaccatgtatgaaaaacgaacaggtgaggtctgcaataagaagcaattacaggttattcttgacaaaagtttggcagatacacctgaccttttaacttttatcaagaggctggaagaagctgaagtatcctggaaggccaatattgcctctaccggtaaaatgaacggcttctctttcgaatacacaggaatagctttcaaagcttcacagttaggcaagggttactcctgggcaaatcttcaaaagcaacttaactataaccccgaccacttagaagctttacgaaccaacacaccggcaaaagaccaccctgctcctgctcctgctcctgctcctgctcctgctcctgctcctgctcctgcaaaagatgttgcaacaacggatattccaagggaaagcataagtgaaaaaaatgccgaactcgaaatgcgattcagagaaggaagacgaaacgaaatcgcagagaagattcttcaaaaaaacgcagtacaacaacaaaaacatctcaggtttatcgtctggcttccatttcttagaaggtttgcagagcttctccgaagctatggtaagagcattcttcacactcacccagcaagcttctcagaagtttattcaacacatgatttaaaaccttcaagaaaaattcatttatag

SEQ ID NO: 244955 - DNA, 1251 bp, Klebsiella pneumoniae
atgattaattttcttgctaattatattattagtaggaatcaatatttatctaatgctataaattcaacatatgactatgcttttatcgatgagtttcaggacacaacatataggcaatatgagatttttaagagcattttcttgggtaaaaaaataaaaataacagcagtcggtgatacaaaacaaagaataatgggttgggcaggtgcaatgcacaatgcttttgatgtgtttaaaaaagattttggaatcgaacaatctaatgaattagttagcaatagaaggtcattaaaaaacctcataaattatcaacgcatgatggaagctttcatgaatcatgctgatataaagcctgatatgatgttgattgaaaatgaaggttcagctaagttactacaatttgacgaaagtagtattgaaggggcatatatagcattatgtatccagcaatggattgctgaaggagtaaatgaaagagatatatgtatactgctaagaaacccggctaaacaatatacagacgatatcatttcagcattgcaatatttgaaaatacaatgtcgccttgagaacgagtatcaggatcttttaaatgaagctgtagtacagttacttttacaaatgctaatgtttgtctgtaatagaaaatccatagaaagctgggccactacaatggagcttctatgtaatataagaggagtaagtaaaagaggtgatgttacacggttagaaaaagaacttagccagtttattaaatctcatcgggtaattaaaggagaaattgtcgattatttatattcattattaagtatatttggtgtcgataaaataaagtcttactttccgcagtatatgagtgggaatggtttagaatatagcatagaattactttctcgccacctcgataagttagatgtaaaagaaaacatatcagaagccattgatttattacttggcaataaaacaatacctcttatgaccatccataaaagtaaagggttagagttcaggaaggtcatcgttgtggggcttgaacctggtgcctattttggtaaagaagaagagcaaatagaaaatcaaaaaacagtctttgtggcattttcaagagccattgaagaagtattaatgactcgttgtaaaataagaaacaatagttatggcaggtctttcaagcagaattgtaatgatataccgttaataacaaacatgataacttattgtggtatcgaggctgaagattatcaaggttga

SEQ ID NO: 244956 - DNA, 576 bp, Klebsiella pneumoniae
atggtacgaaaaatctctgcctttttaaagataataggagttataggttctttatgcgggattatggcgacagtattcgcaatctatgcgtactacaacccgacctccccttctactcagagatatgacagtattgtaggaagctggctatctgattactcttacaccgtaaaagggaataccgttagggttaatggaaaaactaccttcttctctaatggaaaatacaactttcatggcagtatctctattgactctaatgctccaggtgaccatatattaatagactatctttctgatggtgctggtgattgggagctatatgataatgagttaattacatcattaaatagcctaaaaacaaaacctatgaagctggctttaaataacgaagatcttgatccactgaaaatagaggtgataaacaataaaaagttaccaactattgaggagaatatggctgatgggaaaaaccaatcctataaaataataaaatcttcaaaaagccagttaacattggaggttattaacgaaatcggaagcaatttcaactttactatgcaaaaaacaaaatag

SEQ ID NO: 244957 - DNA, 639 bp, Klebsiella pneumoniae
atgactgatactaaagttgataaaatttcagatgaagagcgattgttggccgctatggcatatggggaagcatcagcaagcaatgatgctaatgaattaaaagcgttagctagtgtattggtccgtcagagagacgcgagaggatatgctacaatgaaggagtttattgatggagagccctcatattcttatgttgttggtgatgggaatgcaaaatataaaaaattcaataaagctaaagatgaggatatatctaacgataccggtatgtctaatgccttgacagcagcaaagaatgcattatcagatggacccgatctttcgaatggtgcatatttttgggatggggcggatataaaatcgaattataataaacattttaaagtaaggcatgggataaaattcacagatccttcgcataatatatatgatattaaggattcaacaaaaattgttatcctctataaaattgttaaggtcaagaaaacagtgaagggaaaagttaaagtcacaaaagaaaaagttgaagtaggacggtatgatcatgtttatgattcgactgcggcttatggcgggacgatcttttggaaaaacaatgatgattatataactttgtcaaaagggaagttatacaagtga

SEQ ID NO: 244958 - DNA, 1221 bp, Klebsiella pneumoniae; identical to SEQ ID NO: 218052

SEQ ID NO: 244959 - DNA, 486 bp, Klebsiella pneumoniae
atgatctcggcaccagaaccgcttcatgccgggcatattcttaccccgttttgctgcggtatagattccatggatcactggctgaaacagcgggcgatgaaaaatcaggttactggcgcatcccgcacctttgtctgctgcgacgacgcgaaggtgatggcttactactcactggcttccagcgctgtgacgacaaatactgcgccgggtcgttttcgccgcaatatgcctgacccgatcccggttgtggtactgggtcgtctggcggtggataaatcactacatgggaaaggtgtcgggcgggccctggtacgtgatgccgggctgcgtgtgattcaggtggcggagactatcggcattcgcgggatgctggttcacgccctgtcggatgaagcacgggatttttacctgcgggtggggtttgagccgtcgccgatggatccgatgatgttgatggtgacgttgagggatttggttaatgcctga

SEQ ID NO: 244960 - DNA, 792 bp, Klebsiella pneumoniae
atgacttcacttgaaagaataatagaagcaataagatcacataagtttgtgtcatcgatcataatcattatcatgacagtgatttttttaatacctcttcacttgtatttcaaaacattccattacgccctctcaacggacccaaatgtttgggccggatttggttcttacatcggcggtgtatacggcccgctagtaacaatcatcagcgtaatcgttctagtaataactgtggtagaaatcaaccagtcaaataagataaatatcacagaatcgaaaaatagcaatcatatcaatggaatagttacattgtgtgagattttagataaaagaatagataaaaacccacttattcaaaatagaaattatcagtttgtttttttgaatgatattatacgtagaagaattgcagatgatgactcattaaaagagtatgatatctggaaagaaagcattagaaaattcaataatgatgaactaccctttttcgaaaatgaatcaaaaatcatggaggagattttactaagaatcaactcaagtgaaacattagaattaaaagaacgtgcaaaaagcattttttatggaatcatacctaatgatgaacgattctggcttgaatgctatatgcatcgttttaaatcacaagagttagagcccttaattccttcatggggaagttttagtcgagttccaacattacttaagaatctcgtcgaacaaaatgaattagtaaacgaattcgctcaacaaagtggcgataaagtggcggtagaaatggcgaataaagggtaa

SEQ ID NO: 244961 - DNA, 333 bp, Klebsiella pneumoniae
  misc_feature (184)..(193): n is a, c, g, or t
atgggcttacaagactggcatccggcggacatcatcgccgggctcaaaaagaaaggaacatcacttgccgccgtttcacgcagcgcaggcctgtcgagctccacgctggctaacgcgctgctccgcccgtggccgaaaggcgagaagcttattgccgatgcgctgggcatttcaccagaaatannnnnnnnnnacgcgctgctccgcccgtggccgaaaggcgagaagcttattgccgatgcgctgggcatttcaccagaaataatctggcccagccgttattttgatgaagccggaaatcccgttcatcgccacacgcgttcaaaactctga

SEQ ID NO: 244962 - DNA, 297 bp, Klebsiella pneumoniae
  misc_feature (283)..(292): n is a, c, g, or t
atgttcagaatgacgatgtttcaacgcacgtttcttgccagcctggtgctgttcagcgcttcagtcagcgcggtggatttaccggcgttttccatgaacagctccggcaacgacactagtcgtcaggtgcagggcggtattaacgacgatctctattacgccatcggtggcgggacggtggtgtccaacccgcccagcggcaaccggctgaacaaaattggcatgggcgttggctggaatgccgacctgatgtgtggaaattttgacgtcaaaaccacggtannnnnnnnnnggtaa

SEQ ID NO: 244963 - DNA, 1599 bp, Klebsiella pneumoniae
atggcacttaaaattatccccagagttaaagtaagaaaagattataatggtaaggttgtggcaataaaaaagaagttatcaggttatgatgacgcttcttttataacgatgatgtacgaacattttcaaaccattttaaaaccagaacatggaatttcttcaaatttcccatggtgttgcttcttagcattaaagtggaagttatcggagccgcttaaacgaaatgtatctccaatgaataaaagagatttcatcgatatcgttaatagaatatataatcttcaggatgaaatttctgatttttttgatgataagaaaatattacttagcctcaggcgtatgatcattaatcaacagctttaccaagttcctatgaaactagaattaaatacattggcaaggcaatactattggtattgtaattattatggtggctattttgataaggttttccaagaagcgcatggaataaaattggaatcttactataaaataagtgcttattttgcaatgatatcatgtattgataatggtaaagaatcagaatacattccagttaattcttatttaatgaatttaattccatcatttggcgccggtgttgtaaagaaatatctagacttagtttcagtaaaatttaatgaactgagagattttatgtcagagttcaaagatataaaacaacgagagaatgaatattatcttgacacgccaatgatgatgaaacctttcattttgatagatgaaggattaatcatattaagtaaacatctcctgagagcgtctttgtcctctttggtaccaactttattaaaagataaacatggttccagttataaagatagatttgcgaaagtaatggagtcatatattggttcgatattaaacgaattaccatcaaaaattatttccgaaaaggaaattatcagcatctataaacaaaatgaagtacagtcaaaaactgttgattttattgttagagaggatgtaggtactgtttatattgattccaaagcgatagaacctgataaaataataaaacactccaattctgctaaatctatcaaagatcggttggcaaatagtttcattaaaggtgtgattcaaggtatggattgtgcttataatatgaataaaatagataataaagaaaagtctttaaaagactcattgattattattacacatatggatcattatatccctacaggtaaaatgatagaagatgcgctggatggttcgttttttgacatatttgaaaatagatatggtgagttacctatcaataaaaatagaatatactatatgacaatcgatgagtttgagtttatgattgaagtctgtcgtaataaaaacatatcaataacatcgattatcgatagttgttctgataatgatgcgataaagagttcacaaaaatttaatgttatgatgcatctacataaattatctccagagggaatttcagatagaaggttgattgctgaaaatagagattatttattcgatgacttgattaattccattcaagagactgcatctgtttgggatggtcgtgtagaagagtattttgcaataagaaaatatcttcaaggttaa

SEQ ID NO: 244964 - DNA, 171 bp, Klebsiella pneumoniae
atgaggctgtggcttccgcatcaaccgccgcagagttcggcgacaataagctcacctttgccgacaccactgccggtattgccgggacaaattctggtcaatactttcgtgttcctcaaggtgtcggtaatgttctggcatttcgatattacaaaaacaattctggcgtag

SEQ ID NO: 244965 - DNA, 213 bp, Klebsiella pneumoniae
atggctatcactgaaggattctgcgcggacctctactgcgactgtgatggttgtctgtcagggaaaatctatccgcaggggcaggctgatttcatcggccggaatatgaccgacatttctcaacaggcgcgcaaagctggctggcgcataagcaaagaccgccagcgctgctatgcgccgggccacaaaatttcacggggagccaaccaatga

SEQ ID NO: 244966 - DNA, 513 bp, Klebsiella pneumoniae
atgccagcggaaaacatacttgaagttcatcatcttaagaagtccgtcggtcagggggagcatcagctctccatccttaccggagttgagctggttgtcaaaccgcggcagaccatcgccctgatcggcgagtcgggttccggtaaatcgaccctgctggcgatcctcgccggcctcgacgatggcagcagcggggaagtatcgatgctgggcaaaccgctgcaccggatggatgaagaggcgcgggcggcgctgcgggcgcagcacgttggttttgtttttcagtcgtttatgctgatcccgacgctcaacgccctggagaacattctgttcgccgatgagcccaccggcaacctcgatcgccagaccggggacaaaattgccgatctgctgttctcgcttaatcgcgaacacggcaccaccctgatcctcgtcactcacgatccgctgctggcggcgcgctgcgatcgccgtctgcgcctggtggatggccagctgcgggaggaagcatga

SEQ ID NO: 244967 - DNA, 636 bp, Klebsiella pneumoniae
  misc_feature (563)..(572): n is a, c, g, or t
atggttctggtcactcgtcaagcgccggattttactgcagccgctgtgctgggtaatggtgagatcgttgagaaattcaatttcaaacagcacaccaacggtaaacctaccgttctgttcttctggccgatggacttcaccttcgtgtgcccgtctgagctgatcgcgttcgacaaacgttacgaagaattccagaaacgcggcgtggaagtggttggcgtttccttcgactccgagttcgttcacaacgcatggcgtaacaccccggtagaccagggcggtatcggcccggttaaatacgcgatggttgctgacatcaaacgtgaaatccagaaagcttacggtatcgagcatccggacgaaggcgtagcgctgcgcggctctttcctgatcgacgctaacggcgtggtacgccaccaggtggttaacgacctgccgctgggccgtaacatcgacgaaatgctgcgtatggttgacgccctgcagttccacgaagagcacggcgaagtctgcccggcgcagtgggaaaaaggaaaagaaggtatggccgcctctccggaagnnnnnnnnnntttccagcctgtaatcggcacgcgttttaataaaaggctcgctcaggcgggccttttttgttag

SEQ ID NO: 244968 - DNA, 255 bp, Klebsiella pneumoniae
atgaaaaagcaccttctggccctcgggctgctgctgctgctgcgccagctcgtcgcggcgggtcagccactggagctgctgctgctggctctgctgctgggccagcagggctttttcttcgtcagtaagtacctgcaaactttcctgcagcgcctgctgctgggcctccgtcaacaggacgatgcccgccgcctgggcttcgaacttctccagcgcgtggcgagcggctttgtgctgttcgtagaccatggctga

SEQ ID NO: 244969 - DNA, 201 bp, Klebsiella pneumoniae
atgggcatcaaccaccacccgctgcggcacaaacgcgtaaatgctctgcatcagctgcagggcgctgcgccactgctgttcaacaccttcctcgccaagatcgccaaagtgctgactcagcaccgcttcgctgccgcgcgccaggcagaaggtatttttcatatccgcgccgagagccagcagcggcgggatgtctcctag

SEQ ID NO: 244970 - DNA, 438 bp, Klebsiella pneumoniae
atgaaaatacaacggaagtctctgtttttgttctgggcgtggatggatctctttttcgtcctgcaattcttatggtggaatattgcccaccgccgcctccctttttacgacgatctactcgcttatctccagctgctgcacacctggggctccgcggcggtctggctgtacccgctgaatgttctgctgattatcagcatcccgctatcgatgatcttttttttccgccagagccgctatgcgctgtggctggcctgggggcaggcgccgctcaggctgctgtttatgcagccttcgctatcgctgggcctgtggctgattcaggctgccggggtccggcatgtagcgatcctggcaggctttctgctgctctctgaagggctgaaaatcgccagcctctggtactgcagaggcgggattcagggcataaagcgatag

SEQ ID NO: 244971 - DNA, 504 bp, Klebsiella pneumoniae
atgataaagaaaactcgatgcatatatttgattattatgtcacttgtgtttgctggtaatagttttgctgaggatgttgagatgctgtccgggtgggggatcagcaagaaaaaggacccgatgactgacaatattaatgttcttgttgcgttacagtcagaaccatacaataaagccgggagcaaggcggggttagcagttagatgctttaataataagacggagtttttaatatctgctgagggttattacgggcatccaacatctactgttatgatgagattcgataaaggaaaggcctcatcaagccagtggtctgtggctcaaggagggcgagcgcttttttcaatgaatccgatagatgaagctaagaaactcactgaacataaaaagttgctcattagattccaaccgtacggacaaggagatattgatgcgcagtttaaccttgatggtgctgatttagcgatacatgaagtacgaaaggcgtgttcatggccgtaa

SEQ ID NO: 244972 - DNA, 576 bp, Klebsiella pneumoniae
atggacgcgtggattggatcaatgatcggaggggttgccggtgctgttataggccatgctacgaaccactttgtcgggtggtataaagaaaataagcagtcttcaccagaaagaaagtttatatgcactgagcttatatttctcctcgaggattatgcaaataaatgtgcagaaatagcgaatgactatggtgagtatactggtgaccagggggaagctcagccgactacctcgcctccagagctacttgactactcttcgattaagggaaactggaggtcacttagctccgacattatgtaccgggtatgtagcttgccagcggaacagaaaggcgcacggaaaaagctttcagtatcatgggagttagaagcgtatcctcctgattacaaagactattttgaagaacgccagtatcaatattctcttcttggccttaaggcagcatacatcgcggaagatgtaagaaagcaaaataggttccctgatagtgatttatgggattatgtgattcccacgatggagaagaaggtcaaatcttacgggaaaaaacccctaagaagaagtgataattag

SEQ ID NO: 244973 - DNA, 636 bp, Klebsiella pneumoniae
atggcaaaaaacgtgagaaaattagaaaaaagaatgcatattttttgcgaaggtacaaaaacagaacctctgtacttgcagggttatattgatgaatttgctagtgagaaagcaaaggttatacatataccggatataaaatataacacaccaatagccttggtaaatgctgcaattaagcacaaggaaagtggttatacctctggtgatgatgagttttgggttgtatatgatagagaggctgtctctaaatacccgcatgcattacaccatgaagcatgggatttagcccttgcaaacaatattaatattgcgttgtcaaatatttgttttgaattgtgggttttgcaacattttgcatttaaaaatacgccttactcaagttttgatgatctaaagaagcactctactttgaaaaaagatttactatcagtgggtataaaggattataataaagccgatgctacattgtataagaaaattaggcttggcattcctaacgccagacaacgagcaaaggcacttaataaacaaagtttaaatgcagccccccctcattctaataggccatttcttcttgggtgttacacgaatgtgaatgagttgcttgatgctatagattcatttgagccgtaa

SEQ ID NO: 244974 - DNA, 1341 bp, Klebsiella pneumoniae
atgatagtttccttaaaagttgagaactttaggtcgatcaaagaagaggttaactttgacttgcgaagttcaacaagtaaccacttaagcaataatttacttgtgctccccaaaagcaatgagcgggttgttcgtaccgttggaatttatggtcccaatgcttcagggaagtcaaatcttctaaaggtattttctgcattaaattatcttgttgaggatagcttttcattgaaagagggtgaggatatcccttgttttgaaccatattctctttgtcaaacaacaatctcaaagccagttaagtttgaaattgactttgtggttaatgatttaaaatataaatataaaatacattatcttcaaaaagaaattatattggagagtttagattgtttttactccaagcaatcttcgaatttgttctatcgtgtgaataatggttgggaaaacattaagtttggggcgcaattcaagggtggagtaaagaaaattccattttctaaaaataactcatatctatcgaagatcggcaccgttgctgaggctcccgaaatcgctaaggtagtatatgagtatttttcgcagttaatttgtcctattggaatggattctagtttcaatgtacttcatcttgaggatgagaaatttagagacatacttattcgttttgccggtgacttcttatcattggtagatacgggtataaacaaattaaggattgttgaaaataaagagttggatattaagttacctgatgaaatgccagaagaaatgaagcgtagaattttggcggaaaatcgatttagctttaagtttgagcatgacatggaaggcggggaatgtgctgatatagatattgaaaatgaatcagcagggacccgtaggttatttgaattaacccctgcactcctttctggtttttttataaatcgtgtattaattattgacgaaatcgaccacagcatgcatccacatttggctgcacttttaatccgactgtttaacgatagtgaagtcaataaagtaggttctcaactcatatttactactcataacattgagttgatgaaatcagaaaatatgagaagagatcagatttggtttactgaaaagaaaaaaggtgtaaccgaagtttatagtttagatgagtttgataaagaaaaggttaaggcaaattcaccttttaataagtggtatgatgaagggcgctttggaggtattccaattattaactatatgaaaataaaggatttctttatttctttgacagatgaaaagtctgaagatactgatttaacagtatttggtgacatcgatgatattcctgaagatttaaggtga

SEQ ID NO: 244975 - DNA, 150 bp, Klebsiella pneumoniae
atgactccgaatggcattttaactctgaaaatgtcctctggtgagcatttcgacggtaaagagacagctgaagaaattatcgacttgattaactgccacccatctgatggcaaaatcagtttttggtcaaatctaggaaaatcatcatga

SEQ ID NO: 244976 - DNA, 156 bp, Klebsiella pneumoniae; identical to SEQ ID NO: 107789

SEQ ID NO: 244977 - DNA, 438 bp, Klebsiella pneumoniae
ttgccaatctccatcatctacgtcaacggcgcgcgccaggacgacacgatcctctcggggatcatctccctggccagcagcaatatcgccattgccggggtcgtgtttatcgccagtattttggtgccattcaccaaagttatagtgttatttaccctgctgctcagcatacaattcaagtgcgagcagggattgcgcacccgcatcctgctgctgcggctaatcacctggattggccgttggtcgatgctggatctgtttgttatctcactcaccatgtcgctaataaatcgcgatcagctcctcgccttcaccatggggccggctgcggtttactttggcggcgcggtaattttaactattcttgcagttgaatggctggacagccgcttactttgggacgcacatgagtcaggaaacgcccgcttcgcagactga

SEQ ID NO: 244978 - DNA, 690 bp, Klebsiella pneumoniae
gtggtatgcgacagtgcgacgctcccggcgctgatgacgcagcagcaaaccacggtgaggattgcggtaaccttctataaaaccggaacggtgcaactggcggacgggacgcataccaactcgccgccgctgccgcaggtgggggagatgaccattgaacagcagaccagcgcaagcgccagctttgtcgccagcgcgccggtcagcatcgatatcgccgccctgaatgtggacattggcagcagcggcagctgccaggtagcgacatcgacgatccaggtcagtctgggtacggttaaccggggggagtttcatggcaaagggactaccggcggccaggcgaagcgcttttcgattccggtcttctgtccgacgccgaccgacgtgcgcatcggctttttcggcgtcagcgtggagagcgataccctggccctgagccaggccagcaacagcgccagcggcgtcggcgtgaagctgacctacggcaataaccccggtgcggcagtgcccgacggcaccagcgttaagatcaacgaggccagcaacttgccgatcctgaaaagggtgaccggcgccagcgccggtaccgccgaggcgatcaatttcaacgcccagtatgtgcagactgacgccacggtgggagccggtacggccaacagcatggtgactttcgccctggagtataactag

SEQ ID NO: 244979 - DNA, 1029 bp, Klebsiella pneumoniae
atgcgccgacttagcgatacgttatttctgacatggctttcagttctgttcatgctgagcgccttcccggcgcaggcgctgacctgcaagaccacctcgtccacgatcagcgaagtcgtgaatatcgagagcatcattaaagtctccagcagcgagcttattgccaataaaaagatatgggtctccagccctattaccgccaccttcagttgcgaagataccgataattttccgaacggtgaaagcgcctatttctggctggatccggaaaataaagccagcagcttgcccgactttatccaggtaggcattacttacaacggcatcgactatctgctacaaaataaaaaatcggtggagattggcccggcgacgctgtgtgataaaagcgggaatacctgtaagtccccggccattgggcagacattcagcctggtttaccaggtctatatcatctcgacgggccgcagagtgaccggggaaggtaaaatagacgataacctaaaattgtcgctttttcaggtagatggccaaggcggtctacgcaacggcaccgctggcgccaactataatcttttcattaccggcctgaaccgtatcagaacaatggcctgcgtccccacggtatctatttcgccaagcgaaattaactttggcgatattcctgccggtaacgcccgaccgggatactatgaaaaaacacgcccctttaccgtcacctatggtctggtcaagcagggtaacggcagtgattgcgggaccgaacctatgcttgctacgtttagcaccactaatacgatacaggagagcgccattattttgccgcagccggacagcggcttcggcattgccatctcgccaaacgccagcatgcatccccttattgagatgaatgctccgattcactttacgctggcaacgggcgcgaccctcgcgagcacctatacggcggggctgctctggttgtcgagaacgccgaagctggggcctttttccgcgaccgccaaaatcaccgtgacctttgaataa

SEQ ID NO: 244980 - DNA, 2538 bp, Klebsiella pneumoniae
atggacgatagtaaattacgctattttgccagcgcatggttaatctccatcacgttaccggcagacagtgcggaacgctataatgcccagtttgtgaacggtatcgacccgctggcttttaatcagtttgtcgccagcgatggcgacgtcatgccgggcacctatgacgttaatatttacattaacgatctgctggtggacagtcgccccgttcgcttctcagaggatagcgcacacggcgggttggccccctgcctgagcgcggcggaatatatccgctatggagtaaagattgacgatgaccaccagccctgtttcgcgctgtcgcagacgatcggccaggcagagcaacagctggatatcgctaatcatcggctgatcattcatatccctcagcaatatattgagcactatcctcgcgactatgtttcccccatgcgctttgatgaaggtattaacgctgctttcgtcaactacagctattctaccgatgccaataatggcgacgggggcagccaccagtatcaatatctttcgctaaacagcgggatcaatattgcatcgtggcgattgcgcaataatgcctactggaataagttcagcggccaggcggataagtggcaaagcatcgccagttgggcggaaacgaacattattccctggcgcagccggcttgtcgtcggccagaccagtaccgacaacagcgtcttcgatagcgtccagtttcgcggcgtacagcttggcaccgatgccgaaatgcgccccagcagccagaccggcttcgcgccggtcattcgcggtgtggccaacagcaatgcccgggtggaagttcggcagaacaactatctgatttacagcgagaacgtcccagccggtccctttgagctaaatgatatcagcgccgttaaccgcagcggtgatttctacgtaaccgtcattgaagccgacggtagccagacgacctttactgtcgcctacaccaccctgccacagctggtgcgggcaggccaatggaattatcagctgtcggcgggtaagtatcatgacggcgctgacggctatgcccccgccctgatgcaaagctcgctctcttatggcctgaataataccttcacactatacggtggcgcccttgccgcggagaactatcgcgccggcgcctttggcgtcggtagcaatctgggggagattggcgccctctcagccgactatacgctggcgggaacgacgctagcgagtggccagcgcaagcagggagggagcgtgcgttttctgtatgctaaatcctttttatcgagcaagaccgactttcaaatcgcgggttaccgttactcaacggcaggttattatagcctcagcgatgcggttaacgagcgtcgacgctggcacaatggcctgtacgaaaatgattactggccctctgacgaagacgaaagctggcaggcaagcgctccccaacactattacacgtcctggttttataataaaaagcatcgctttgatatttctgcccggcaaactctcggtaagaacagcgctttcttccttaacttcagccagcaaaattactggaatagctcaggaagcgatatctcgctgcaggcgggctttaacagcactatccataacgtgaactatggtctgtactatcagaatacgcgtagccacttcacccatgacgacaatagcatcacactgcgcgtttccatcccttttactctgcaagaaaaccgccggatcaataccgcatttaccctcgcccacagtaaatcgtctggcacgtccgggcaggctggggtaaacggcacgctgctcgatgatgatcgcctgagctgggccgtcaccagcgcctatgatgacaccagccatagcaccaacagcgccagcctgggttatctcggccagtacggtaatctgtataccggctacgcctacagcaaaagccatcgtcaggcgagtctgaatctgagcggcggcgtggtggcacaccgcggcggcgttaccctctcgcaaccgctgggctcaacctttgcgctggtggaggccaaagacgctcagggggtagggatagagaatcagaccggcgtgcgcatcgatcccttcggctacgctgtcgtaccacaaagcgttccctatcgggtcaattctgtcgcgctcaaccctcaggacttcgatgcctttcttgatgtccctaacgcagtggcggataccgtgcctacccgcggggcaatcacccgggtgcgctttgatacgttccggggatatagcgtgctgatccacaccaccctcgccgacggcagctatccaccattgggcgccgagctctatcgcgccagtgggatcagcaatggtctggtcggcccgggaggagaagtttacgtcagcggagtcgattcaggcgaaaagctgcagatgaaatggggcgaaacgcaccagcaaagctgcgaaatcaccctgcccgaactgcgccaggagcctcagcaggcgacggcctggcgtgaattatccttaatctgcacagtaaccccctcgaggtaa

SEQ ID NO: 244981 - DNA, 669 bp, Klebsiella pneumoniae
atgaaaacgctgctggcagtgatcataggcgctttggcttttcagacccaggcggccattaccatcgatgcctcacgggttatttattcgggcaaagataaatcggccagtctgaaaattaacaaccgaagcagcaaaaactatatcgtccagacctggcttgatacgggtccggagacccccagcagcggcttacccattgtggccacgccgcccctggtcaaattacgccccgagcaatcggcacaactgcgctttatttactcaggaaccggtcttcctgccgacagggaaagtctgttttgggtgaatattcaggaggtccctcctgcgcctgagggaaataatatcctgcagttcgcgattcgcacccgattaaaactattttatcgcccgcaggggattgccacatcgctgcccaaagccgttgaaaatctgcagtggcagcaaagcgctaacacgttatcttttactaacaacagtccactgcatattacggttattaatgccgaggcgatcgacaacaaaggcaaaatctatcctctgaaaaactttatgttgctgccgtacagtcaccacgctgtcaatatcgccagcatgcagcgcttgcataaaatgaaatatattaatgattacggcgccgttgttgatattccaataaaaaaataa

SEQ ID NO: 244982 - DNA, 549 bp, Klebsiella pneumoniae
atgaaaatgaaatcactttgcctggcaatggcactcgtcggcttgacctcacactatgccgccgcggcggacggtacgctgtatttttcaggtacaattgtcaactcaagttgcaaactggcaagcggcaatgagaagggtctcattgaagttaagatgggcgctgttccgctgtctaaattaaaaaatgataccaatggcaccgggccagaagttggggtcaatattagcgtcaaagattgtgaagcgggcacgtactatattgtgctcgacggtgcttcagccaacgaggcgcctatcactaacgtactggctctcgatgcgggtaatcctacagctaaaaaagtcggcattaagctaaccgaccgcaataataccccggtcacgctcgataaacctttcgatcccaacgtcgacccgcgtattacggtcaatgccgatggcaccggtaccttcaacctgaaagcctactactatacctgggataaagacaacgccgaagctggcgacggcaatgcgaccgccaggtttaccattatgcaggaataa

SEQ ID NO: 244983 - DNA, 702 bp, Klebsiella pneumoniae
atgatcctgcttatcatcttatttactcccttcctctccagcagtaatacttggttacagaagcagtgtataaggaaatacattatgattattatcatttccgccaataaattttttattaacggcatccggtctctggttaacatgaccatgagtgctcaacgtcggtatagtcaaacattgtttctggataatatttctgacgtgaatgataaaagtctaaccatagccagaaccattatcgtggactatagccacccggacattcaacaattagccgcactgctctatcgtaaaaaaaagatcattcatggcgatatcgtttttgtcgttaaaagtgagattcttgccgatccagtcgaaaacattatcataaactctatttcgacgatcgtgcttgattatatagatgttacccaacggctgcagaaatacttacagaatgcgtctgatcatcgctgtattaaagtgttcagaaaatcaattagctcgctggacagttgtgtcaatattaaacttacgaaacaggaggactctcttctcccctatatcatctcaggtttaaataataagaaaattgctcaggccaccgaccttagcaatatgatgatcagtcactaccggagaaacatctaccagaaactcaatgtacgcaatattgcaggcctgtatcatttcctgcactccctggaggggggataa

SEQ ID NO: 244984 - DNA, 762 bp, Klebsiella pneumoniae
atgagactgacggtggggctggcgctgacgctggcgataatgacctgcggcgcccaggcgcgcgatatgcaatccatcgagcacagcggtgaactgaaggtgggcgtgccgggcgattacgcgccgctggcgtttcgcaatgccgccggcgaactgcagggctatgacgtggacatggcccgcgatctcgggcgcacgctcggcctcaaggtgagcttcgtctacaccagctggcccgcgctcgccgccgatctgcaggcggacaagtttgatattgcgatgggtggggttaccgagaccccggcgcgggcgcaagccttcgccctcagccatccggtggtggcgaacggaaaaatcgccttagccaactgccaggccgccccgcggctcggttcgctggaaaaaattgaccgtccggacgtgaaagtgatcgtcaaccctggcggcacaaaccagagttttgtcgatgaacacatcaagcaggcgcaaattattcgcgtgcagaacaatgtcgataacctgcaggcgctgcggcagaaaacggccgatatgatggtgaccgatctgattgaaggcgactattaccagagcaaagagcccggcgtgttctgcgttgctaacgaaacgccgttcgccggtaccgccagcaacaaggtgtatatgatgagtaaagataacccggcgctgctggagaaagtgaaccagtggctggatagccaggacaaagaggttctcaaacggaagtggaaaattcgcggttaa

SEQ ID NO: 244985 - DNA, 621 bp, Klebsiella pneumoniae
atgtctctgttacgaagcttgctattctttctcggcgcggcggtcgcggccgccctcgcggtactctgcctgtgggtggatattcgggtgtttggcaacgacatcccggaagtgtcgctcaccgaagtggtccaggagagcgtgctggccgttatcgtgctggttcatctgctgctggcgcggaaatatgcccacttgcgctatagcaatatcctcatcggcggcttctttctcgccatgctgatccgcgaactggatggcctgtttgatttactctcccacggcagctgggtgtggtttgccctgctggccaccgcggggtcgctgctgttgccgttgcgccatctgcgtcagaccctgtcgcagctggcggagtatacccgcaccccgtattacgggatgatgattagcggcctgctggcgattctggtcttctcgcggctgtttggcatgcacggcctgtggtacgccgtgctggaagagaactacgcccgggtggtaaaaaatacggtcgaggaaggcagcgagtcgtttggctatatgctgtgtctgaccgccaccctcggctacgcctgctactttcacggtctggcgcgacaggcgctgtcgccgcagcgctaa

SEQ ID NO: 244986 - DNA, 795 bp, Klebsiella pneumoniae
atgaaaattgatttagcgggaaaagtcgcgctggtcaccgcctccacggcgggtattggcttcgccatcgccaaaggcctggcggagagcggcgcagaggtcatccttaacgggcgcagcgagcagagcgtgaacgccgcgatcgcccggctgcaaaatgaggtgccgggcgcgaaggcgcgccccgccatcgccgacctcagcgacgccgacggcgcagcgcagctgctgcgggccgtgaccggcgtcgatattctggtcaataacgccgggatctatggcccgcaggatttctacgccaccgacgacgcgacctgggacaactactggcagaccaacgtcatgtccggcgtacgcctgtcgcgggggctgctcccggcgatggtcagtaaaggctgggggcgggtggtgtttatctcctcagaatcggcgcgcaatatcccggcggacatgatccactatggcgtcaccaagaccgcgcagctctcgctggcccgcggcctggcgaaatatgtcgccggcagcggagtgaccgttaacagcgttctgccagggccaacgatttccgacggctttgccgaaatgctgaaagacgacgtggcgaaaaccggtcagtcgctggaggaactggcgaaagcgtttgtcatgacccatcgtccgagctcggtgatccagcgggcggcctcggtggcagaggtcgccaatatggtggtctacgtctgctcgccgcaggcgtcagccacctccggcgccgcgctgcgcgtcgatggcggcgtggtggatgatattctctga

SEQ ID NO: 244987 - DNA, 933 bp, Klebsiella pneumoniae
atgtctgatatcactatcgtggtggattgtaacgacgcggatttcgcccgcgatatctgcgccgccctgcagcagtttcccgacgtcacggcgcttctgccccatcaccaggcggcgcgcgacgcccagtacgccagctgctggttcccgaacccgcagctgttgacccgttcgccggggctgaagctgatccaggccgcgtccgccggggtcgatcatctgccgcccgcgctgttcgccagcgagatcccgctgtgccgggtgatcgatgaagattttcgccacggcatgttcgaatatgccctgtggagcgtcctgtggtttcagcgccatttcgaccgggcgctggcccaccagcggacccaaacctggaagctctatccccagcgcgccgccgccgacttccatatcggcattatggggctcggcgaaattggcggctatatcgccgaccagctggcccgcctcggctatcgggtctccggctggtcgcgcagtgaaaagcagctggctggcgtcacctgctatcgcggcgaggaggcgctcgaccactttcttgggtcgcttgacgggctgattaacctcctgccgctcaccgcgcagacccgaggtatcctcgccgcgccgctgttcagcaggcttcccgccggggcggtgttaatcaactgcggccgcggagagcatatggtcaatgaggatgtgctggcggcgctggagagcggccagctcgccggagcggtgctcgacgtcttcccgcaggagccattgccggcggacgatccgctgtggcgccatccgcaggtggtcatcaccccacatatggcctctgcggcctctgccgaggtgatcgcccgccagctgctggagaacattcagcgccagcgccgcgggctgccgctgaaaaacctggtcaataagcacgccggttactga

SEQ ID NO: 244988 - DNA, 804 bp, Klebsiella pneumoniae
atgactagcaccctgaaaaaaatctcgcgccgtgtcgcgcttaccctcgccgtcagcgcctgtttttcccctgtcacccaggcggcggaactgctgaccgagggcgtctttaaggtggggatggaggtcacctacccgccgtttgagtcctatgacagcaataacaatatcgtcggtctcgacccggagtttgccgcgctgatcgcccaacatctgcaggccaaaccgcagctgatcgacaccaagttcaccagcctgatcctcggcatcggcaagaaatatgacgcggtgatctccgggatgtacgtgacgccggagcgccagaaacaggccgacgccatcccttacgccctctccggcgcgtcgatcatcgccctgaagggcggcgcggtgcagccgaaaaccgaagatgagctgtgcggcgtgaaggtcggtctgcaggcgggcaccacctgggtgaccagcctgaaaaaacactccgatgagtggtgcctgaaaaacggcaaaccggccatcaccattcaggagttcccgacggcgccggaagcctcgcaggcgctactgtcgaagaacatcggcgctcagcttgagattgccccggcagcgcagatcattgtcgacaagagccgcggccgcctggcgataagctctacgcgcctggtctacccgctgccgctggggatctacgtcgccaaaggcaacaccgagctggcggaggcgatcaaggccaccctggccacgctgaaggccaacggccaatatgccgcgttgatcaaaaaatacaacttagaaagcatcgattaa

SEQ ID NO: 244989 - DNA, 1068 bp, Klebsiella pneumoniae
atgaccgccgtgaagcacgcttttactgaactcccgaccatcgatatccgcgatctggccggcgatgacctcgccaggcgtcaggcggtggccgacgccatcggccgcgcggcgcgcgaggtgggctttttctacatcaccggccacggcatcgacccggcgctgatcgccggcgtccgcgaggcggcgaagcagatcttcgccctgccgatggaggagaagatgaactattacatcggccactccaaaagccataagggctacgttccggaaggagaagagatctacggctccggcaagccggaccataaagaggctttcgatatcggcttccaggcagcggatgaccatccgctggtgctcgccggtacgccgctgatcggcgccaacgagtggcccgatctgccggatttccgcacgcgggtgctggcctactacgacgcggttttcgccctcggccaccgtctgttcgacgctttcgccctcgcgctcggcctgccggaagggtatttcaaaccgatggtgacctgcccgccggctaagctgcggctgatccattacccgttcgacgccagcgtcgaagatgttcccggaattggtgcacacaccgactatgagtgcttcaccctgctgctcgccgaccagcccggccttgaagttctcaatgaagaaagcgtgtggatcgatgcacctcccgtcaagaacgccgccggagaagaggcgttcgtgatcaatatcggcgacatgctggaagtgctcagcgctggcacatttgttgctacagcccaccgggtgcgcaaagtgccgcaggagcggtactccttcccgctgtttttcgcctgcgattaccacacgctgatccgtccgctgccgacttttctcgccgccggcgaagccggtgaatatcaggagctcagcatcggggagcatatgtggagccaggccctgcaaacctatcgctacctgcgcgaaaaggtcaatcgcggtgaacttcagctaccggagcgcgcgcgcggcaccaatacgtttggccatttgaaaaaacaggcacagcaaaaaaccccctaa

SEQ ID NO: 244990 - DNA, 864 bp, Klebsiella pneumoniae
atggagctgaaatgctttcgcaccctctggggagtgacgaccccctggccgcaaacgctggatgaactgcagcgcgtcggctgctgcggtatcgaagcccgcgtgccgttaagggtggccgagcggcggcagctcgccgaccgcctgcaggcgtcggggctggagtatatcgccattcttttcagcggcggcggggtgctccccgcccagcatgaaacgcccgagcagcatctggcgcgcctgcagacccgcttcgccgaggccagcggcctcaacccgcgctttgtcaatttgctggcgggcaacgatcgctggccgctggcgcagcaggtcgattttctcggcaaggcgcatgagctggccgccgggtttggtttgacctgcagctttgaaacccatcgcgccacctcgctgtacagcccgtggctcaccctggagatcattcagcaactcccccagctgcgctttaccgccgacatcagccactgggtggtggtcagtgagcgcctgctggatgaccccagcgatgacttcagcgcctttatcgaccgcgtgcatcacgtgcaggctcgggtgggctacgaccaggggccgcaggtgccgcacccggcggcgcctgagtatcagccggcgctggcttttgccgagcgcttctggcagcaaatctggcgttcgcagcgccagcgcggctacccgcagaccacgctgaccccggagtttggcgccgacggctatctgcaccatctgccgttcaccaacgttccggtggccgatctctggtcgctcaacgcctggatggcaacgcgccagcaggcccactttcagcagtttttaacgctcactgaacaggaaccgcagccatga

SEQ ID NO: 244991 - DNA, 429 bp, Klebsiella pneumoniae
  misc_feature (391)..(400): n is a, c, g, or t
gtgtctaagcgtcgtgtagttgtgaccggactgggcatgttgtctcctgtcggcaataccgtagagtctacctggaaagctctccttgccggtcagagtggcatcagcctgatcgaccatttcgatactagcgcctatgcaacgaaatttgctggcttagtaaaggattttaactgtgatgacattatctcgcgcaaagaacagcgcaagatggatgccttcattcaatatggaattgtcgctggcgttcaggccatgcaggattctggccttgaagtgacggaagagaatgcaacccgtattggcgccgctatcggctccggtattggcggtctcggcttgatcgaagaaaaccacagttcgctggttaacggcggaccgcgcaagatcnnnnnnnnnnccattcttcgttccttccacaattgttaa

SEQ ID NO: 244992 - DNA, 2025 bp, Klebsiella pneumoniae
atgaacctgcagaccctgtcgtggcgcgcactcccctgggttaaagccacccggccgcagtggcggtacgcattgcgcaacggcatcgcgatgtgtcttgcgctgagtatcgcctatgcgctggatcttgatgagccctactgggcgatgacgtccgcggcggtggtcagctttcccaccgtcggcggcgtgatcagtaaaagttttggccgcatcgcaggcagcctgctcggcgcctgcgccgccctgctgcttgccggtcatacactcaacgatccctggctgtttctgttcagtatctccggctggctggcgctctgcacctgggcctgcgccctgttcaccaataacgtcgcctacgcctttcagctggcgggctatacctgcgccatcatcgcctttccggtgattaacatcagcgacagctacgaactgtgggtcatcgcccagtcgcgcgtctgcgaagtcatcgtcgggatcctatgcggcgggctaatgatgatgatcctgccaagcacctccgacggcagcaacctgctgacggccctgaaaaccatgcacgcccggctgctggagcacgccagcctgctgtgggtgccggagacgacggatgccattcgcaccgcccatgagagcgtgattggccagatcctgaccatgaacctgctgcgtatccaggccttctggagccactaccgtttccgtcggcagaatcctctgctgaactacctcctgcatcagcagctcagaatgaccagcgtcatctccagtctgcgacggatgctgctgaactggcctgacgcgccggcgaacactcgccaggtactggagtcgctgctcgccgagctcgccacccctcatgccgacagctatcacgttgcgcggatcctggcgccgctggcgccgcggcaggatgccgattaccggcacatcgctttctgggcgcgattgcgctatttctgtcgcatttacctggagagcagccgctggatccgccgcgttgaaaatgcctcggcgatcgccgagttcaatgtgcccgccgccccgccgttagcccgccataccgatcaggcggaggcgttgctcaacggtgtccgtaccttttgcgcgctggtggcgattggcgcatgggggatcagtacccagtggaccagctgcgcggcggccctgaccctggcctccatctgctgcgtgctctactccgtatccgcctcgccgtttcgctcgctgacattgctgatgcagactctggtcctgctgtcgctattcagtttcgtggtgaagttcggcctgatggtgcaggtaaccgacctgtggcagtttctgctgttcctgttcccgctcctgaccaccatgcagttactcaaactgcagtggcccaaatacgccggcctgtggggacagcttatcgtctttatgggctcgtttatcgccgtcaccaacccgccggtgtacgattatgcggcctttttcaatgataatttgagcaagattgtcggggtaggctttgcctggctggcctttgcggtactgagtccgggctcggacgcccgcaaagggcgacgccatatcagagcgttacggcgtcactttgtcgatcagcttagccgtcatcctcagcacagtgagcatgaatttgaatcgctggtctatcaccacgtcagtcagctcagccagagtaaggatgccctggcgcgccgctggctgttgcgttggggcgtcgtgctgctcaattgctcgcacgtcgtctggcagcttcgcgaatgggaaacccgctccgatcctctcgcccaggtgcgcgacctgtgcatcaacctgttacgcgatgtgatgagcgagcgcggcgtgcagcagcgtccgctggcctccaccctgcaggagctgcagcggatctgcgacgccctgaaccaccatcatcagccggcggcgcgggaactggccgccgcgatttggcgactgtactgcgccttgtcgcagctggaacaggccccggtggccggcacaattggcgaaggaactacttaa

SEQ ID NO: 244993 - DNA, 132 bp, Klebsiella pneumoniae
atgaccctgtcgcaggtgctgtattccctgtggctcggggccaacctgcaggccaaaattacgcgtagcgcaacgccgctggaaagcgcccttgcccacgccaaacagattattgcggcgcctgcggtataa

SEQ ID NO: 244994 - DNA, 858 bp, Klebsiella pneumoniae
atgcctaacagtttgacctggtgcgacctgcctgaagacgtttccctgtggcctgggttgccgctttccctgagcggcgacgaggtcatgccgctggattatcacgccgggcgcagcggctggctgctgtatggtcgcggtctggataaacgtcggctgacggcgtggcagcgtgagctgggcgccgcgttagtgatcgttgcctcctgggtggtcgaggattaccaggtgatccgtctggccggttcgctgactccccgtgcgacgcgactggcgcatgaggcggggctggacgtcgcgccattggggaaaattccccatttgcgcaccccgggcctgctggtgatggacatggactccacggcgattcagattgaatgcatcgatgagatcgcgaaactggccggcaccggcgagctggtctcggaagtgaccgagcgggcgatgcgtggcgagctggacttcaccgccagcctgggctggaaagtggcgatcgcctccggcggtttcaccttctttgccgagtatctgcgcgacaaactgcatctcgacgcggtattcgccaatgagctggagatccgcgacggcaagctcaccggcaacgtgctcggcgatatcgtcgatgcgaaatataaagccaatacgttgcgcaagctggcggaaaagtatgagatcccaacggcgcaaaccgtggctatcggcgatggcgccaacgacctgccgatgattaaggcagcagggcttggcatcgcctatcacgcgaagcccaaagtgaatgaacaggcggaagtgactatccgccacgctgacctgatgggggtattctgtattctctcgggcagcatgaaccaaaagtaa

SEQ ID NO: 244995 - DNA, 723 bp, Klebsiella pneumoniae
atggacgtcaaagtcggcagcggcgcgtttatgccgacttatgaactctctgccgcgctggccgaagcgatcgtgggtgtcgccaacggcgccggcgtgcgcaccaccgcgctgctgaccgatatgaatcaggtactggcctccagcgccggcaacgccgttgaagttcgcgaagcggtgcagttcctgaccggcgaataccgcaacccgcgcctgttcgacgtgacaatggcgctgtgtgtggaaatgctgatctccggcaagctggcggcggacgatgccgaggcgcgcgcgaagctgcaggcggtgctggataacggtaaagcggcggaagtgtttggccgcatggtcgcggcgcagaaaggaccgagcgactttgtcgagaattatgctaattatctgccgacggcgatgctgagcaaagcagtctatgctgataccgaaggttttatcagcgcgatggatactcgcgcgctgggcatggcagtggtttctatgggcggcggccgccgtcaggcatcggacaccattgactatagcgttggctttaccgagatggcgcgtctgggtgaccgcgtcgacggacagcgtccgctggcggtgatccatgccaaagacgagaacagctggcaggaggccgcgaaagcggtcaaagcggccattaaactggacgataaagccccggaaattacaccgacagtctatcgccgtatcactgaatag

SEQ ID NO: 244996 - DNA, 915 bp, Klebsiella pneumoniae
gtgcgtattggtattgatttaggtggaacaaaaaccgaagtgatagccctgagcgatcagggagagcagctgtttcgccaccggttatccacgccgcgggaggactaccggcaaaccatcgagaccatcgccactctggtggcgatggccgagcaggcgaccggacagcagggtaccgtggggatgggcattcctggctcaatttcgccttataccggggtggtgaaaaacgccaactcgacctggctcaacggccagccctttgataaggacctcagcctgcgccttgagcgggaagtccggctggctaacgatgccaactgtctggcggtgtcggaagcggtggacggcgcggcggcgggggcgcaaacggtattcgcggtgattatcggcaccggctgcggcgccggggtggcgctcaacgggcgagcgcatatcggcggcaatggtaacgctggcgaatggggacataacccattgccgtggatgaacgacgatgagctacgctaccgtgcggaagtcccttgctactgcggcaaacaggggtgtatcgaaacctttatctccggcaccggtttcgccaccgactatcagcggctgagcggcaaagggttaaccggcagcgagattatgcgcctggtgggagaaggtgacgaaaaggctgaactggcgctgagccgctatgaacagcggctggcgaaatcgctggcccacgtggtgaatatcctcgacccggacgttatcgtgctgggcggcgggatgagcaacgtcgaacggctgtatcagacggtgccggacctggtgaagcagtgggtcttcggcggcgagtgtgaaacgccgatccgcaaagcgatgcacggcgactccagcggggtacgcggcgcggcctggctgtggccgctccaggggacctga

SEQ ID NO: 244997 - DNA, 507 bp, Klebsiella pneumoniae
gtgcgcggcgcccaggtgagcgaagaccgtattcacccgttccgcaaatatttcgaagagattcagcctggcgacagcttattaaccccgcgccgaaccctgaccgaagcggatatcgttaacttcgcctgcctgagcggcgatcatttctacgcgcacatggacaaaatcgccgccgccgagtcgatttttggcgagcgggtggtccacggctatttcctgatctccgccgcggccgggctgttcgtcgatgccggcgtcgggccggttatcgccaactacgggatggaaaacctgcgctttattgagccggtcaaaccgggcgacaccattcaggttcgcctcacctgtaagcggaaaacggtcaaacgtcagcgcagcgccgatgagaaagccaccggcgtggtggaatgggcggtggagattttcaaccagcaccagcaggcggtggcgctgtattccattctgaccctggtggcgcgtcaacagggagatttcccggcgtga

SEQ ID NO: 244998 - DNA, 1290 bp, Klebsiella pneumoniae
atggcaaacggcttgaaattttctcctcgtaaaaccgcgctggcgctggccgtggcggtggtttgcgcctggcaatcaccggtcttcgctcacggtagcgaagcccacatggtaccgctggataaaacgctgcaggaattcggcgctgatgtgcagtgggatgactacgcgcaaatgttcaccctgataaaagacggcgcttacgtcaaagtaaagcccggcgccaaaacggcgatcgtcaacggtaaatcccttgacctaccggtgcctgtggtaatgaaggaaggtaaagcctgggtttccgatacctttatcaacgatgtcttccagtccggtctcgatcagaccttccaggtggaaaagcgcccgcacccgttaaactcgctctcagcggcggaaatcagtgaagcggtgaccattgtcaaagccgcgccggagtttcagccgaatacccgctttactgagatttccttacacgagccggacaaggcggcggtatgggcctttgccctgcagggaacgccggtcgatgctccccgcactgccgatgtggtgatgctcgatggcaaacacgtcattgaagccgtggtcgatctgcaaaacaaaaaaatcctctcctggacgccgatcaaaggcgcccacgggatggtgctgctcgatgattttgtcagcgtgcagaacatcatcaataccagcagcgaattcgctgaggtgctgaaaaagcacggtattaccgatcctggcaaagtggtcaccaccccgctcaccgttggcttttttgatggcaaagatggcctgcagcaggatgcgcgtctgctgaaggtggtcagttatctggataccggcgacggcaactactgggcgcacccgattgaaaacctggtggcggtggtcgaccttgaagcgaagaaaatcatcaaaatcgaagaaggtccggtgatcccggtcccaatggagccccgtccgtatgatggtcgcgaccgcaacgccccggcggtgaaaccgctggagataaccgaaccggaaggcaaaaactacacgatcaccggcgataccattcactggcagaactgggattttcatctgcgcctgaactcgcgcgtcggaccaattctgtcaacggtgacttacaacgataacggcacaaaacgccaggtgatgtatgaaggttccctcggcgggatgatcgtcccctacggcgacccggacgtcggctggtatttcaaagcctatctggactccggctattccaggcgcggtggccatattcgaacgctatgccgggcctga

SEQ ID NO: 244999 - DNA, 864 bp, Klebsiella pneumoniae
  misc_feature (812)..(821): n is a, c, g, or t
atgaagaatatacgtaacttttcgatcatcgctcacatcgaccacggtaagtcgacgctgtctgaccgtatcatccagatttgcggtggcctttctgatcgtgaaatggaagcccaggttctggactccatggatcttgagcgcgaacgcgggatcaccatcaaggcgcagagcgtcaccttggactataaggccagcgacggtgagacctaccagctgaactttatcgacaccccgggccacgtggacttctcttatgaagtttcccgttctcttgccgcgtgcgaaggcgcgctgctggtggtagacgccgggcagggggtagaagcccagaccctggccaactgctacaccgccatggagatggatctcgaagtggttccggtactcaacaagatcgacctgcctgcggccgaccctgagcgcgtagcggacgagattgaagatatcgtcgggatcgacgcccacgacgcggtgcgctgctcagcgaaaaccggcgtcggcgtgaccgacgtgctggagcgtctggtgcgcgatatcccgccgccggaaggcgatccggacgcgccgctgcaggcgctgattatcgactcctggttcgataactacctcggcgtggtgtcgctggtgcggattaaaaacggcaccatgcgtaagggcgacaagatcaaggtcatgagcaccggccaggtgtataacgctgatcgtctgggcatcttcaccccgaaacaggttgaccgtaccgagctgaaatgcggcgaggtaggctggctggtctgcgcgatcaaagacatcctcggcgcgccggtggnnnnnnnnnnaaccgcaggtgtatgccggcctgttcccggtgagctccgatga

SEQ ID NO: 245000 - DNA, 582 bp, Klebsiella pneumoniae
atgggctatcgcctggcgcaccaccgccaccttatggccccgctgcgccagcggcagattggccccacagcccaccaccgcgtcagggtcgctgcccgtcaggacactgatcgtcgctgcggccggggtggtattggccattcccaattcgccgacgccgaaggctttcaccccgtcggcagcgagctggcgggtgagctgcatgctggccagcagcaccgtctccgcctgctggcggctcatggccgccgtccgggcgatattctcgctaccgcgggccactttgaggttaatcaggcccggcagcgggtcggcatcgatgccgacatccactacctgcaccctggccccggcctgcgccgccagcacgcagacgccggtgttgccccgcaccatattgccggcatgaatggccgtcaccccctgcggcgaaggggtcacgccttcatgccagacgccatggtcggcgcacatgaccacaatcgctttctccgccagcgccagctgcccctgcaagccaggcagaccggccagctgcaccgccagcgcctccagacggccaaggctgccgggcggctttaa

SEQ ID NO: 245001 - DNA, 954 bp, Klebsiella pneumoniae
atgctgctgcgcctgatccgccttcggggtcagcgtgcgggtggttttgccatcagacagcgtgacactgtcacccgaaacagactgcacctcccagatactgttggccacatagccgcgctccaggtcacttttgctgaagcgcattcggtccccctgagacacggtgatcttttcctggcgataaagcgtcacaccttcagcagaggcttcacggggagagatatatcgctcctttccttcactgtctgtcagggtgatcagctgattatccttatccactttgctgatacggtggtatacgttatcaaccagcgccaccgcctccttgtgagccgtccaggtcgacagtttgcgcagttcaccgtcacggatgttgctcgtgaccagcaccggcagggtgatttcctctttgccggtttccccgttctcccgccgtgcgtcatggatcagactgttcagcgcccgccggtccttattcagatgggtgataatcagcgtctgcgactgtgcctccggggtccgtccggtatagtccttcaccagcgcctcgtagagcgtcgcgggctgacctgccggcagggtttccccctcgctcagcgccttttgtatcgccttttcctgcgccggcgtgaattccaccacagaactgcccggcgcccagacgccttcttttctcggcacctgctccggcgtgacctgctcgatggtggtcagggcgcggtgcacatcccgctcaatcaggctgtagaccgccggtcgcagctcaggcacctggcgcacaatctctttcatgatggcaacgtcggcggcgctgcgctgctgcatgagcctgaacggctggcccggcgcgatgggctgcagctggtcgttatccccactggacaccgcccgtccaccgccggcgacgatgagggagtgggcttttgccatatcggccagccccaccattga

SEQ ID NO: 245002 - DNA, 888 bp, Klebsiella pneumoniae
atgcaggctgttctccggttcattgatcgccagaaacgccggcgggcgcggactgagcagcgcgacggcgaggcacaaaaagcgcagcgtaccgtcggacatctccgccgccagcagcgggcggcggatcccttcgcgacgcattttcagagcgaaacgcgagtgctcgttttcacaataaaactggcagccgggaaaggcgtcggcaaggatttcatgcaaaatctcctccgcgccgatctcgacaatggtctgaaaggcggcggcgagattctggccatcgctgtcgaggactggcgaacggtaacccacggccggctgacgcagtggcgaatgacggccaatcgcgaattcatgataaaaccgccaacggcgcagcgtctcccgcactcgcgatacttcgggaaaacggtgcggctcgccaagctgaccgaacaccgactcattttcataaatactctcggtgaaagtacttttctccccggtgacatcgacgagaaacgccgcctgattcttgcgctgcagtacgcgggaggaaggccggcgggagtagccggccagccagatattctcttctttaacgataggatcgagcatgaattgcgtcggatagggcaatttttcagggaagcctatctgcagttcataatcgaagctgtcggtccggcaggcgatttgcagccggcgggggtgacgatcgaggggcgaacgctccccggaccacatcatattctccagaccgccctcttcgctgataaaccccgaaagcctgccctcagcggcagcggtcagcaggtggatggcgttataaatattggatttaccgcagccgttagggccgaagacaatgttcagcggcccgagctccagcgcgatatcctttactga

SEQ ID NO: 245003 - DNA, 816 bp, Klebsiella pneumoniae
atggctaaaggcccgtacgaaatacgcaaaaatctggaactcctgtcgggcgatattctgtatcgcgatccgggtattttcgattcgactatcggtttactcgattttggagacacctgggccgggggcgggaaaaccgctggctaccaggcaaacgaccagattaaaaacctgtgttatgtggacgattatgcatatccgaatatggctatgctctatgatggcggcggcattcgtgttgacgagcataacgggagcaaaatcacgttgccggagtcgttcattatccctgccacctgcacaaaacaattagttcgcatgtggtttaaactcccgacgtcggacatcggagatacaaccgttttatacaataaccaattgctggttattggcgggacatatgcatcaaaccagtctctgacatacctgggggcaaacaacaaggcggatgggacgctcaacaatatggtagttggcgggtttggtgtgggtgttgattcaggctcagctattgccaacatcgttaaaactggccaggttgttcagctggcgtggctggccactaaaatcgatgcaacgcacgtctcgttcagggtgttcgcaaacggtgtttacattgctgatttaacgcctgtgacgtttggcacgcgacccgcatccattcccattcgccagctgaataataaaggtgcgtcggaaaaatcagtgcgcaacaccacatatcgcgtcgctatcgacgatctgaccaatagtgacctcgaccctgctgatattgttgcggcagattacgcagataacgtctcccgctttagctaa

SEQ ID NO: 245004 - DNA, 828 bp, Klebsiella pneumoniae
gtgtttttccagcagctcgtcgaaggttttgatgccttccacgcggatcaggtggaacagttcctggcgagagtaggcgaagtgttcgcacagattgttgttgacctcgatgccctgtttcgccagctcggcgttgagcacctgagtgaccagcggaatacagcccccgcagccggtcccggctttggtttccgctttcagcgccgccacggtgtggcagcctttgttgatagcggcgatcaggtcgcctttgctgacgtcaaagcaggagcagatctgcgcgctgtccggcagtttatcgacgccgatcgatggcttgccgctgccggcgtgggccgggaggatcagcgaatccgggttttccggcagctcgatggcgttgagcaccagctgcagcagattgccgtagtcgctggtgtcgccgaccagcaccgcgccgagcagcgttttgttgtcggcgctgacgatcaggcgcttataaacttctttgctttcgtcgagatagacgtagctacgggcgcccggcgtgcggccgtgggcatcgccgatcccgcccacgtccacacccaacagcttcagcttggcgctgaggtcggcgccggtgaagctattttcactgccgaggagatggtcgacggccacctgggccattttatagccgggggcgaccagaccgtagacgcggttgttccagctggcgcattccccgatggcatagatatccggatcggaggtctggcagctatcgttgaccatgatgccgccgcgctgggcgaccgccagcccgcactgggtggccagcttatcgcgcgggcggatcccggttga

SEQ ID NO: 245005 - DNA, 345 bp, Klebsiella pneumoniae
gtgcatggttttgcgcgcctcggtgccctgctgaacaatctctttggtgtttttgctggtgtgaactttcacgcccatgctttcgattttgcgccgcaactgctcgccgcccatctggtcgagctgttcggccatcagcatcggcgcgaattcgataacatgggtttccacgccgaggtttttcaacgcgccggccgcttccaggccgagcaggccgccgccgactaccgcgccgcgtttgctgcggcgggcgcaggattcgatggcgttaagatcttcaatagtgcgatagacgaagcaatcctgggtttccgcgcctttaatcggcgggatccacgggtatga

SEQ ID NO: 245006 - DNA, 354 bp, Klebsiella pneumoniae
gtggatcactttctcctggcggttgatggtgatcgcccgttcgccgaccagcaccttgacgccgtgtttctcatagaaaccttcgcgtaccagcgacagttcttccgcagtgtgatgggagaaataagacgacaggtggacgcggtcgtaggcgatacgcggttcttcacagaacacggtaatgtcgaactgtccggcaggcgccttatcgagaagctcttcgataaagcgatggccaaccatgccgttaccgataatagcgattctgactttgctcatttttgcctcgatttcttttctattaccgcctaccttaacgattcagccatcaggcttattgatgcaaatcaatga

SEQ ID NO: 245007 - DNA, 543 bp, Klebsiella pneumoniae
  misc_feature (362)..(371): n is a, c, g, or t
atgccactccagctgcagcgctcgccacagctggcgcagcttgccgccgaaggtgcgtggatggggatcaagcaggcgtgccacctgcatggtaagcgtgctgccgcccgagataactcgcccggaagtaagatcctgccaggcggcgcgcagcaccgcgaagggattgacccccggatggcgccagaaccagcggtcttcatactggatgagcgcctgcagatagcgcggcgacacgtcggcgagcgtgaccggataacgccagacgccctgcgcgtcggcaaaccgccacaacggcgtcccgtcttccgccaccaccacacgggcaggcgtgacgtcatgcagcggcagcggccacaggnnnnnnnnnncgccagcaccgccagccacagcagaaaaataaacgccgccagccagcgccagcggcgttttacccgaggcaatacgcgcatttacggcatcacggtgagcggaccgctggccgctcctgtcgcccgccactgcggcgcatacatcgattccacctgcggctgcgggacctga

SEQ ID NO: 245008 - DNA, 675 bp, Klebsiella pneumoniae
atggccgatatcctccaccgccagcacctgcattctcccctccggcagcataaaaaattgaaaacgaccttcatcaaggccaaaaccaggcatcaccagcagctccataaaggtggcgggccgcacgatggtcgccgccagcggcaggcggcgaatatgccgttcaatttccgctttggtgtcataatgcgctacgccggtcggcgtctcccccgtcgcgctgccggagctgtacaccagatgcttcaccgcgcactcgacggcgagatcggcgatggttatcccgtagcgtacctcctgctcatcggtcaccgtccctcccggcgaactgggctggacgctgaagacgccgtcgaccccggccatcgccgaccgcattgccgcccggtcttcaaaggttcccacgaccagctcggctccccgcgccgccagcgcagcggccccggcggagaaaggatccctgaccagcgcccgaacccgccagccgcggtgcagcagcgcccgcgccaccgagccgccctgctgaccggtggcgccaaaaaccaacacggtttgcgcattattcatcactgttccccttatctgcagcctgtttcccggcctctcgccagcgatagtcaccttgcttatccttctccagccagccgcaggaaggcccggcaaaatgcccggtga

SEQ ID NO: 245009 - DNA, 678 bp, Klebsiella pneumoniae
gtggaagtgcgcgccgggaccggcggcgacgaagcagcgctgtttgccggcgatctattccgcatgtacacccgttacgcagaatcgcgccgctggcaggtagagatcctcagcgccaacgaaggtgagcacggcggctttaaagaggtgatcgccaagatcagcggcgacggcgtttacggtcggctgaaatttgaatccggcgggcatcgcgtgcagcgcgtgccggccaccgaatcgcaggggcggatccacacctccgcctgtacggtggcggtgatgccggagctgccggaagccgaaatgccggacattaacccggcagatctgcgcatcgataccttccgttcctccggggcaggcggtcagcacgttaacaccaccgactcggctatccgcattacccacctgcccaccggcatcgtggtggagtgccaggacgagcgttctcagcataaaaacaaagccaacacgcgccgcaacctgctgggcagcggcgaccgcagcgaccgcaatcgcacctataacttcccgcagggccgcgtgaccgaccaccgcatcaacctgacgctctaccgtctggatgaggcgatggagggcaaactcgacatgctgattgagccgattgtccaggaacatcaggccgatcagctggcggcgctgtccgagcaggaatga

SEQ ID NO: 245010 - DNA, 1482 bp, Klebsiella pneumoniae
atgccgcgaccagatccgcgccagcccgtcagcgggaagctgatagcgaacggcatcctgcggcgccacctccaccattggctcagcgatatgctgcatcagccgcggcaccgcgccggtacgggtcatggtgtgccactgatcgcggatccgcccgctgttgaggatcagcggataaaaggcatcggttgtcgcccgggtcggttgaggcgtcaccggcaccatccgcagcctgccatcgccatgccagccgcgcgtgatatcccaggcggcctcgctgcggctgaccggccagcgcaccggcggcatggcgtcccacgcctcacggctgagatccgccagcgcgccgatatcaaacgcccgctggccgtcgttttcgaaaccggacagcgccgcatgctcgcggaagacgtcatgcggatgctgccaggcaaacgcctcgcgataccccagcgcctggcccactctggcgatgatccaccagtccgctttcgcctcccccggcggcggcagaaagctgcgctgacgggatatccgccgctccgagttggtgaccgtgccattcttctcgccccaggccaacgctggaaagcggatgtgggcgaaacgtccggtatcggtctgggcggcgacatccgagacgatcaccagcggacaggcggccagcgcctggctcaccgcgtggctgtcagggagcgacaccaccgggttggtacccatgatccagaccgctttgacctcgccgcggccaatggcggcaaacagctccacggcggtcagcccgggggtctgcgccagccgttccgtcccccagaagcgggccagccgctgcagatcgtctggcacaaaatccatgtgcgccgccagcatcgtcgccagcccgccgacttcgcggccgcccatggcgttgggttgaccggtcagcgaaaaggggccgcagccgcggcggccatatttcccgctggccagatggacgttgatgatggcgttacatttgtcgctgccgctggcggattgattgattcccatggtgtagagggtgatcgcccgcggggcggcgatgaactcgcgatagaatcccgccacctcatcggcaggcagaccgcaaaaggccgccaccctcgccacgtcccagccgcgggcggcggccagcgcctgcgggccgtcgcgaaagccatcgacgcaggctcctgcctcagccagggcgttaagcagccccgcaaacaacccgccgtcgcttcccggagccagcgccagatggcggtcggcgatctcgcaggtagcggtgcgtcgggggtcgatcgccacgatccgcaatcggggattatcccgcttcgcctgcgccagccgctggaacagcaccggatgcgcccaggcggcgttcgagccgaccagcaccaccagatcgctgttttccacatcatcgtagctgcagggcaccacgtcggcgccaaaggcccgcttgtagccagtgaccgctga

SEQ ID NO: 245011 - DNA, 3324 bp, Klebsiella pneumoniae
atgcaggatccggcaaaaacccgcagctataaagcggcgcgcggcaaaggcggttttgtccgctccagctggaaagagctgaaccagctcatcgccgccgccaacgtctggaccatcaaacactatggcccggaccgcgtcgccggcttctcgccgatcccggcgatgtcgatggtctcctacgccgcgggcactcgctatttatcgttgattggcggcacctgcctgagcttttatgactggtactgcgatctgccccccgcctcgccgatgacctggggcgaacagaccgacgtgccggaatccgccgactggtacaactccagctacattattgcctggggctccaacgtgccgcagacccgaaccccggacgcccacttctttaccgaagtgcgctacaagggcaccaaaactatcgccatcacgccggactattcggaagtcgctaagctctgcgaccagtggctggcgccgaagcaaggcaccgacagcgcgctggcgatggccatgggccatgtgatcctcaaagccttccacctcgataacccgagcgattactttctcaactactgccggacctacaccgacatgccgatgctggtgatactcgagccgcgcgacgacggcagctatacgccgggccgtatgctgcgtgcttccgacctgcttgacggtctcggagaaagtaataacccggaatggaaaaccgtggcttataacagcgacggcgaactggtggcgccgaacggctccatcggctttcgctggggcgaaaaaggcaaatggaatctcgaacaacgggcagacggcaaagatgtcgagcttaagctgtcgctgctggatattcgcgacagcgtggtgtcggtgggcttcccctactttggcggcaacgaaaacccgcattttcgcagcgtagcgcagtcaccggtgacccttcacccgctaccggctaaacagctgacgctggccagtggcgaaaacggcctggtggtcagcgtctatgacctgattctggccaactacggtctggatcgcgggcttgacgatgtcaatgcggcgaaggatttcgccgaggtcaaagcctataccccggcatgggcggagcagatcaccggcgtaccgcgtcaacatatcgaacaaatcgcccgcgagtttgccgatacggcgcataagacccacggccgctcaatgattatcctcggcgccggggtgaaccactggtaccacatggatatgaactaccgcgggatgattaatctgctggtattctgcggctgcgtcggccagagcggcggcggctggtcgcactatgtcggtcaggagaaactgcgcccgcagaccggctggctgccgctggcgttcgccctggactggagtcgtccgccgcggcagatgaacagtacctcttatttctacaaccacgccagccagtggcgctacgaaaaactgaccgcgcaggagctgctgtcgccgctggccgacgccagcaaatttagcggcagccttatcgacttcaacgtccgtgcggaacggatgggctggttaccttctgcgccccagctcaacgtcaacccgctgaccattaagcagcaggccgaggccgccgggctctcccccgcggagttcaccgtccagtcgttaaaatcaggcgatattcgctttgccgccgagcagccggatagcggcaaaaaccatccgcgcaacctgtttatctggcgctcaaacctgctgggatcgtccggtaaggggcatgagtacatgttgaaatacctgctcgggaccgacagcggtattcagggtgatgaactgggcgccagcgatgaggtaaaacctgtggaagtcgagtggcagaccgcggcgattgagggcaaactcgacctgctggtgacgctggatttccgcatgtccagtacctgtctcttctccgatattgtcctgccgaccgccacctggtatgaaaaagacgatatgaacacctcggacatgcacccgtttatccacccgctctccgccgccgtcgacccggcctgggaggcgaaaagcgactgggagatctacaaggatatcgctaaatccttctcgcaggtctgcgtcggccatcttggcaaagagaccgatgtggtgctggtcccgctgcagcatgattcccccggcgaactgtcgcagccgttcgaggtgcttgactggcgcaagggcgaatgcgatctgatccccgggaaaaccgcaccgtccattgccctggtggaacgcgactacccggccacctgggaccgcttcacctctctcggcccgctgctcgataagctcggcaacggcgggaaaggcattgcgtggaatacgcaaagcgaagtcgatttcctcggcaagcttaactacgtcaagcccgatggtccggccaaaggccggccgcggatcgacagcgccattgacgcctccgaagttattcttagcctcgcgccggaaaccaacggccaggtggcggtgaaagcctggcaggcgctgggagagtttaccggccgcgatcatacccatctggcgctcaataaagaggatgagaagatccgctttcgcgatattcaggcgcagccgcgcaaaattatctccagcccgacgtggtccggactggaaagcgagcacgtctcctacaatgccggttataccaacgtgcatgagctgatcccatggcgcactctctccggccgccagcagttgtatcaggaccatccgtggatgcgcgccttcggcgaaagcctggtagcctatcgcccgcccattgatacccgcagcgtcagccagatgaaggccgtgccgccaaacggctttccggaaaaagcgctgaatttcctgacgccgcaccagaagtgggggatccactcaacctatagcgaaaacctgctgatgctgacgctgtcgcgcggcgggccgatcgtctggcttagcgaaaccgacgcgaaagagctgggcattgaagataacgactggattgaagcgttcaacgccaacggggctctcaccgcgcgggcggtggtgagccagcgggtgccgccggggatgaccatgatgtaccacgctcaggaacggattatgaatatcccgggttcggaagtgaccggtcgtcgcggcggcattcataactcggtaacccgcgtctgtccgaagccaacgcacatgattggcggctacgcccagctggcctatggctttaactactacggcaccgtcggatcgaaccgcgacgagttcatcatgatccgcaaaatgaagaatattgcctggctggatgacgaaggtcgcgatcaggtacaggaggcgaaaaaatga

SEQ ID NO: 245012 - DNA, 675 bp, Klebsiella pneumoniae
atgccgatcgccaccgacagggtgacggcgaactcgcgcagcaggcggccgggcaggccgcccatcagcagcagcggcaggaacaccgccaccagcgacagactcatcgacagcacggtaaagccgacctcgcggctcccctgcagcgccgcctgcagcggtttcatccccgcctccagatggcgggagatattctccagcaccacgatagcgtcatccaccacgaagccggtggcgatggtcagggccatcagcgacaggttattgaggctgaagccgcacaaatacatcgcggcgaaggtgccgattaaggataccgggacggcgacggccgggatcagcgtggcgcgccccgagcgcaggaacaggaacaccacgaggatcaccagcgccaccgaaatcaccagcgtctgctccacctcctccagcgaggcgcggatggtcggcgagcggtcctgggcgatctgcaggtcgatagccgccggaatggtctgctgcagctccggcaggcgggcgcggatgctgtccaccgtctggataatattggcttccggcagtttgcggatcatcagcaggatcgccggtttggcgttggtcatcccggcgttgcgtacgtcctgcaccgaatccgagacggtggcgacatctcccagccgcaccgcggcgccattttga

SEQ ID NO: 245013 - DNA, 249 bp, Klebsiella pneumoniae
atgcgggtgctgccgagcgagctggaggaggtcatctcattgaccccggcaatccgccccagggagcgctccagcggggtggccaccgacgaggccatggtctccggcgaggctcccggcagcgaggcgctaaccatgatcaccgggaagtccacctgcggcagcggggccaccggcagcagccggaagccgagaatgccgcacagggtgatggccagcgagatgaggatcgtcgccaccgggcggtaa

SEQ ID NO: 245014 - DNA, 1239 bp, Klebsiella pneumoniae
atgaaaggcagtaacatacgtcgttggggcgccgcgctggcggtagtgattatcgccggggccgcctactggttctggcacgatagcgggacgagcggcagcggggctcccgccgccgggcagggcccgcaggggccgggcggcgcacgccatggccgctttggcgccgcgctggcgccggtgcaggcggccaccgccaccgaagaagcggtcccgcgctatctcaccgggctgggtacggtaacggcggccaataccgtcaccgtccgcagccgggtcgacggccaattgctgagccttcacttccaggagggacagcaggtcaaagccggcgacctgctggcgcagatcgaccccagccagtttaaagtcgccctcgcccaggcgcagggtcagctggcgaaagatcaggccaccctcgccaacgcccgccgcgatctcgctcgttaccagcagctggtgaagaccaacctcgtctcacgccaggagctcgacactcagcagtcgctggtggtggaatccgccggcacggtgaaagctgatgaagcggccgtcgccagcgcccagctgcagctcgactggacccgcattaccgcgccaattgacggccgcgtcggcttaaagcaggtcgatatcggcaaccagatctccagcggggataccaccgggatcgtggtccttacccagacgcacccgatcgacgtggtctttaccctgccggaaagcagcatcgccacggtggtgcaggcgcagaaagcgggcaaagcgctcagcgtcgaagcctgggatcgcaccaataagcagaaaatcagcgtcggcgagctgctgagcctcgataaccagatcgatgcgaccaccgggaccatcaagctgaaggcgcgctttagcaatctggacgacgcgctgttccccaatcagttcgttaacgcccgcctgctggtggacacccagcagaacgcggtggtgatccctgccgccgcgctgcagatgggcaacgaagggcatttcgtatgggtgctgaacgatgagaataaggtcagcaaacacagcgtgacgcccggcatccaggacagccagaaagtagtcatcagcgccgggctttccgccggagatcgcgtggtcaccgacgggattgaccgcctgaccgagggagcgaaggtagaagttgtcaccgccagcagcggcgagcaggcgcagcccgccccgcgccagagcggtaaacacggagcgcgttcctga

SEQ ID NO: 245015 - DNA, 228 bp, Klebsiella pneumoniae
gtgcagggcttccgccggatggacgaaaaaggccggggtgccggtgctggcgaaggttgccgccagctttttaccgatgtggccggatttaccgataccggagacaatcagtttgccctcgcagtggataatggtttccgccgcgcggatgaagtcgtcgcccaggcgctccggcaggcggctcgcctcctgcagctcaagcatcagggtctggcgtccggcctctaa

SEQ ID NO: 245016 - DNA, 231 bp, Klebsiella pneumoniae
atggaatttgcaaccaatcaccaaccaagcgaatggggcggcaatcattatggtctgcgcatcaacgaacatgatgaggatttgggcctgaacaactcagcagaaattgccatctggtttgaggagtttattgactcaaggtcagagctaaaccttgagatcagaaagcgctctctcgctttcctcaagagagccgtcgctcaattagaagaagaactttccggcaagtag

SEQ ID NO: 245017 - DNA, 1374 bp, Klebsiella pneumoniae
gtggatcacttacccatattctgccagttgcgccagcgcgattgtttactggttggcggcggggatgtcgccgaacgcaaagcccgtctgctgctggatgctggcgctaacgtcacggtcaatgcgctcgacttcacgccccagtttcaggtgtgggctgattcacagatgctaactctggtgcagggggagtttatcccctcgctgctggataactgctggctggccatcgccgctactgatgatgagacggtcaaccagcaggttagcgaggcggccgaagcgcggcgtatcttctgtaacgtggtggatgccccgcgccaggccagctttatcatgccgtcgataatcgatcgctcgccgctgatggtcgccgtctcctcgggcgggacatcaccggttctggcgcgcctgctgcgcgagaaactggagtcaattctgcccctgcatctcggccagctggcccgctatgccggccatctgcgcgcgcgggttaagcagcagtttgccaccgtaggcgagcgtcgccgcttctgggagaagctgtttgttaacgaccgtctggcgcagtcgctggctaatgacgatcggcaggcagtcgcggataccactgagcagttgctgacggagccgttggagcatcgcggcgaggtggtgctggttggcgccggccccggtgacgccgggctgctcacgctcaaaggcctgcagcagatccagcaggctgacgtggtggtctatgatcggctggtctccgatgacatcatgaatctggtgcgccgcgatgccgatcgggtgttcgtcggcaagcgctcaggctaccactgcgtcccgcaggaggagatcaaccagatcctgctgcgcgaagcgcaaaaaggaagacgcgtggtccggctgaaaggcggcgatccctttatctttggccgcggaggggaagagctggagacgctttgcgaggcgggcatccccttctccgttgtgcctggcattaccgccgcctccggctgctccgcttattcggggatccccttgacccaccgcgatttcgcccagggcgtccgcctggtcactggccacctgaaaaccggcggcgagctggactgggcgaacctggcggtggagaagcaaaccctggtgttctacatgggtctgaaccaggcgccggcgatccgcgagaagcttatcgctcacggcatggctgaagatatgcccgccgccatcgtcgagaacggcaccgctgtgacgcaaaaagtggtcagcggcaccttaggacaactggatattctggcgcagcagatggccagcccggcgctgatcatcgtcggccgcgtggtcggtctgcgggataaactgaactggttttcgaaccattaa

SEQ ID NO: 245018 - DNA, 585 bp, Klebsiella pneumoniae
atggcggtccggtcgcccagcagcgccacgtccgccgcccgggcggtacagaacaggatgatggccccgggcagcgcccagcaaaaagccaccgccagcagcggccaggtggcggcctgcaggctgcccgccagccagatcatcgccgtctgcacgtcgcgtacgtcggcggtggtcataaagatgccgaccgcggccgccaggctccaggagacgccgatgccaattaaaataaagcgcggccgcgaacagtcgcgggccagcgtcaggaccagcagggccaccgctatgccgccgaccatccccgccagcggccgccagaccaggcctaccgccgggaaaaacagcaccagcgccaggaccacgatgctggccccctctttgacgccgatcagccccgggtcggccagcccgttacgggtgatgctctgcatcgccgccccggccagccccagcatggccccgcacagcagcgccatcaggatccgcggcaggcggatatcaaacagaataaagcgcggctgctcgcccatctcctgcggcgccagcagggcccgcgccagcgtcgacgcgggcagcggatag

SEQ ID NO: 245019 - DNA, 291 bp, Klebsiella pneumoniae
atgcggcgggatcaccgcctgcgggtagccagcgtcggcgagggctttcatttttttcagcccctgctttgccgccagctgcgggttagacacccgatagcgatgccgggtggaagcctcattgccaaaggagagtccggcgtagtgatgggtcagcccgggcagaccgtcaaagttgacttcgcgggcggtcatgacgcctccccggccagaaagtcgagccccgggttcaggctggcgggcagcgtcagggtcggcgattcaaggctggccatcggccaggcgcaataa

SEQ ID NO: 245020 - DNA, 429 bp, Klebsiella pneumoniae
ttgcaggccgggacgtcgctgctaacgccggggattgtcgacatgagcgacgtggccaatgtcgaggatgaagaggtgtttggcccgctgcttggggtctggcgctacgacacgttcgaggaggcgattgccttagccaacgctacccgcttcggcctctcctgtgggttaatctctccggaacgggagaagttcgatcgactgctgctcgaggcgcgggcagggatagttaactggaacaaaccgctgaccggggcggcgagtaccgcgccgttcggcggcaccggggcgtccggtaaccatcgtccgggggcctggtatgccgccgattattgcgcctggccgatggccagccttgaatcgccgaccctgacgctgcccgccagcctgaacccggggctcgactttctggccggggaggcgtcatga

SEQ ID NO: 245021 - DNA, 252 bp, Klebsiella pneumoniae
atgatcgaagagcacgaccgaagcgccggtcgctttaacggcttccgcaatttcgactgccttaccttcaccaacaaaatacttcgggtgcggtgctttacggctaccggtaatcacctgcattgcttcgacaccggcggaagaggccagagtttcaaactcctggagatcttccatatctttgtcttgcgaaaaatagatgtgtaccagtaccgcctgctcaccggcgtcataacggtcaaacaagcgtaa

SEQ ID NO: 245022 - DNA, 447 bp, Klebsiella pneumoniae
  misc_feature (409)..(418): n is a, c, g, or t
gtgagcaatctgtcgctcgatttttccgacaacgcgtttcaacctctggccgctcgcatgcggccagaaaatttagcgcagtatattggccagcagcacctgctggcgccgggtaaacccctgccgcgggccattgaggccgggcacctgcattcgatgatcctctgggggccgccgggtaccggcaagaccactctggcggaagtgattgcccgctacgccagcgccgatgtcgaacggatctcagcggtaacctccggggtgaaagagattcgcgaggctattgagcgcgcgcggcaaaatcgcaacgccggccggcggaccatcctgtttgttgacgaagtgcatcgctttaataaaagccagcaggatgcctttctgccgcatattgaagacggcaccattactnnnnnnnnnnggcgcgaccaccgaaaacccctcctttga

SEQ ID NO: 245023 - DNA, 468 bp, Klebsiella pneumoniae
  misc_feature (449)..(458): n is a, c, g, or t
atgaacaaagaaacgattctgagccgtcagattttgacatatatgttgttgttaacgtttgttattattgccattgcaatactaggttcctacttattttatagtttcctgatttattacctgccgggtggaatgaacgaaggtagtgaagatgctatgacattccttgactggatgtggattctgatggcgtccattaccagtctggtcgttgcacttttctttaccgtaaagctgtctgcaagaatattcaacccactgaatgacgttgcatacagcctgaaacaaatctctcagggaaaccttagtgccagagcatttaacagcagttctaagttgggagagatgaataggctcgtcaatgactttaatgagatggctgaaaagttacagacgctggatgcgcagcgaaatttatggaatgctgcaattgctcatgaactccggannnnnnnnnnacgccggtga

SEQ ID NO: 245024 - DNA, 357 bp, Klebsiella pneumoniae
atgcgcgtctccatcgcccgcggcctggtcacccgaccaaagctgctgctgatggatgagcccttcggcgcgctggatgaaattacgcgtaacaaactcgacagcgacctgctgagtctctggcaggagcaaaacctgacggtagtgttcgtcacccactcgatccacgaagcggtgtttctctcccagcgggtgatcatgatggcggcccgtcccggacgggtggtcgaagatatcgccatccgcgagccgttcccgcgcagcgaggcgttccgcgtcagcccggccttttccctgtatgcccgtcagctgcaggacagtctgttgcaggccagccagtctggtatggagccataa

SEQ ID NO: 245025 - DNA, 816 bp, Klebsiella pneumoniae
atgtcgttttctacgaccgcggtacgctctgtcgccgtgcccggattgttgctattactcgccttagccgccgcgcttagcctgaccatcggcgccaaatcgttgccgatcggcacggtattcaccgccttcagcggaacctgtcaaagcgctgattgcactatcgtgctggacgcgcgcctgccgcgcactctggccggtctgctggccggcgtcgccctcggcctcgccggcgcgctgatgcagacgctcacccgcaacccgctggccggggtcgcccttgcggcggtactcgaggggctgtccaacggcatcgccctgctcaacccggacgtctacgatcagctacgcttctggcaggccggttcgctggatatccgcaccctgcaaacgctgaaaattgtcctgctgccggtagtggtggcggggatcgccgctctgctgctgagccgggcgctgaacagcctgagcctgggcaacgataccgccaccgccctcggcagccgcgtcgcccgcacccagctgatcggcctgatcgtcatcaccgtcctgtgcggcagcgccaccgccgtcgtcggccccatcgcctttatcggcctgatgatgccgcatatggcgcgctggctggtgggggccgatcatcgctggtcgctgccggtcaccctgctcgccaccccggccctgctgctgtttgccgacgtgattggccgcctgctggtgcccggcgaactgcgggtatcggtggtgagcgcctttctcggcgcgccggtgctgatctggctggtgcgccgccagccgcggggaggtggcctgtga

SEQ ID NO: 245026 - DNA, 1203 bp, Klebsiella pneumoniae
atgccgcgggcgctgagcggagaagaagtggaagggatgatcgcaaagtttggcgacggcgttcgtcgcgccattctcgccggtttcgacggggtcgaaattcacggcgccaacacctatctcattcagcagttctattcgccgaactccaaccagcgcgatgacgagtggggcggtagccgcgacaaccgcgcccgtttcccactggcggtgctggatattacccacaagatggcccgccagtacgccgacgatgcctttatcatcggctatcgcttctcgccggaggagatggaggtcccggggatccgctttgacgacaccatgtatctgctggaaaagctggccgcccgcggtgtcgattatctgcacttctcggtgggtgccaccctgcgtccgtctatcgtcgataccagcgatccgacgccgctgatcgagaaatactgcgcgatgcgctctgacaccctcgcccaggtgccggtgatgggcgtcggcggggtggtgaacgccgccgatgccgagcagggcctcgatcacggctatgacctgattgcggtaggccgcgcctgcatcgcctatccggactgggcgtcacgtatcgccgccggcgaagagctggagctgtttatcgacagcacccagcgtgaagcgctgcacattccggaaccgctatggcgtttctcgctggtggaagcgatgatccgcgacatgagcatgggcgacgccaaatttaaaccggggatgtttgttgagaccgtccacgatgacgccaatgagctggtgatcaacgtcagcctcgaaaatgaccatattgccgatatcgaactggcggcgagcccggtccagaccgtggaattcaccaccagcttcgaagagatccgcgaacgtattctcaccgccaataccccgcacgtcgatgccatttccggggccaccagccagagcgaggcggtgaaaaaagcggtcgccaaagcgatgctgaaatcaagtaaagcgctggcggcggaagagggcggcaatgacgccgcgccgaaaagctatgatgtggtggtagtcggcagcggcgcaggcccacgacgaaggggccagcgtgctgatcgtcgaaaaaatgccaaccatcggcgggaacaccatcaaggcttccgccgggatgaacgccgcggaaacccgctcccagcgcgtgaaaggtatcgaagacagtaa

SEQ ID NO: 245027 - DNA, 669 bp, Klebsiella pneumoniae
gtgctgcttccggactatgtcgccctgctgccggagctgaccaccagcatgccgcccagcatcgcggcgtcgaccggaatcgatgctctatgtcatctgctggagtgctttacctccaccgtcgccaacccggtgagcgataacgcggcgttaatcggtttacacaagctggtacgccatatcgagcgttcggtaaatcagccgcaggatctgacggcgaagctggagatgctctgggcctcgtggtacggcggcgcagcgatcaactatgccggcactcacctggtgcatgcgctctcctatccgcttggcggtacctggcacctgccgcacggggtggccaacgccattctgctggcgccctgcatgcgggtggtccgccctcacgcggtggcgaagttcgctcaagtctgggacctgatccccgatgcagatcgcacgctcagcgcggaagagaaatcccatgcgctggtcgcatggctggcggcgctggtcaaacgactgccgctgccggacaacctggccgcgctaggcgtgcctcaggagagtatttccgccctcagcgcagcggcgcaaaacgtcaaacgcctgatgaacaatgccccatgcagcgtcagccgcgaagagatcgcggccatctaccaaacgctgtatccagaacatgcctaa

SEQ ID NO: 245028 - DNA, 546 bp, Klebsiella pneumoniae
atgcagactcacctggctgccgaccagcgccccggcgcctatgccgatattaaagatgcccgagaacagagacatggcgacgtcggtggcatccggagcggaggccagcactttcacctgcatgccgagaccgataatcatgatcgccaccccccagaagatgctgagcagcatcaggtgctgcgggttatgcgaggccggcagcagcagcagcaggcaggcgagcagcagggcaatcgccaggcttatcagccccgacgcgtgctggttaccgagtttaccgaacagaatgctgccgataataccggccccgccaaggatcagcagcagtacggtggcaaagttgccgctcaggcccgctaccgtctggacaaagggctcgatatagctgtaggcggtataatgagcggtcaccaccaccacggtcagaatgtacacgctgaccagcgccgggcggcggaacagcacaggcaggcttttcagcgagccagaatgttcgctcggcagggtcggcagcagttttacgaggcaggccagggtggctaa

SEQ ID NO: 245029 - DNA, 180 bp, Klebsiella pneumoniae
atggccctaaaatcgtgtgttttgctgtcaacgagacgcaacaccacctgtaacacactagcgaactctaaaaacttagaccatcgtgtaaaccacgggatgccaagccagcgctacggacctaacagatcagaaaaacggaaccaacatttcttgacgcataacaccatgtacgcatag

SEQ ID NO: 245030 - DNA, 786 bp, Klebsiella pneumoniae
atggccgtgaataacgggcaggtcgaaattttagatctacccaaattggcacaaatcattgacggccagcaccgggttgctggtcttaaagcagcgattgaggatgatccatcagtagcagactaccaaatccctgtggcaatttacgaaaatctagataccgcacacagcgctcgaattttcatttccataaacactgagcagcgccctgctcctaagagcttagtattcgacctctatggtgtgactgcgtcagatctgatggatcctgcggcaatccgagctaacgatatagtctttcatctttgcgctgaaggacagccatataacagatggattaagttgccaaaccaagaacgacaacgtgggggtatcgcactttctaccgctgtaaacgctatcaaacctctggtcgattcgaagggacagcttgaacaaatcggtgccacagaactggaaatccaaaagataatattttctaactacttctcagcaattatgtataaatatgatcataaatgggacgatagggcgaacgcttttatctacgcatcaggcttcattggcgcaattgatttctttagaagccacatgtttgactattgcaaaagtcaatcatcgtttgaaacatcaacaatagtggacgcactttccatggatgagacaagcctcattatgcaggaagatgtaaaaggccttgggggttccgaagcagcaaatgcagtaagggatcgactcattagttcgtttaagccaataagctcttctcagggcttcaaactctag

SEQ ID NO: 245031 - DNA, 723 bp, Klebsiella pneumoniae
atgtcagatgctgccagattagcaagccaatccttctctaataaaccttcaggagtttcctacgaccatttcactcctagcaatgccgatatttctgctataagttcaactattgatgatgctttagtaggatcagcatatgcagcagctttatcttatgccgaagccatctcaggactacagaagggctcaatatcttggtcaatcgtgagactttattattcgtgcttctacagcctgcgtgcaatgctcatcttaaatcgagttatccccttcaactgcagcggagaaatgctattagatattcaaagtagtaagtttttaaagggtggtaaatcaagccaccattggaactgggttactctcagaaagataccttgtatgaataaaagctggtttttatcctcagactctcaggaagcttatgaaagcctcagaaagcacagggaaaatgtcaattatacacatggctttactgacccagatttccatcgctgcttaatatctggagaatcagatctcggaaagcgtttcaggacatatcgggatgacgacaagtttatatatacatatcttgcagaccaccttgcaattgcctatccaacaatgctcatacatgatttagacaagtcaatgcgtaaagcgtcggtcactttacctacagaaaatattgatcacctaaagaggatatggtccattaaagacaagtgcccgctttgctga

SEQ ID NO: 245032 - DNA, 435 bp, Klebsiella pneumoniae
atgtccaggactccctatacacggttacgcattgagggcttccgcaaagcagaggcttccctgagacttgaaggaatggaccccagtggtacgccactgtacgagtccattaaggcacgtattatttcaggtgagcttacgtatgagctggggcgttcagagattcttgcatactacacaaaagcagataccgccgggcctgtgacagtgggagaaatgttggcagaggaatttttgaaaccgctgaacatgtctaatgatgctttaggagaagctatggggatttctcggccggatgttgaagatatcatctgcggcatgcgtcgtcttagcgataatgaagcccgcgttcttgctgagatatttgggacagacgatgacttctggagcaatcttgagacgttgcaagacggtaaggaacatcgacgaaaataa

SEQ ID NO: 245033 - DNA, 1770 bp, Klebsiella pneumoniae
atgagtgaagagtggattctccagacaaaggaaacccgcagggtattttctaatgcggcgtgggttcctttgagagcgttagttgagagcaagaaaggggatctaaaagaagtgggctatgccagtgaatatttcggctgtggctctgttgcattcccgtcagagcatcgccagctagttgaggaacgtcttggatggagcgacataggcattggccacacagtcgcgccttatgcatacgaagatggatattatgcgtccattgaccaatatcaatacaacgataaagagccaataggtgtcaatctagtttatgaacacccgcaacctgttgttggtggtcgaaaatggatactgagccctgatttggtagtcgcgctgcacttggtcaaagagggggacaactgggtcagacccgaagaaaatttcgttgtggtagctcgcgagacagtgagtgaagatggcgagcatcgtcagatagaaataaaaagagaatttttactcgactatctagcggccagaaatctgtcgctccgcctttcatactaccgacagagggtagaaaacgtccccgtatttgaggacagcgtatattcaaatttgcagcctcatagtgaggaaagagataacggtaaattcaccctaatcatacgcaagcttgatgacgtctttggggggagctgggcgatgtttcgagcctggagaacagacgttgatgagggcgaagacgcccctgtgatgggccctgagaatgactcgaacactgactatgaaagttcaaaggggcatcgcggaggctataaaggtgtacgggtagaaggggagttttggcgtgaggaatggatagaccaccaatcaaaaagcctacgcgttcgtggagatgcagatccgaacctcccgcaattcatcgtggaaaccgatggaacgcgaatgagatcagcagagcttgataacgaggacataggccgctggctatggtttcgggccagcgtagtaaatgagcttctcaatagtcgaggatttaagttggcgtggtacacggctgaaactggagctattaattccacatcaggatataaaacgcatttcgggataaacagttcggatcttatcaccgtatatgcttatgacatcgcacgactcgccccatgggagcagcatgtttgggcggggcataatgtagctcctgaaggaagggtttcaagtgagctgctggacgcgcaggtgagggcgaaaccggcatccacatatgcggttgaagaaatgttttttggaagcatgaggcttttggaagacggcttcaggcataaatacgaaatatcgctgttcacccatgatattgatgactccgaagtagggcagcaaatatctaggtttgcaagcaaagacagagcgaccctactcagattagccaaggacatcattcgcgtattctcggacaggctcaacgtaaccgagctacgcaagctttctacacaccaagataaagccaagctcggctcaaacaagttactccaaagtattttggctgagaaaattggagacgacaaagccaagagagtatttgctgagattgccggtgtttatgatatgcgagtgggagatgcacaccctacaggttcaaagataacagacgcgatcaagctcgcgggcgtcgatgaagaagactcgccattgcggcagggagagcaactcattcacaacgttgggcgatcgatttggcacatagggaaattcttgttcggcgagactgatgagtcggacgagtag

SEQ ID NO: 245034 - DNA, 240 bp, Klebsiella pneumoniae
atggtgttttctagaaaaaacctgactatgctgaccgataccaagctgcgtaacatcaagtcgaaagacaagctctacaaagtgaacgaccgtgacggcctctatgaaaccatcgcgcctgcgggtcgatttcattccgctataactactcgatccacggcaggcaggagactatcaagcgaaggccattgcttaatctcagcatgctgtcatgaattaaggaaattcgaccatgagtga

SEQ ID NO: 245035 - DNA, 267 bp, Klebsiella pneumoniae
atgtctcaaaaaaaagtgcaaaaagaagaagaaaaaccaaccgctgggccacttcgtaaacacagatctagagctgaaaaaatagacgatttaaaaaagcagattagcgaactaagaaaagcagaaagagaagaacgacaacgagcaagagacgaaaaattaattattcttgcaaaagctgtttatgaaaaggcaggaaaaccaaaagatattgaagcattaattgagtttgtaaagtctgaagatttcaagattgaatataaataa

SEQ ID NO: 245036 - DNA, 861 bp, Klebsiella pneumoniae
atgatattacaaaaagaatatagcagaagtgattttataaatcaaattatatccaagcctttttgcactgatgattttaatcgtgatggtatttatagagcaacaaaaagacaggctttaaccaagatttacattgaacataataacgatagtttcattaactcaatcgtgtttgatatagatacagaaacagcggcgattgcgtggcaagatgcaaacataccgatgccaaactttataactcaaaacccaacgaacggacatgcacatctattttatgctttaaatagtcctgtttgcataactgacaatgctagtaaaaaaccgcaagttctattaaagggcgttgtagaaggtttaacagctcgtttaaatgcagattcatgttatacaggcaagataacaaagaaccctttaaattctcattggaggacgttttggaataacacagaacgatatgaattaaactatcttcgtgagttcgttgatgaaggtaaaagactaactaaaaaagtattagtaagaacatcagaaaaagaaggaagaaatacaaccttatttgataatcttcgattctttgcttacagcgtgatttttaaataccaaaaagcaaatgatttttgcggttttttatcagcattagaacaagaagcagacgttataaacaatgagtttaaaccaagactaaatcacaaagaaatacagcacacaataaaaagcatttctgagtgggtttggaacaagtttgattatgaaactttcagtgacatacaaaaagcaagaagagccaaaagaacgacaaaacaaaagcaaatagaaatcgatcttttatctcaagcattaatgattaatgaggagtag

SEQ ID NO: 245037 - DNA, 567 bp, Klebsiella pneumoniae
atgcagaacctatcacgtaaaaaatggaggacaaaagaggggcaagaacaacgcaaacgtgaccaagctatcagagatagagcgaagcaagatgcaagggctgtcagagtgttgagaggtgttgcagttgttgatgttgcttcattcacagttcatccattgcagaaaaaagagcagtcaaaaaataatgatttttcagttaaaaattcgtggtggcgttctacggttaattttataaaaaatattaaagccaagttctcaactaaaaaagatattaaacccgttcaagaaaaagaacctgatttaatgattgatccggtcactggtttaccgattaccacgcaaaaatggcaggagatgagtgacagggcaaacgtaaggactccacaagcggagatttcgtacaaggtaaggcaatcggacggggaagagctaaaaacgcctcagaatgcgttacaggacgttttagaggcatcgggcggtaaatctatcaaagtgaagtccgtgccggttccgggttcgcgtaggcgtcgagtgatagacaaagacagcagtgacaacggttaa

SEQ ID NO: 245038 - DNA, 1152 bp, Klebsiella pneumoniae
ttgcgtaacgacggcggcgagcgcgatctggcgacggagattaaccgcccggcggataactttatcgccaatccaacccctgccgacgaagtggcctttttccagctctccggcggcagcaccgggacgccgaagcttatcccacgcacccataacgattacgactacagtatccgccgcagcaacgagatctgcgggattaacgctgaaacgcgctacctcaacgcgctgccggcggcgcataactatgcgatgagttccccgggttcgctcggtgtcttcctcgccggcgggcgggtgatcctcgccgctgacccgagcgccacgctctgtttcccgctgatcgaaaaacatcagattaacgtcgcgtcgctggtgccgccggcggtcagcctgtggctgcaggcgattcacgaatggggcagcaacgcccagctgcaatcgctgcagctgctgcaggtcggcggcgcgcgcctgtcagcgaccctcgccgcgcgcattccggcggaaatcggctgccagctgcagcaggtgttcggcatggcggaggggctggtaaattacacccgccttaacgatagcccggagcggatcatcaatacccagggctgtccgatgtgcccggacgatgaagtgtgggtagcggatgccgacggcaacccgctgccgcgcggcgaagtgggccgtctgatgacccgcggcccttataccttccgcggctattacaacagtccgcaacataacgctgaagcctttgatgccgatggattttactgctccggtgatctgatttcgatcgatgaagatggctatatcaccgtccagggccgggaaaaagatcagatcaaccgcggcggcgagaagatcgccgctgaagagatcgaaaacctgctgctgcgccatgaggcggtgatccacgccgcgctggtcagcatcgaagacaatctgctgggcgagaaaagctgcgcttatctggtggtgacctcgccgctgcgcgccgtcgccgtgcgccgcttcctgcgcgagcagggggtggcggaatttaaactgccggaccgcgtggagtgcgttgccgcgctgccgctgacgccggtgggcaaagtcgataaaaaacaattacgtcagtggctggccgaaggcaagctgggctga

SEQ ID NO: 245039 - DNA, 969 bp, Klebsiella pneumoniae
atgcacagccacgatcttatttcggtctcggtcggggaaatacgccccaacggacagggaaatctatcattaatattgcaggcggcggccggggaaatattaccggcctactccgccggggcgcatatcgatattattattcccggcgtcggtccgcggcagtattccctgtgcggcacgcctgaccgcagtaatacttatgaaatttgcgtcaggctgactgacacctccaccggcggctcacgctatttgcaccagcagctcaaagccggcgatcggctcgccatttcgccgccgcgcaaccattttcccctgccgcaggccgggcgctacctgctgtttgccggcggtatcggcatcacgcctttgctggcgatggctgaagcgattgccgccagaaagggggcgctggagctgcattattatgtcgccagttcgcgccagaccgccttctccccgcgcctgaaccagctgactgcgaacggcacggtggccattcactgcagcgaggaaggcgcgtcgcttcgccagcgggtccccgaatgcttaactgtgccccaccctgataccgcagtaatagcctgcggcccggagggttttattcagagactgcggtcggtcatggaggaatatcgctggtcgccgtcgcagttcgtattcgagcgttttactcccgcggcggaaaataatactgcggcgaaaaatgcgttttatattgagctggcctccagcgggcagcgcctgcaggtggccgcggatcaaaccattgctcaggtattacagcacgccggggtggaggtaatgctctcctgcgaacagggaatgtgcggctcctgtattaccggggtcctcgacgggatccccgagcaccgggacagcgtgctgacggcggaagagaaagctggcaacgaccagatcacgctctgctgttcgcgggcgaaatcgccgggtctggttttggatctgtga

SEQ ID NO: 245040 - DNA, 438 bp, Klebsiella pneumoniae
atggatgagctggcggagctgcggcttggcctgcgcagtcacctgcaggataccccgaacgacctcgccggctggcagctgcttgggcggctgggcctgttgttaaacgatggcgagacggcgatcggcgcctttggccgggcgcatgctctggcggcggacgacccggcggcggctttcgattacgccagcgcgctggtgcgggcgggagatagcggtcaggttcggatgggcgagctgctgctgcgtgacctgcatcagcggcagccgaacagcctgccggtgctggagatgctggccctgagcgcggtgcgcaatgaagattaccccgaggccgtggcggccctgcaggcgttgctggcccggctaccggaaggggatgcgcggcgcgaggcgatcgtccgccagctggcgcaagcgcagcagcaggcgcagtaa

SEQ ID NO: 245041 - DNA, 426 bp, Klebsiella pneumoniae
atgcgcgcgcagaatacgtccgcccaggcgcctgagacggcagcggcgccgacggatgtcgatccgcgcagcgtgcggctgatcacggccctggtatttgccgcgaaaagcgacggtcatattgatgaccacgagcgggcgaatattgaaactcagctgcgggcggccaatattgacgttcaggcccgggtgctaattgaccaggcgctggcccagccgctggatccgcagcgtctcgccgagggcatcatcgacccgcaggaggcgctggagatctactacgtcagctgcgcggtgattgatatcgaccattttatggagcgtagctaccttaatgcgctgggagacgccctggcgctgccgaaagatgtccgggccgatatagaacaggatatccagtcacaaaaacaagcgctaagcgtctaa

SEQ ID NO: 245042 - DNA, 522 bp, Klebsiella pneumoniae
atgcatctggcgccaacctccagcaccgtcaatacgctgatgctgggcgacgcgttggcgatggcggtgatgcaggcgcgcggtttcaatgaagaggatttcgcccgttcccacccggcgggcgccctcggcgcgcggctgctgaacaaagtgcatcacctgatgcgtcgtgatgaagaagtgccgcgggtcaataccgaggccaatgtcatggacgctatgctcgaactaagccgaaccggactcggcctggtggcggtctgcgatgaagccaaccgcgtgcagggcgttttcaccgacggcgacctgcgccgctggctggttgctggcggtacgctcaacgatggcgtcactcgggcgatgacccgcaacggcgtaacgctgcaggcggatagccgcgcggtggaagccaaagagcggctgatgaaacacaaaatcagcgccgcgccggtagtggatgagaacggccaactggtcggcgccattaacctgcagaacttttaccaggctgggatcctttaa

SEQ ID NO: 245043 - DNA, 186 bp, Klebsiella pneumoniae
atgacttccgccggcagcgcggcggggatcgacctttgtctgcatctggtgcgcgaagatttcggcagcgaagccgccaacgtcgtcgcccgccgcctggtcgtctcaccccatcgcgacggcggtcaggcgcagcaggtcctgcgcccggtagcccgcagccgggagagcctgcgcctcggttag

SEQ ID NO: 245044 - DNA, 294 bp, Klebsiella pneumoniae
atggactatcccgatattgttcagtgggtaacggaccataaaggagggtttgaaaaaccaatttataaaacagccttatcgcacgcgcagcaaatctggtttgagggtgagtttgaagtgggtcttcagttactctcgttccctgaagtccagcaggctgttgccacctactgggaccgcgcattaacaaaatacgattatagtcttcaggcgaagtatcataaccggatggcagttgaggagatcttcaaacagttacaagtacaacggcagcgagaatcgagcgcaatgtaa

SEQ ID NO: 245045 - DNA, 366 bp, Klebsiella pneumoniae
atgttcagcggcagccatcggcaatcgctgcgcgaactgcagcaggaaaacgccgatatcgccgccatcgactgcgtgacctacgctctgctgcagcgccatcagccgcaggctctggctggcctggtggcgatcggctggagcccggccgcgccagggctgccgctgatcaccgccggcgccaccccggcggcaacgctgaatagcctgcgcgaggcgctccagcagctggtaagcgatgatcgctatcgttccctgtgcgacgccttgctgatctgcggctatagcgatatgtcgcgggaggcctatgcgccgctgctggcgtggcgggatgaggccgcggcgctgggggtcagccagctatag

SEQ ID NO: 245046 - DNA, 138 bp, Klebsiella pneumoniae
atggctgcaaatatcgtttctcccgcgcagagcgggcggttctattatggctgcgccggcgccgccgggctgctggcgggcctggcgatcgtattctggtttccagccctggccagctggtggcctacgccaccctaa

SEQ ID NO: 245047 - DNA, 1164 bp, Klebsiella pneumoniae
atgagctatcgtatgtttgattatctggtgccaaacgttaacttttttggccccaacgccatttccgtagtcggcgaacgctgccagctgctgggggggaaaaaagccctgctggtcaccgacaaaggcctgcgggcaattaaagatggcgcggtggacaaaaccctgcattatctgcgggaggccgggatcgaggtggcgatctttgacggcgtcgagccgaacccgaaagacaccaacgtgcgtgatggcctcgccgtgtttcgccgcgaacagtgcgacatcatcgtcaccgtgggcggcggcagcccgcacgactgcggcaaaggcatcggtattgcagccacccatgagggcgatctgtaccagtatgccggcatcgagaccctgaccaacccgctgccgcccatcgtcgccgtcaacaccaccgccggcaccgccagcgaggtcacccgccactgcgtcctgaccaacaccgaaaccaaagtgaagtttgtgatcgtcagctggcgcaacctgccgtcggtctccattaacgatccgctgctgatgatcggtaaaccggccgccctgaccgcggcgaccgggatggatgccctgacccacgccgtagaggcctatatctccaaagacgctaacccggtgacggacgccgccgccatgcaggcgatccgcctcatcgcccgcaacctgcgccaggccgtggccctcggcagcaatctgcaggcgcgggaaaacatggcctatgcttctctgctggccgggatggctttcaataacgccaacctcggctacgtgcacgccatggcgcaccagctgggcggtctgtacgacatgccgcacggcgtggccaacgctgtcctgctgccgcatgtggcccgctacaacctgatcgccaacccggagaaattcgccgatatcgctgaactgatgggcgaaaatatcaccggactgtccactctcgacgcggcggaaaaagccatcgccgctatcacgcgtctgtcgatggatatcggtattccgcagcatctgcgcgatctgggagtaaaagaggccgacttcccctacatggcggagatggctctgaaagacggcaatgcgttctcgaacccgcgtaaaggcaacgagcaggagattgccgcgattttccgccaggcattctga

SEQ ID NO: 245048 - DNA, 1032 bp, Klebsiella pneumoniae
atgaacgaaaaagatgtagcaagaaaaatcccattagcacaacgtctttcgatggacgcttatacaagtagctactttaaagagatctataaatatatatcaattttatacgataattgtttgtttaataataacggcactcataatctgctatttgttgacacaacaaaaatagagaaagctttacgttttgctgatattctatctcattcacatgttgaagctcatcgaacaaaatcatttgaaatcataagtaaaatagctgcatttcattcagatgatccttattttaaaatgataggttcagcggtcataaatcgtttaggtatatttgccgcagataatttaatctcacaaggagtacatttaccgttagaccgagaaatagaatcatccataaaaaaatcattccaaagaactactatagatggattattttttacagacaaacaatatgaactttatcaatccctaattacctcaaacactttaagctttgccggccctacgtcaatggggaaatcgtttgtcataaatgaatatataaaacatattgtttttggtaatgctaaaaaaaatatagtgctcatagtcccaactagagcattaattagccaaagtacattaaaattaaaaaatgaactaagagatgaaattgatggcaatcagtataagatagtaacaacatcttacatgctcagaggaggtattgatcatagtaaagggtatgttttcgtattgactccagagagattagttagtttaattagtacatgtcctgatataattattgattatatttttgtcgatgaagcacaaaaacttactattaaaaatgatacacgaagtctcgtaacctattccgcgatcgaacaaacattaaatttaaatccaaacgcaaaactatttttctcatcaccaaatttatccaaccctgaagtatttaatgatttatttaatcgggaccatgctaaagtttatcgcagcatagaaggcgctacagctcagacttatactttattgatttattaa

SEQ ID NO: 245049 - DNA, 159 bp, Klebsiella pneumoniae
atggacgatttttactcaagagagtttactctagctgatatgccctttctgatgcatgaattcgagaatggcatccgttttggtctcttctcaaatgatgtttggtgtcaactgttcactgagaatgatgatatagtgcttcttaaaaaattcgattaa

SEQ ID NO: 245050 - DNA, 726 bp, Klebsiella pneumoniae
atgaaatttgagattcctaccactgtcttgcttacaacttatttcactgcctgtgggtttgcatatatatgggggttttggtatagaactgaaattgatatttctataattttgcaactattgacagtttctgagatagttaaagccgctgcattagcattcataatttttttaggtgcagcatttgcaacaatcttaggtagtgtaatgacatatactgattataagaaaaacacctttaaagaggtttctgataacccaagtgcatatgcatttacaccatttttcattgtctcacccgtcttgatttttattttaggaatgttttatatgaattgggcatttaaagttaatgaccaattctacattgccagtagctcgggattcgctggggctgcaatattattttcagcggtactgtataaaaaatatattcttagtaatatcaatgccttaatcaggtttttcgtgctcgcactgttcttttttacaccaccgacattatttcttataggtggaaaatcatacctacaaagttcaaaccaatccaatcctctctacgtcataaataaagaaaaatgttcacctaataaggatgaaaaatttaaattgttagctatatatggttcgaaaggcattgccatctctaacattaatggaagtgtttgtatttttagtgacagtgaacagagctattctcaattgaaaaatgcgccaaaatcatga

SEQ ID NO: 245051 - DNA, 1719 bp, Klebsiella pneumoniae
atgccgataacgaaaattttagataattttttaatatcagacgacaaggttgctgtacttaagggcgagtggggagttggtaaaacacatttttggaagcgatattactccaaaaagaacaaggcaaaaggaatccaacaaatagcgtacgcctacgtttccttgttcggcgtaaactctattaatgagataaaaaaagaaatttatcagaacactgttccaataaatgagattttgtatagggaaactgtttacagcaaaagcgagattttagctgggaaattattatcaagcctccctaggcttcttaaatataataagataacaaaattattgttcaaatacataggctttgattttaacttttacggcatcaaatcctctgatttgagttcttctttggaatattcatttgtaaaccgatatcttatttgttttgatgatcttgaaaggagaggtaaatctcttgatcttaaagatttcatgggttttatcgacaatctggctagagataaacactgtaagttaatattgattttcaatgaaaacaatttaaaagataacgatgaagaacggttattcaatgaatatagagaaaaggttgttgatgttgatataatgtataatcctggtgtggctgataatgttaaacgagtctttcactctaatgatcagaatttcagtcatattttgtcagccgcaagtgaattacaaatcaaaaatatcaggattctcaataaaataaagaaaatattatatacatacgatcatttgttgaatttttcacgtaaagaagtaagaagagaatttgtttatagagtgattcttttagcatacgttttttactctggggttaaagatgtgttatatagagattttttcaaccgaattcagagcagagctatgattgatagctactctaagaaagatgaaaattcctctgccgttaaggatttcatatctaaactacacctagaatttgtcagcgcagaaaatttattcgactacgatattgatttttttcttaaaaatggatttattccattcaactcaacagttgaggatggaataaagtctagaaatagcgattttgatgatattgaattaaacggtaaaattgaacagatatggagtatcttcagggattcatttgcgttgaaccaggattacgttattcagaaattaaaagagttgttagatgaaaacttaccaagaattccattagggagaatagataacatttttttattattggataatttaggggttaactgtgataactacgcgaatagatatgttgatgaacttgtaaaaaataacaaactaatatcagaatatcaaaggttagctaatacttttatcgaacatagaactctaaatgagttaataaaaaaagtgttaatggctagtaagaaaaaagaatttggacttgatgagttacttactagactttcaaacagtaataattacacatcaatgcacattgaaacattgaactcttatagtgaagatgattattttgattggatattgacctgtgaggacgatgttgttcataaaattagaaatggccttctgaaatttgacaaccatgtaagccctctacctatgcaagaagaaattacacgaaaagcaatggctgctattaggcgtgtcgcttcaacctcggagttaaacatgatgagagttgaacgcattttaaagatatctgttcggtag

SEQ ID NO: 245052 - DNA, 1062 bp, Klebsiella pneumoniae
atgcgaccaacaatgatgacatatatcagtgaagagccagcctgcctggcgcagatcctgcgcgactaccggcaaaagctggcgccgattgaaaccttcgtccgccagcacccggtacggcggatattattgctcgcgaccggatcgtcgctgaatgccgcgctgtgcgcgcgctatttctttgagcaacgcttcggtgtgctgcttgacattaaagagccgtacaacttcacccattacgacgcgatcgacccgcatgccgatctggtggtggcgatttcacagagtggaaaaagcgcgtcgacgctggaggcgatgcgtaaggtacaggcttccggcaagtcggttttcgccctgacctcagatccgcaaagcccgataggatgcgccagcgatggcgttctggatattaataccgggatcgagagcgtagggtttgtgacccgcggctttagcgcgacggtgctcaacctgttgctgatagcgctgatcattgctcgtaagcaggagaaagccagcgaggttgaggagcagcactatctcgctgaattgcagcggctggtagcggcgatcccggaggttatcgtccgtacctcgcgctttattgaccgccatagcgaaacgctgcgcagcggcgagcgctttgtcgccaccggctacggcgcgctggttggcgtggcgaaggagttcgaaaccaaatttaccgagacggtgcgcgtgccttccagcggctttgagctggaagcctatatgcatggcccctatctggaagccaatgcccgccatgtgatgctgtttattgaagatacgccggacgcgcgaacccgggcgctgcgcgactatctggcgccgtccattggccgggcctttaccctgacgctgggtgacgatgaggatgctcaaacgctggcgctaaactgtccgtgcgagcatcacctggcgcctctgctgctgattgtcccagtgcagatgctcgcctggcataccgcaggactgaaaggcatcgatctggctaaacgtattttcgacgattttgaccgcgtcttaaaaagtaaaatctga

SEQ ID NO: 245053 - DNA, 1338 bp, Klebsiella pneumoniae
atgttaaacagtattttagtaatactctgtctgatagccgtcagtgcgtttttttcgatatcggaaatttcactggctgcctcacgtaaaatcaaactgaaactgctggccgatgaaggcaacgtcaacgcacagcgggtgctgaagatgcaggagaacccgggcaccttctttaccgtcgtgcagattggcctcaacgccgtcgccattcttggcggtattgtgggcgacgcggctttctcaccggcgtttcatagcctgctcagcgggtatttgtcgccggagctctccgagcagctgagcttcatcatctcttttaccctggtcaccagcttgttcatcctgtttgctgacctgactccgaaacgcatcggtatgattgcgcccgaaacagtggccctgcgcatcatcaacccgatgcgcttctgcctgttagtcttccgcccgctggtgtggttgtttaacggcatggccaacatgatcttccgcatcttcaaactgccgatggtgcggaaagacgatatcacttccgatgatatctatgccgtggtcgaggccggcgcgctggccggggtgctgcgcaagcaggagcatgagctaattgagaacgtgttcgagctggagtcccgcaccgttccttcctccatgaccccgcgtgaaagcgtcatttggtttgatttgcacgaagacgagcagagcctgaagaataaagtggccgaacatccgcactcgaagttcctcgtctgtaatgaagatatcgaccacattatcggttacgtcgattcaaaagatctgctgaaccgcgtgctggcgaaccagagcctggtgctgaccggcggcgtacagatccgcaacacgttgatcgtgccggacaccctgaccctgtcggaagcgctggaaagcttcaaaaccgccggggaagacttcgcggtgatcatgaatgaatacgcgctggtggtcgggatcatcactctcaacgacgtgatgaccaccctgatgggcgacctcgtcggccaggggctggaagagcagatcgtcgcccgcgatgaaaactcgtggctgatcgatggcggtacgccgattgatgacgtgatgcgcgtgctggatatcgacgagttcccgcagtccgggaattacgagaccatcggcggctttatgatgtttatgctgcgtaaaatccccaaacgcaccgacgcggtgaagttctccggctataagtttgaggtcgtggatatcgataactaccgtatcgaccagctgctggtgacccgcatcgataacaagccaacggtgctggtgccgaagcaggcggaaacggcggaaagccagaacgcctga

SEQ ID NO: 245054 - DNA, 132 bp, Klebsiella pneumoniae
atgcagaacagcggcattatggcgttagcgctcgcgctgtgcaaggtagaagacggaagaagggttaaagtgccagctatgacaggaagccaactgaaagccttgcttgattacatacgcgcgttgaagtga

SEQ ID NO: 245055 - DNA, 1065 bp, Klebsiella pneumoniae
atgatgaaaaatatcactatccaaaatcgtctgttttcacctttagacattaccctccctcgccatggaatgtttcgtcaaacagaggatgataactgggaaattaatctctatatgctgtttaaaaaactaccaaagccacgaggttcgaggaccaattggtataaaaccagtcaaaatatggttcaaaaactacccagagattttttcggaagagaaattcgtgagattggcgctgttctccatgatcaaattgataagaacacatggatttcggcacgttcagcacttgttttacttacttatggctccctaaatcacaaacatctggaagttactcaatgggttgaacgatacacaggtgtgcagcttcctcgtaataagggtctgagccgaagagaagtggtttttggtcgcaaactgagtgaattcattgataaagaactcgtagacatcacctatggagactatgagctgaaaactcagcagcgaatgtgcaatgggaagtactacgtcgattttgcagttaagcattactggaacggtaacgaagatagctcaaaatattacctttatctcattgaatttgacgaagaagagcacgcattagctccaaatcaggcagcggattcaatcagggactctgagatcaagagtcaagaaccacaagctaccatcatcagggtaaaacatgatgagagtgaggattggtttgaactagtacgtaacaccaatcggctaattagcttcgaagcagctcttttatcagggatttctgctgcaagctgtggtgttattggcaacagcattgtcattgattcaaagtccgccaagaatgcttatgatgacctcaaaaaccagagtgcttggttgctaaactatgagaaacagccgttgaggggaatcgaggaagcggtaaaactatgtggcattcgctatgaaaaagcacgttcaaagacaagcagacaattgagagtatctctggagtcgttaagcaattcactataccgttggttacctgatagcgccgccgaatacgtactacaaaaccttaaaccagactga

SEQ ID NO: 245056 - DNA, 3132 bp, Klebsiella pneumoniae
atgaatgaaacagaattagaaaaactctgcctagactggtttgccgaacaaggctgggaaattcatcatgggccggatattgcccctgatggtagcaacccgcaacgtgctagctaccatgatgtattcctgacgccagtgttaacctcctgcctacaaaagatcaacccgcatctgcccgctgacatatttgaacaggttatttcccgtattactcgcgcagaaagtcctgatctgattgccagtaacaaagttttccatcactggctgctggaaggggttccggtacagtaccgtcgtgacgaagaacttatccacgaccacgccctgctggtggattttaaccagccgcaaaacaaccgttttatggtggtcaatcaaatgaccatcagcgggacgaaacagccgcgtcgtccggatatcatctgctttattaacggactgccgctggcggtggtggagctgaaaagccccatcgacgacaaagtagatatctgggatgcctaccaccagttacagacctataaagatgaaatccgcgatctgtttatcagcaatgaagcgctgattgtcagcgatggctatatggcgcgagtgggttccctgacagccacggaagaacgctttatgccgtggaaaaccatcagcaatgaaaatgataagccgttactggaatggcaactggaaactatggtccgggggttctttaaccgggaactgctgctcgactatatccgttacttcgttttgttcgagaacaacgatgaaaggctgataaaaaaaatagccggttatcaccagttccacgcggtacgtgaggccgtgcaggcgacaattgtcgctgctaccggtaagcaactggccctgcacagcaacattcagcctggcagtaagaaagcaggtgtggtctggcatacacagggttccggtaaaagtatctctatgtgctgctacgtcggcaaactgctgcaacagccggaaatgggcaatccgacaatcgtggtcgtgaccgatcgtaacgacctggacggtcagctttacggtacgttttgtcaagcgcaggaactgctcaaacagatgccggtgcaggcagatgatcgcgaagcactgcgtgaactgcttgcaacccgcgatgcaggcggcattatctttaccaccgtgcagaagttttccccggaggagggggaaaatgcccatccagttctcaatgggcgcagcaatatcgttgttatttccgatgaagcgcaccgcagccagtatggcatgaaagccaatctggaccgggaaaccggcgtctataaatacggttacgctaaacatatgcgcgacgcgctgcccaacgcctcgtttctcgggtttaccggaacaccggtttcggcagatgatcgcgatacccgcgctgtatttggtgattatgtctcgatttacgatattcaggatgcggtggacgatggcgctacggtgcctattcactacgaatcccggctggcaaaactcgatctcaatcatgaagaactggcggcactctccgatcaagttgatgagctgattgaagatgatgaactggacctgcgtgaaaaaaccaaaggtgaatggagccgtctggagaaactggttggtgctaaacctcgtctccaacaggttgccgccgatctgatcgctcacttcgagaagcgcaataccgtgatggatggcaaagcaatgattgtcgccatgagtcgcgaaatctgcgtccatctttacaatgaaattatcgcgctgcgtccggagtggcacgatgacgatcctgaaaaagggcaaatcaaaatcgtgatgaccggtacggcatccgataaggcgatgctgcaaccgcatatctacaataagcgaaccaaaaagcggctagagtctcgttttaagaatgtgaacgatccgctgaagctggtgattgtgcgcgatatgtggctgaccggctttgacgccccctgctgccatactatgtatattgacaagccgatgcgtggtcataatctgatgcaggccattgctcgcgtcaaccgcgtattcaaagacaagccgggcgggttagtggtggattacatcgggatcgccaatgaactgaaactggcgctgaaaaactataccgaagcaaacggtaaaggcaatgcgaccgtcaacgctgaagaagcgctggcaatcatgctggaaaagttagacattatccacggtatgtttgccaaaacagcaacgtcagcgggttttgattataccggctttgaggctcacgcgcagaagctgttggtgccggttgcaaactacgtgctcggtcttgaagatggtaagaagcgttttctcgataacgtactggcaattactaaagcctggtcgctctgctgtacgcttgatgcggcacagccttttaagctggagattgctttcttgtcagcggtaaaagccgctatcagcaaattcaccagcgtggacaaaaaaataagccaagccgataagaactccgcgctgaaacagatactggataatgccgttattgctaacggtgtggatgatattttcacgctggccgggctggataaacctaatattggcttactttctgatgagtttctgcaggaagttcacgatatgccatatcgcaacttggcggtagagctgctggaaaaactgattaatgacggcattcagtcccggacaaaaaacaacgtggtacaggagaagaagtattcggaacgtcttcaggctgtattgattaaatataacaaccgggcgattgagacggcgcaggtgattgaagaactgatccagatggcgaaggattttcagtctgcaatgaagcgtgatgatgcgctaggtctgaatcctgatgagattgccttctacgacgcactagcggaaaatgagagtgctgtcaaggaactaggagatgagatgcttaaaaagctggcgagagaagtaactctgaagctgcgtcaatccacaaccgttgactggcaggtgcgtgaaagtgtacgagcaaggttacgtatcttggttcgccagactctgcgtcggtataaatatccccccgataaaacgccgggggcggtggagttaatattaaagcaagcggaagttatttcgaatcactggacgatgtga

SEQ ID NO: 245057 - DNA, 1017 bp, Klebsiella pneumoniae
atggactatttagataaactctttagagaataccttaacgaagatggtattgtatatatcgctggttctgagttttatagggatgaaatattaacaactctagatcaatcaggatatggcgaggcatttattgaatggtgtagccagcgaaaatctgataatttaaaaaaagccaatgatatactggctgaatatgatttattcgaccgctttcttaaaataaaagaaattcattcaaaagggatgttaatcccttttattggcgccgggttgtcaattcaaagtgaatatccttcatggacatccttcctgtataaaatactcaatgaaacagatgtagaaaaatcagcaatggatgacttgattaacagaggagagtatgaggaggcagcccaattattagaggataacttacctgagggagggtttctcgaacaagtagaaaacaaatttggtatagacaaagaaatttatggtgtcattcaaaaaatcccatctatatttcaatcaactgttatcaccacgaattttgataacgtaattgaacgttgctatgaagatgccggcatcagtttcaatgagatacttcttggtcctgaagcagaaatgctacctcgatttttaggcgaaggaaaaactgtgttgctaaaacttcatggtaaggcgaacatatctaagagtcgaatattgacgaagaatgaatacgatcgccactatagcgacagcagagaactagaaaaagtaatagaatgtattagtcagaactctttattatttgtaggctgtagtttaactgtagatagaacaattaaatgtttacagagtatagctaatcgcaaggggcatgaaaacataccaaggcattatgctttcttacagctaaacgatcataatacgagaattaaaagacaaaatgaacttcgtcgagccaacatatatccgatttggtatactggtgagcatgatgaatgccttgaagccttgttagataaactagtcgatggggtgattaaatga

SEQ ID NO: 245058 - DNA, 1347 bp, Klebsiella pneumoniae
atgagttctaactggcctattgtacggatcgaagacattaaagccgatagaaaaaatgctatcactattggtccttttggatctcgaatgaaaagtgattgctataccgagtcgggtattgcggtaattcgagggacaaaccttggtccaacatctcattttataaatgacttcgtatatataactgaagaaaaagctgatgaattggcatcttgtaacgtttataaaaatgacctagtatttcctcacagaggttctataggtgaagttggcattgtagaaagtgagcaaagatacgtcctttccagcagcttaatgaaactaacgtgtgctactgataaagcatgtcccaaatttatatactacttttttaaaagtagtactggtcgacatgaattgcttaaaaatgcttctcaagttggcactccaggtatcgggcaaccattagcctctcttaaatctattgagttatctttgccacctttgaagacacaagaatgcatagccaaaatccttagcagtttggatgaaaaaatatacattaatcagatgattaaccaaactttagaacaaatggcgcaagctatgtttaaaagttggtttgttgattttgaaccggttaaggcaaagatagcagttctaaatactggtggctctcaagaagacgctacacttgctgcaatgtctgcaatatcaggaaaaagtattcgttcattggatatctataaacatgagcacccgacaaagtatgaagaattacgaattacagcaaatttattcccaaatacactagtagaaagtgaaataggagaaatcccggaagggtgggagtccgcacgtctttctgatattgcaattttgaattatggtaaagccttaaaaaaaactgaacgaatagatggtccatatccagtttatggctctggcggcgtaacgggttttcataataattatctcgtcacaggcccgggtatcattattggcagaaaaggaactatcggtactatttattgggaagatagtaattttttcccgatcgatacagtttattatgttgtaaataaaaaagatacatccttatattatctatattacttattgcaaacattgaatctccccaacatgaatacagatgcagccgttcccggtctaaatagagagaatgtttatagactcagtgttctaaaacctaaagaatgcattattgaatgctactcaaaatatgtttcaatatttagagaaagcatcaatgctaataaaaaaacaaatgagaccataataaccacaaggaataaaatccttcccaaactattttccggggagttatcctcacaggagtttctataa

SEQ ID NO: 245059 - DNA, 1707 bp, Klebsiella pneumoniae
atggacaacgccgaacagcagtttctgaacgatctggatactaagttctggaaagccgctgacaagctacgcgccaatatggacgcggctaactacaagcatgtagtactggggcttatctttctgaagtatgtttcagatgcctttgacgcccgtcagaaggagctgaaagggctgtttgaagacaagtctaacccggacaacatttacgcgctttctcgtgatgattacgacacgaaagaggcgtatcagcaggcgatcgcagaagagctggaagttaaggattactacactgagaaaaacgtcttctgggtaccaaaactagctcgctgggaaacgctcaaaaccaacgcagctctgcctgtagggacggttctggggagagacgatagcggcaaagatatcgtaatgacgtcagtatcgaagctgattgatatcgctctggatgctatcgaaaacagcaatccgaaactgaaaaacatccttaaccgtatcgggcactatcagcttggcaatgacctgttaatcagcctgattaacgttttctccgataccagtttcagcgaacctaaatacaatggcgtgaagctcaatttgaagagtaaggatattctcggtcacgtttacgagtatttcctcggtcagttcgcgctggcggaaggcaaacagggcggccagtattacacgccaaaaagcatcgtcacgctgattgttgaaatgctccagccctacaatggccgcgtttatgacccggcaatgggttccggtgggttcttcgtttccagcgatcgctttatagaagcacacgctgatgaaaagcattacaacgctgccgagcaaaagcgcaatatctctgtttatggacaagagtccaatcctaccacctggcgcttggctgcgatgaacatggtgattcgcggtatcgactttaacttcggtaaacaaaacgccgatacattcctgaatgatcagcatccggatctccgtgctgattttgttatggcgaatccaccgtttaacatgaaggaatggtggagtaaaacgctggaggaagatgtccgctggaagtatggaacgccaccgcaaggtaatgccaactttgcctggatgcagcatatgatctaccatttggcccctaagggctcaatggcgctattgttggcgaacggttcgatgagttccaatacgaacagtgaaggtgaaattcgccgagcgattattgaggcggatctggtggagtgtatggtggcgctacctgggcaattgtttaccaacacccaaattccagcctgtatttggctgttgaccaaagataaatcaggcggtaatggtaaggctcatcgtaaaggtgaagtcctatttattgatgctcgccagattggctttatgaaagatcgcgtactgcgtgatttctcaacggatgatatccgtaagattgccgatactttccatgcctggcagatggctaaagattatgaggatgtagccggtttctgctttactgccacgctggacgatataaagaaaaatgattttgtcctgactcctgggcgctatgttggtgcggttgaacaggacgaagatgatgaaccgtttgcagagaagatggcgcgattgacagcggttctaaaagatcaactggcggaaagcgcagaactggagaagcaaattaaggcgaatctgggagggctgggatatgagttctaa

SEQ ID NO: 245060 - DNA, 183 bp, Klebsiella pneumoniae
atgaaacgattggtgttagccctgctgttatttattttcaaacacttggctatagcccccgctctcacgccggaagcggatatcactctggtgaatccgtcaatgtttgctcgtgaaggatatcgacggcacaacatgatgctgtcgatgtgttcacataaaccgcctgttcatgagtcataa

SEQ ID NO: 245061 - DNA, 1827 bp, Klebsiella pneumoniae
atggcaactaaggtagaagccgcaacactggttaacaggattgtttataaatctgatttaaatagtttgaaaaaagttagaaacgatatgaagaagcttcagcaggagttttctaaatcaaacaaccaggtagcaaaggtcaaacagcaggcagataaacaagtatatcaacaacaaattaagcagcagcgtgaaattgataaacaacagaaacaagcagctaaacaagcggcagcagacgctaaagcaaaagccaacgaacagaaaaaactggcagcagcgcaagctcgtgctttaaaaattcaacaacagcagcaagccaaaaccgccaaaatcagcgaaaatgcgcgtttggcagagcggaaagcgttgtttgatatcggcagattgcaggggttaaatggtactgaacgttttcaggccatcaaacatgctcaggggttgattgattcctataaaaatcagactattaccttgagagacctcaatcaacaactctcacagtacttgactacgcaacgtagtattgccagaaataattcaaaacaagcgaagcagtcaggtaaggggaaaaaatctggctcatctggttgggttgcacgcaatgcatctgcaatcctcccagttgatcagttgttgggaccaaccgcagccgcattcctggggcagcaggcgtatcaaatcatctctggaacactggctggggctattgagagaaaccagggcaggaaaatgattagttctatggggttaaatcctctggaagctgacgcagccattcaagagacgttaaaacgaaccggctttaatatgagctatgaaaagatttctgacatagcaaaagatacccaggacaagatcggccaattgagtcttggcgagtggaaaacagataaaaaaacagggcaatcgtcatattctggcggaggcgaaatgggagattggctccagatgatggttaatcgcggaggctatacccagcaaggtgcattagcaacattgagaaacgtaaaaggcccagttgaactggcagtattgcttgaaggtttacgtaaaagtgcaaaacttacagattctgaattcactgctttagcagaagtaataaacgacttttcttatttagctaaatctgtcgatgccagcgggcaaaacgtcattgatactatgaacacgatggttaacagtggtctggcgcttaatagccaacagcagaaatctatcgataatctctcgcagatgtcgattgtattcgataacgccaggaattcattaggtgatcaatttgcggcatcttttagtaaaggactggaagaccttggaatcaatacacaaaatctatcttctgaaatgggttcattggtgcctctggtgaaggatttaggaatgggaaccgctcagactgttaaaggttttaaagaccttctggatgtgttgtctattatcacagaatggaaaaataaactcctcggaactgataaaccagaggaacagaatattttccagcaaggggctacatttgttggggaatcactgttgccaccgagtgttttagatatggcaagtcggattaaaaatatagttagtcctggttctgattcctcgtatgcaaatcaggtacaaagtggaacgttaatgaatcagatgatgcctactacgccatctatgcaatatcagcctgtcatcccggatttaaaagcggattttaacctgacagtgaatccatctcctgaatttggaatgatggtagaggcggtcgctgataaacggatagagtgggcattcgatgaccagaacttccagattaaccagagtatattaggtcaataa

SEQ ID NO: 245062 - DNA, 255 bp, Klebsiella pneumoniae
atgaatatgatgatctcatatcaggaacttgttcgcaccttccttagccgtctgtttcgccaggaaacgggaaagtcaccggctaaagccattgaagggcttcggctggaggctgccaggctgatgattgaacaaagccacctgtctctggattctatcgcccgtgaatcaggctttcgtgacggacgccatatgcgggaagtgtttatccgtggttacggcattccgccgcagtcgttacgcagtgggcgataa

SEQ ID NO: 245063 - DNA, 420 bp, Klebsiella pneumoniae
atgataaataaatggtttttgcttaatggcccacatcgcctgagaaacggcctgctgctggcgacggtgatatttatcacgggatggctggcattcaaacccggcgcgtatcagtattcattaaatgacagggagaaagtgatggtcacctcattattgcagcaccccgaaacgcggtactttggtttttattctgtggcgcttccggctgaatttacgccagccgggatggtgatgtttatccagggttcagcgatgaccccagtggaaacaaaacggcaatacttccctccatttcagcagttcttgatacgacatgaagaagaactcagaaacatgcaacctcaacttcctcaagatgcgccttatcttaaacagatttatcaacttccttctgacatgaaaggaaaaatattttaa

SEQ ID NO: 245064 - DNA, 978 bp, Klebsiella pneumoniae
atgctaagcggcagtgatgatacagctgacatttacgcaaaaatgctagattactgctcaaatgtgtcgcagatggataatcctacgccacatcaatatcgttggctcatatctttatcgacacttttaggtcttatttgtaacaaaaataatgataaaactaatgcgttaatccatttatctcgtgcagcaaactccagcattgataaatttagcccctctatcggcacgaagattttacaaagcttttatcttcagtccgttatattaatttctttaaatagaatctcctgtgccgagataatcgtcgatagagggattaaaagaggtatacagctactttatcaacatcctgacgaactggtgggtaaaatatctcaaccatttaattttgtgctttatatttaccatgatattcttgattggcttataaagatggtcaacattaaaaacgccataccaggcagaaaattcaacattgcaaattttgacaacggtaacacctggtcggctttgcttcatgaacgcatgaatgcaataaataatatgtcgcaaatgatagatgagcgtgacagaacaattcatgatcaaaaatgcttaattgatgaacgcgatagaactattcacgaccagaagcgccttattgatgagcgagacagcactgttcttacgcaaaaaaatttaattgatgagcgtgacctggtctctgctcagcaaaatcaattaattgagcagactaataaaactattcagcagcaaattcaaaatgtaactgacttaaatagtcaagtttcctctaaggaacagaaagttgatgaattacagaatcaaaacataaaattaatttcattaatcgatgaaaaagatctccatattgcccagctctctgcagatctagaacgtgcaaataccatactgcgtaagattaatagcacgcctgtaataaggcatctactacgcatgctaaatataaaataa

SEQ ID NO: 245065 - DNA, 783 bp, Klebsiella pneumoniae
atggtgattcaaggccaggtaccccaattacaagaatttccgggggacctctatttccggcatgatctcctgtcggcaatggagtggaagaggcactctcacccatggggccagttgaactatgtttcgcatggtgtgatgcatctggaaatcgacggtaatcgttttctgtcgccttcacagtatgcggtatggatccctcctttctctgagcatttttcatttgcctcacgggacttggtatatcggacggtatatatctcgttgaaactctgtaaccgtcttcccacaaaaccgacgactatgaatgtgagcccggttttacatgccattttggatgattttgctttgcgtgatattcgcatacccgaatctgatgaggaccttagaatggctcaggttgcacttgatcagatccttcatattaagccccatgaaacctacctgccttatggtatttctgaagaactgaatggtgtactgaaagagttgcaggctaacccgggtgatcgccggtctgttgaggattttgctgagcaattgcatatgacgtcccgaacgctagagaggcgatgtcggcgagaactgggcatttcctttggagagtggcgttcaagactaaagtttctgcactcaatcgaatctctggaaacagggttatcagttcagcgaatcgctcttgaattaggatacacaacaccgtctgcatttattgtgatgtttaaacggttcacaggtacaacacctgagcaataccggctaaatggattgaaggggcggtga

SEQ ID NO: 245066 - DNA, 948 bp, Klebsiella pneumoniae
atggattatgtattcccgttactcgctgcagtattgtggggggcaaatattgttataacaaaaatggcctcaagtctaatctcacccattgagatcagctttctacgttggttcattgccacactggtgttaaccccttttgtcatgaaaccattaattctgcatgccgcaatggtgcgtaacaatcttggaaaaaccttcattcttggggggttaggtggtgtgatattccagtgcctggcttactatgctgccgcttacacctcagcgatgaacatggggattattcaggctttgatgcctctaatggcaatcattctggcaagcatcatttttcgcaccctacctggtatgtacgctgttgctggtgctgttatttctttagccggtgtactgattgttatatcaggtggtcacattagccagttaatcagccaagggctgaatatcggtgatgggatgatgctgctcggagcttttgcaatggcagtttataatgtgctgctgaaacgctggcacattgaaatccctctgtcagtatctctatatctgcaggccgttgccgcctgtattgtgttgctgccggtatacattttgtccgataaacatacactgaccctggcaacatccggcatggtgctgtattcatcaatcggagcgtcagtgctcgcaccactggcatggatggcaggctcacgtcgccttggaccttctcgtgtatcgctgttttttaatttaatccctgtttttacagcaatcatggctgctttatttttgtcagagaaattcacatggtcgctggtgtcagggggaatgcttgctctgggtggggttatttttgttgaagtgacaagaaaatcaatttctaagagaatgagtgaaacctcaaccactgaaaataaggaatataaaaagataagaagttttcataaccctttttcgtgttag

SEQ ID NO: 245067 - DNA, 546 bp, Klebsiella pneumoniae
atgacccgttttacccggcatatgaacctgacgttcgcctgtagtgggaacatatttctgatgtttaccagcgatgatgccatcacgggtaatatgtacctgagtattgtgcatgctgccgtttgtcattggattacgttcattaatgccgacaacagcattaatgttagcttttgcacaagcctcagcaattgcctgcatatgttcgccctccatctcgacagattcgaggaacagacgtttgtcgagttcacgagctttaggggattcaccgagcgtttcataccagttagggaacgttgggatgaatgcttccgggaaagcgatcaagtcagcacctttacgcccagcctcaagaatcagctcacaagctttttctgtggttccgttcagatcaagaaaaaccggagcagcttgtacaccagctacacgtattttattaaattcctgccgagtataattggtcatcatatttcctctgcggggttgaaaccccgaaacgactgtgaaaacgacattcagaaaagtgagttctgtctgcagtga

SEQ ID NO: 245068 - DNA, 309 bp, Klebsiella pneumoniae
gtgcaggatccaccggtcctgatgatggatgaaccttttgcggcgttagatgaacaaacccgtcttgaaatgggggatgaattgcttcgtatctggagcaggacaaaaaaaacaatcgtttttgttacacatggtctgagtgaggctgtgtatctggcagatgaaatttatgtgatggctgctcgccctggtcgtatcgttgaacaaattcaggttgatctgccacgtccccgtacttttgaaaccatgtccatgccgttgttcaatgaaatccgtgatcatatttggtcgaaaatcaggaaagcatga

SEQ ID NO: 245069 - DNA, 747 bp, Klebsiella pneumoniae
atgacgcttaatattccgacacgatctgtgcaatgtttactgatatttatcttcgcctgcttttgggagttgttaccgcgttcaggcgtcgtgccgccgatctttttgccgagtttgtcagcaacactagctgcaggatatgcggacataggggatttaagcggacatctgatgacaacgttgggtgaggtgggacttgcagtaactatttcttgcttgtcaggggttgttgcaggactgttggtgggaattagttcagcaaccaggccaatactcattccaatggcgtccagtgcatatgcgattcctattgtaatcctttatcccattatcaccgcctggttgggagtgggtgtagaatctaaaattgtgtttggcggtttttatggtttttttccagcatttttgtcggttgctgccggtgtacactcaatacctgccgcgtatgttctgactggaagaagcctcggagcatcccgattttcccttgcatggtatgttttagtccctgctgctttgcctaccattttaggtgggatccgccttggtggtgcgttggcaatcgtgggagtcatagttggtgaaatgctaacatcttcatcaggtctgggatattacatttcatataatcgaactatgatggatacgccaaaagtgtatgcaggaatcattcttgtaatacttctcactgttgtatttgactcaattatcggttttttacaatggctaacagataggcgaagataa

SEQ ID NO: 245070 - DNA, 1095 bp, Klebsiella pneumoniae
atgagcttaggcaataaggctttaaatgatattaatatttttcgtattccggactctgttctctattcccctgcggcaataccagatgtttcggcattacgtaaatgctggcaccctgtagcctattcaacggagattctggaccagccctatgccagtcgtttgctggatgaacagatagttctttggcggaataaagaggggcatttacaggtagttgctgatttatgcattcatcgtggtacggccttatctattggtcaagtcgtagacggtgaaattatgtgcccctatcacgggtggcgtttccgtggcgatggggcatgtacaatgatccctcaacgagaaaatccccgccagatccctgataaagcgcgggttgcggcctaccatgcaaaggaaaaatacggcatcgtatgggtagcacttgatgaaccgaaatgggagatcccggatattcctgaatttgatgaacttgagtaccatgttatttcaaccgggccatatgactggcagtcagatgcgtcacgtcagttggagaatttcacagattttgggcattttccgtgggttcacacaggattattgggggatccagaacgtgtcgttgtaccaaagtatgaagttgaaaccgatgaacatgttatgcgttatcattttatgcggcctgaggctccgcaggcaggaaaggcatctgtctggggacgagaaaagaaggaagttctccctatcagacactcttattatcaattacacctcccttataccattgttctgaggcaggactgggggggaacggataaaatgatccatttatttgtttctcagccagtaggaaaagataaaagtcgtgcatttctacgaaccgcaagaaattatgcccacgatcaggatccgcgcgttcttcaggaatttacggatatcgtattagatcaagaccagacaattgttgaaagccaaagacctgagtttgttccttttgacctggctgatgaacttcatcttgattttgatcttgtggcaattaattaccgtaaacttatgcgttccacagggcttgctttgaaagttggtatgtcacaacgagtaagatga

SEQ ID NO: 245071 - DNA, 1056 bp, Klebsiella pneumoniae
gtgaagcctggaaatttaatttttaaagaagactcttcaattgataatgccattttaaacgactggcatgttgtgggcttttcgcatgaattggagattgggaaattaacacctgtgcgtttacttgggcgtgatttagtgttgtggcggcagacgagcggtgaagcacatatatgggaagatttgtgtatgcaccggggggctcgcttgtcaaaaggctatattcgtgatgatcaggttgtctgtccgtatcatggctggcgttatgatggcacaagtaaatgtacattgattccttcgactcctgatcaggctgtacctccacgagtcaaagcatttgaacacaagatccaggaaaaatatggttttatctgggcgtcaataggcgaacctgaaaaggacttgccatcatttcctgaatggggtgctgaagggtatcgaaatatccttactggacctcataacttcaatgcaaatggctatcgtgcgttggaaaacttttgtgatgttacacattttccattcgtacatggtggattaaatggcgttgaatcggctccagatccaattggtgactatcaggtctatgaacaaaacggaagcttgtacacaacacctgttactgttttccagccccagggcgacccgcgacgcgtacctgttcagtcaagttactcattttcctgtttgcgccctctggttgcaacgttgcgtaagcaaattcgagtcgtagatactgagggtaatttgtcagaacatgaagatgattattggcttttcttcaccgctcaaccggttgatgaaactcattgcatcgctcgggtaggaatggctatgaactttgggaatgagctttctgatgaacaaattaaggcgcgtcaggaactgatcttcgaacaggatattgaaatcgtcgaaactcagaggccagaacgtatacctgtggatctacgtgctgaaatgcatcatcgggtagataagctcagtgtgcaataccgtaagtggcttaaggatatgggcgtcacctatggcacagttgataacgactggatctaa

SEQ ID NO: 245072 - DNA, 963 bp, Klebsiella pneumoniae
atggcaaatataattgaagccaacgaagcaaccactgtgcctatgagggtcgtttcatacgtgtgggaaaatgaaaagactcgatcattccggctggctacagtagacggctcggtattgggggatttcacgccaggttctcatatagagctgcatttggcacaaggtctgcgccgtgcatattctattatcggcgtaactgacgataagcgaggttatgaattaggagttcttcatgtagagggaggccgaggaggatcccgttttatacacgaacgcctgcgtgtcggtgacatcatagaaattacaccgccccggaatttcttcccactttctgaaggtgttccacacacggtttttttagctgggggaataggtattaccccattcttctctatgatgaagaagttgagccagacccaggatagctgggagatcttttactgcgttcgatcgttaagtaccgcagcatttcttaatcggtttgacctgaacgataaccgtattcatctgcacgtagatgatacggatggtattttagatattaactctatggttcagcagtctgctccggggacacacttttattgttgtggtccagagggaatgttaggtgcattcaaaaacgcaactcagcatttgacacaggaatgtgttcatcttgaatctttcctaccagctatcgttgaagagcatagcggttttgaagttgaacttgtcagaactggaaaaagaatagctgttcgccatgatgaaactattcttgatgcattgcttaatgccggttttgacccaccgtattcatgtcaacaagggatatgcggtgcgtgtgagttgaaagtacttgatggtttgcctgaccataaagatgaagtactatctgaaaaagaacgagcactaaacaacaaaattatgatttgttgttcctcctcaaaatcgccgctactaaaacttgatttttaa

SEQ ID NO: 245073 - DNA, 906 bp, Klebsiella pneumoniae
atgaaaccacctagccttgactcttcatccgttctgacattaaaagtctttgtcatggttgctgatgtgagaaatttttcgatcgccgctcgtaaacttaatttatccgcatcaaccatcaccagtcacatttcaaaccttgaaaaaaatataggcaccgctcttttcaaccgtacaacaaggcaggtttcaatcactgaagctggcgcttatttttatgaccggtgtaagagtatcctttcagaaattgaccaagcagtttcggatttgatgcccaaggacttcttctctggtcgattacgtatttctgctaccccatccttttcttcctcaatactcgcaaatgttataactagtttctctactgaaaatcctgacgttagcattgaagtactggccagttctaccctaccaaacctggtgaatgagcgtatagacattgcatttatggtaaatgaaaaacataataccagctatgcaaatattaacattggtagagtttcacgcgttttttgtgcttctcgtgcatacttgttgaaatatggactaccgaatactatagaagagttattttctcgacgttgcttactcaatgttgtagctggagtttctgaaccttggattatcaatgaaaatggtgaacgaaaagaaatacatgttagtggaccactgagttccgataatggcgatgttcttaaagcttcgtgtctaggtggactagggattggtaacttctatcgtttccacgtcagcaatgagcttagccataattatttaatagagatactaagtgagtaccatccagaaaaaaataatgtttacgcccttactccacatagagagattatgtcaccactggcgttacattttatagagaaaatgcgcgatttcctttataaatgttaa

SEQ ID NO: 245074 - DNA, 900 bp, Klebsiella pneumoniae
atgaacttatcccagttaacttatttcatccgaatagcagaattgggaaacatctcgaaggccgctctggatctacatatttcacaaccatccttgtctgcatcaatcgccaaacttgaggatgagctgggtgttccgttgctgagtcggcagtctcgaggggttttacttacgggggctggacaagagttcttgacgcacgcccgtcgcgtgttagccgatgtagatcttgctatcggatctgtgcaactcaacaatcggaaattttgccggaggatccgggttgcctgttcaacatcaatgacaaaggctatttctgaatacatttatgaccatctgccctctggggatggtgcatactcattgaacatcgttgaggccatgccaggtcatattcccaaacttctgcgagataatctggtagatatcgccattgtgtatgagccgacagatgcacttcaggaaatgtccttcaggcagtacgaatcgacgttaagtttaattgcatccagagggcatgatctttatgagcgggaccagatcagtttcggggagcttgaaccctacagatttgttcttccaagcggttcacatccaatcagaactgtcgtcaaccgtgaactgctcaagcgacagctctccctggatatcatagattgtgatagcttgccggcaatggaaaagctaatgttgaaaagtggattcattaccattatgccctcctttggattttgcgaagcgatagaagaggggtcgcttcgctcagttgctgtagtagatagtgatatacgctgggatcttgcgatagtggttgacccgatgcaaaacgacgacccttctgttatttcagcatgtgaaattttgcaccatggtgtagaggaagcattgaccagagtttaa

SEQ ID NO: 245075 - DNA, 288 bp, Klebsiella pneumoniae
atgcgcaactggctgaaacaggcggtgaagcgggctgaagctgatggcgtgcatttttcgatcgccgtgacgccgcataccttccggcacagctatatcatgcacatgctttatcaccggcagcttaggaaggtcatccaggcgctggccgggcataaggatccgcgctcgatggaagtctatacccgggtatttgcgctggacatggctgccaccctggccgttccctttaccgctgacggtcgagatgccgcagagatccttcgctccctgccaccggccggctga

SEQ ID NO: 245076 - DNA, 150 bp, Klebsiella pneumoniae
atgaacccattcaaaggccggcattttcagcgtgacattatcctgtgggcggtacgctggtactgtaaatacggcattagctaccgtgaactgcaggagatgctggcagatgttaccaacggtgcaaaactgatccaccccagcggttga

SEQ ID NO: 245077 - DNA, 462 bp, Klebsiella pneumoniae
gtgaaggtcaatggcagatgggcttacctgtaccgtgccgttgacagcagaggacgcaccatcgatttttatctctcttcacgccgtaacagcaaagcggcatatcggtttctgggtaaaattttaaacaacgtgaaaagctggaaaattccccgtcgcatcaacactgacaaggctcccacctatggacgcgcgctggcgttgctgaaatgcgagggccagtgtccgcctgatgttgaacacaggcagattaagtaccgcaataatgttattgagtgcgatcatggtaagctgaaaaggataatcagtgccacgctgggatttaagtccatgaagacggcttacgccaccatcaaaggaatcgaggtgatgcgagcactacgcaaaggccaggcttcagcattttattatggcgatcccctgggcgagatgcgtctggtgagcagagtctttgaaatgtaa

SEQ ID NO: 245078 - DNA, 429 bp, Klebsiella pneumoniae
atgaatcaggtaatttcaaaaaaagccttcgaaattgaccgtctcaatttgtcctatcaaaaaggggcggaaaaagtaaaagtactttccgacacaacattttcaatagaccagggaaaatttatcgtgctggtgggtccatcaggttgtggtaaatcctccctgttaatgaccatggctggattacagcagcccagtagtggaagtatcatttgcaataaccgggaactcaatagtcctgatcctgatcgggtcggtgttgttttccaggattcgaatctgtttccctggatgacagctatcgacaatgtggcctttccattaatgttaaaacatcaccctaaagctgacaggctcgaaaaagcgcgaaatgcacttgagctggtgggcttagccggggctttgttgaataaatcagatttcgggtaa

SEQ ID NO: 245079 - DNA, 750 bp, Klebsiella pneumoniae
atgacttacaaaaatggaatagtgcgaatttcgtgcgtgattttcctagcattggtatgggaagttgtgagtcagagcagctgggcatcaccccagctgcttcctcctcttagtgaggttctggcaacagcatatcagctaatcaagacggaagaagtgcaggttaatttaggctcaacaatactggtagtttttagttcgttcattaccgctgtcattatcggtattcctgcaggcatactgattgtttccagtagctactggaaaaaagtccttatgcctttcattttatttcctttaggcattccaaaatcaatttttttacctgttttcctgctcattttcgggattggttttggacaaaaatttgcatttggcgttttctcagccatttctcttgtcattttgaactgtggaacagctatatcgtcagtacagccgagccatatcatgacggcgagggcctatggtgcaaacatgcgccagataagccgatacatctatcttccagctatgttgccaacaatattggaagggctgaggcttactatgatttttacccaaactggggtagtgcttgcggaaatgtatgcctcccgaaccggtgtagggacacttctcaacaactggggggaagcatatcaaattactaatcttctggctggtatcttcttaatttccgttttttcaatttgcattaatgaagcgttcatctggtttgagcgccggttaatgggagcatatgaatga

SEQ ID NO: 245080 - DNA, 954 bp, Klebsiella pneumoniae
atgtcgaaatcaaagttatcgcccaccctcattttatctttaaccgcaattatattttctatgtcttccttcgcggcccaggccgcagagaaagtccgaattggagtaatcaccaagagttactggcccacggtgattgtgaattatggcattgaaaagcatgtttttactgaagcaggtattgagccggaaatcacggtttaccgcagtggaggggacgcgtttcaggcgatggctgcaggagaagctgatatcattatgggagggccggcaagtacagctaccgggcgtgacaaaggggtaaaaagtaagatggttgctggaggtgcttcaggtattgccggttggtatcttgtcgttcccctgaactccccgattaaaactgtctcagaccttgaaggtaaaaaggtcggaattacatctgcagggtccagctcagatattctcagtcgctgggttggtgaaagtaatcatgtgaaattcactcgtgttccgttaggcggtgcaggtctggttccaaatctggaaagtggaaatgtagatgcagcgttattttatgctcctatcagttatcagatgatgtcggccgggaaagtgcgttcgttggtcgattttagtaaatcactccctcctgtactcggtgatttatgggtaagtcctgatagcttcattaacgataagcctgaggtgttaagaagtacaattaacgcaatatatacatcagtcaaagaatttcaaaatgataataaagcagtctcaatcatcgcgagtaatgatggtgtttctcaagaagtagctcaacaggagtttgatggtatttataaaacgctggttcctgatgcttcaattgatgttgcaaaaatgacgcggtggttagatatggcaaaaaaaggggggatggaaagtattgcgccagtagacagtatatacacatcctcatttcagattaagtaa

SEQ ID NO: 245081 - DNA, 819 bp, Klebsiella pneumoniae
atggcaacttttctgtgtaatgcttgcgggactgcctatcctgagtctgacaatacacctcaggtttgtaaaatttgtgatgacgaacgccagtatgttcccgctgctggtcagagctggactgaacaaaacatcttgagtagaacacatcgtaatgcgtggcgcctcgttgaacctggattattgtgtctccagacggtgccagcctttgctattaaccagcgagcatttttactgagaacaccccatggcaatatcctgtgggattgtgttgcgctgctagatgacagtaccagagaaatcattcatgccctgggtgggctgaatgcgattgctgtttctcaccctcattactacacgactatgcaggactgggcaaaagaatttgattgccctgtttatcttcatgaaagtgataaggagtggattgtcagacaagatagctcgctgcatttctggcaaggtgatgcaatggatctgatgcctggatgtaaactgctttgtttaggggggcatttcccaggtggaacagttctgctctggtcagatgatgagaagaaggaaggagtcatgttggctggggacattgttcagataacgccgggggcacatcatgtatcatttatgtggagctatccgaatatgttgccgcttccgattaaacaggtcaaagatataagagaccgaattgcacccttcaaatttgaaaaaatatatggagcctttgatgggcaaaatattttgaaaggtggaaaagagatcgttgactcaagtgctgagaggtatatgagaattatactgactgaatctatatattaa

SEQ ID NO: 245082 - DNA, 1098 bp, Klebsiella pneumoniae
atgctaaaagttattcaatctccagccaaatatcttcagggtcctgatgctgctgttctgttcggtcaatatgccaaaaacctggcggagagcttcttcgtcatcgccgacgatttcgtaatgaagctggcgggagagaaagtggtgaatggcctgcagagccacgatattcgctgccatgcggaacggtttaacggcgaatgcagccatgcggaaatcaaccgtctgatggcgattttgcaaaaacagggctgccgcggcgtggtcgggatcggcggtggtaaaaccctcgataccgcgaaggcgatcggttactaccagaagctgccggtggtggtgatcccgaccatcgcctcgaccgatgcgccgaccagcgcgctgtcggtgatctacaccgaagcgggcgagtttgaagagtatctgatctacccgaaaaacccggatatggtggtgatggacacggcgattatcgccaaagcgccggtacgcctgctggtctccggcatgggcgatgcgctctccacctggttcgaggccaaagcttgctacgatgcgcgcgccaccagcatggccggaggacagtccaccgaggcggcgctgagcctcgcccgcctgtgctatgatacgctgctggcggagggcgaaaaggcccgtctggcggcgcaggccggggtagtgaccgaagcgctggagcgcatcatcgaggcgaacacttacctcagcggcattggctttgaaagcagtggcctggccgctgcccatgcaatccacaacggtttcaccattcttgaagagtgccatcacctgtatcacggtgagaaagtggccttcggtaccctggcgcagctggtgctgcagaacagcccgatggacgagattgaaacggtgctgggcttctgccagcgcgtcggcctgccggtgacgctcgcgcagatgggcgtcaaagaggggatcgacgagaaaatcgccgcggtggcgaaagccacctgcgcggaaggggaaaccatccataatatgccgtttgcggtgaccccggagagcgtccatgccgctatcctcaccgccgatctgttaggccagcagtggctggcgcgttaa

SEQ ID NO: 245083 - DNA, 966 bp, Klebsiella pneumoniae
atgaagaaaatatctattataatccccgtatataatgtcgaaaaatacattgaagaatgtattacaagtttactttctcaatcatatcataactacgaaataataattgttaacgatgatacacaagacgcctcgatagataaaataaggcatttaatagattgcaatagtaatatcaagctagtggaaaaagaaaatggagggttgtcctcggctagaaattttggtttaaaatacgctactggagagtttatttcatttgtagatagtgatgactttattgataaagactttcttaaattaatgatatccgcgattggtgatgctgatatatgttcgtgtggatataaagaagttaacgaagaggggcaatttattaggcaaaggaacaatgttttttttgcgacagatgatttatttggaaaagctatagagtgtattaatattattcctaatgcatgggggaaagtgtatcgaaaagagttgtttaatgatattaaatatccagaaggaatgttatttgaggactatgcagttttataccaactgtcatatggaaagaaaattgtatttcaggataatgctttatataattatagaatccgttctggttcaataatgcgggattttaataataatataatcgatcataaatttatcattttaaatgaaatatataattttttaaataaaaataaaatatatcataaatataaaaataattatagcaatgcgtatatttatcatggggttttcgttacgtcatgtattataataaatcaaacctatgatctcagtttacttctaaaaatgttatccaaagttaacacagaagtatttactctcaataatatcatgttcagtaagagtatcccgaaaagtataaaattatatctattgattttgaagtatttaccctcaatagctatttctttaaaaagaattcaaaacaagataaaatcataa

SEQ ID NO: 245084 - DNA, 510 bp, Klebsiella pneumoniae
atgaaatttaaagtggtaattggagttgcatgctttgcgatggtattactatccgggattttgggtagaaatgtagcttttgcactccaatggcccctttttgaagcattaagaaccactgcttccatcatctttgccgtggtgggagcttggtttgccattatctatccagaaaggctgaaaaagtcatttcgtggtggagcatcggaaaatagtggtccaggtatacaccggcttttcactccaatagttcactccactgcgatcctcgcaactgtactgattgtcggtgttatcgtcccattattgaagcaattcgaatggattttgtcgcataaagagatattcagaggcatatcgtatggattgcttgtttttctgacattgtggcagttgattacagttctttttagcctaattggccccgatatgattaaacgtcatgtatcaaaacaggaacgagctgaagaagctgctgcggcagtaatgcccgtaaagaaaaaagattga

SEQ ID NO: 245085 - DNA, 1044 bp, Klebsiella pneumoniae
atggtaactgagcaggcagtgtttactttttataagattaataaagcggggtattatgcatacggtgatcaacaaccggcgttcggtaacacaaccgagatgcttaccgatttgcagcactgggctaggacgaaaacactaaagcaaaccaaaacctttgaagctaatgaagagcgatatccttgttatcttgttgatgctaaacggaatggtgacgattgggccctgttgatttggaacgaaatacctaccaatggacagcaagttccttcaataagcgaaacggcgagattcggcgctgaccctgaagtaattttgaacgcggttcagggggggagcatacctggttacgctacatatttttggttcctcccggagagggatttgttagcgacggttaggcttcacaataaattaacgtcgcaatcttctcttcagcactaccttcactgtttccttaagcaatcctcacctcatgtagtcgcagcacctttcacaaatgaggatgggagtgttgaagttcgggttacaggttacagaaataaccctcttgatgaaaatgaagaagagaaacactacattcccaaatttagctccagcttggtgcgaaacagggggaagcatgacatcatcagacagaatgctaaccgtattagaaaaattgaacgtgttattgagttagatctgactaagcctgaggagttaggtttgtggcagagaatgcttcaagtggttaatcttggagcaccacaaggtgctgatattacgacaaaagtacggtatacactttcgccaaatgtgactcttcaagatgtgaactcgatgatcgacgactgggaggcggacccaagtgaagtaaacgactatggcttttacttcacaggcgaatccaataaaccatattggctaagtaaatcattggcaagaatggagtttcagcttgatcttgaaagagaaaatattgaatttgtacagattgattcgctcttacgagagttggtcagaaagaaaaacgctattctgaacggtgcagggctattatga

SEQ ID NO: 245086 - DNA, 696 bp, Klebsiella pneumoniae
atgagtaatccaatagctctcaatgagtttgattttgatggttatgctgtaagaacagtgatcgatgaggattccgaagtatggtttgttgccaaggacgttgcggatattcttggttatgcaaaaacaaataatatgacggaacggcttgatgatgatgagaagcggacgctgtatatagcagcatctcagaataatcaaacacttatcaatgagtcaggtctgtataacgcagtaatgggatctcaaaaggaagaggcaaaacgttttaagaggtgggttacttcagaagtgcttccatctattcgcaagacaggcggctacagtctcacgcctaaaacatattccgaagctctgtttgttgctgcccaacaagcaaaaagagctgaggaagcagaacttctcgcaggtaaaagggactcgcagtttaaatccgtccggggcgcttacggcaaccacgttatgcagcacaacaaatatgttcatagcaagggcgaaggtttcaggcacgccaccattgcacatgttaaaagcgtcattcctggtaaatatagttggcagacactggcaaactactgcggctaccacgggctttcagtggaaattcttacacctcactaccaatccgttccattaaactcctaccctgcagaagcatggatggcgatctacaatatcgacatcacaaaattctga

SEQ ID NO: 245087 - DNA, 276 bp, Klebsiella pneumoniae
atgatcgattttgaacaacacaaaaacattgtagaagattttgtggaacaatactacacgctggcacacagcttgatgaatgatagttataaagatgcagaggtttactactcaaactatcagatactactagaggcgatgaataaactgccggaacatccagagtattttttggagtggttactggaagctgatgcagctttgtatataaatctgatggaacttgttgttatcgccagaactattaataacgtttttgaacaagtaacgccataa

SEQ ID NO: 245088 - DNA, 129 bp, Klebsiella pneumoniae
atggggattcccgaaagtaagcgaaatgccaataacgcctatgtctctgtaaacaatgtcctaggtatagcgtccgttgattattgcctacatatttataataacattaaaacattattttgtcaataa

SEQ ID NO: 245089 - DNA, 132 bp, Klebsiella pneumoniae
atgttgtggaattttacgcctactcctttttatacctcgcagggattagcgctaagagaaaataaaaaaggcgattacaggatcctgaaatcgcccgggagaataaaaataaacgcgttaaaaatttgttag

SEQ ID NO: 245090 - DNA, 984 bp, Klebsiella pneumoniae
atggccaaaaattacattgaaagacaggacgtagagccatggatgtcagttaagaccgttgcttccttctggacaagacgttttttccgaatcgcgcctctttattacgtcttattgatagttgcatttattttcggtgaaacctttggccattatcgcgattttatcgctatggtatggcctgaaacccaaacggaaactgcgcgatatactgactcaacgttaccaaatatcttaacgcacatctcattcacttttggtttcctaccctattattcattccgaaccgtacttcctgactggagtattggtcttgaaatgcaatattatgcgatcttcccgtttatcatgatgctagtcatggttgtaggattcgtaaggatggctattgcatcaatagttttatgtgttactgcagcatttttgttccctacttacctcgcagcattccctatgccttcaatgattttatttaaattacctttatttgtatcaggcatgttgctatataaagctgtggcagaaaaaagtaaaatttatgttgtggtcgctttactttcaccgctttcggcattcttgacggggtactttacttcgccgatcaagatgataattgaactcatgattatctctggcatgtcgattctattgatgccacatagcgataaatcgccattgaaaaacatcgtatctttcgcgaaaaaaacacttgccatccgtttcagccaattcctaggggatgtatcatattcagtgtatctgttgcatctgatgattgttatacctgtgattggttggcttgttcaacatgatgcttatgtacaattttcaccattggtccgtatgattgttgccgcagcaatcattttacctatcacttatgctatcgccataaatttatttaaatatatagaaaaacaagggatcgcattaggtcgcagacttataaagcaaaaaaaaattaagataaagacaacagcttaa

SEQ ID NO: 245091 - DNA, 918 bp, Klebsiella pneumoniae
atgaaaatatctctggtcgttcccgtccttaatgaagaggacacgatccctcttttttataaagaagtgcggtcgaaacttgagaactgggaaacggaaattgtttttgtgaacgacggcagcagtgatgctaccgaaaatatcatcagcgccctgagtctctccgatccgttagtcaaattgctgtcttttacccggaattttggtaaagagccggctctgtttgccggtctggagcatgccacaggcgacgttgtcattcctatcgatgttgatctgcaagatcccatagaggtgatcccgctgatgctgcagaagtaccagcaaggcgcggaaattgtgttggcgaagcgaatcgatcgccatacggacggctatttaaaacgtaagacggcggaatggttctatcgcttacataataaaattagctcacccaaaattgaagagaatgtcggggatttccgcctgatgtcgcgttcagttgtggataatatcctgcgcttacaggaaagaaacctcttcatgaaaggtgtgttatcctgggtcggtggttcggttgatatcgttgagtacgcgcgtgcggagcgcattgccggcaaaactaaattcaacggctggaagctgtggaatcttgcactggaagggattacctctttttcaacgtttcctttgcgggtgtggacgtatattggtgttattgtcgccggactgtcgtttctgtacggtgtttttatgatagtcgacacgctgatttttggtaatcgggttagtggttatccctctatcatggtatccatactgtttctgggcggtatccagctcatcgggattggcgtattaggcgagtatattggcagaatatatttagaaacgaaaaaccgaccgagatatttattgaaggataaggaaagaaaatga

SEQ ID NO: 245092 - DNA, 360 bp, Klebsiella pneumoniae
atgcttactttatttacccgttatttctcagttggtattttaaatacgcttatccattgggctgtattttacttgttgattattttaggcacaacccaggcgatagccaatctgttggcattctgcgtggcggtgaccttctccttcttcgttaacgctgcctggaccttcaaggccagggccacatcacttcgttacctgctgtatgttgtttttatgggcgcagtggcgatgttgaccggtatgactgctgacagtcttcagatcccacctcttgccacccttgtcattttttcagctatcagtctggtatgtggttttctctattctaaatttgtcgttttcagggaattgaaatga

SEQ ID NO: 245093 - DNA, 1392 bp, Klebsiella pneumoniae
atgaacgaaaaactaattgaattaaaagagaagttagataatttacatacaacacttaatgagtttacattctctgtagaaagtttcattgaccttggtgcatatacatttccctttatgcacaaagaggatcttatagagcttccaagaatgttatctgatagaattaatcagatgcaggaatttataccttcttcaaatgacattagagtaattgattcactcatttacactctggataaagctcagctgaatattgtctatctaaacaatggtaacgtggcggttcaacagacggctataccatcttacgttatttcaatgttatatgtctctcatagaattaatgagcttttttcatttgaaaaactgaaagatagaagtttattgccaaagcaaatattgcgaaggttagagttatacaactctgggataactgcaatagaaattaaagctggtgatatagatgataagattaaaactataaatgaggcatatgatgctgctgagaatttaccaacaacagtaaagatgcttcgtgaaacaaatgatgaagttaaaagtgttcactatagcgctgttgaatcttgcagtagtattactagcatgcttaaagagactgaggagagttcaaaaattgtagaagatgccaaaaaggaaattttggccttgaaagataatgtaactaaggatgcaaaagactacttacactctcttcgtgaagaagctcagggttacataaataaatgtgaagaggcgtttagaactaccacttcaaaaggtttagctggggcatttcaagataaagcagaaaagttaaaccggagcatacgatggtgggtaggtggactggtaggggcgttggttgcaggtgctgctgttggttatacacgtttgcatgctcttgaagcatatctgtcaaatcctgactcatcaggtataaagttaattattcaacttatactctccattttaagtgttggggcaccattgtggtttgcttggttagcaacgaaacaaattggtcagcgattcagattggcagaggattatgaattcaaagcctcagtgtctaaagcttacgaggggtatagaagagaggctgtccagcttgataacgattttacccaaagattatttggtaatgcacttactcgactagaagaaccgccattaagatttgttgaagaagctacccattcgtctcctatcatggaaatgctatcatccgataattttaagagtttcatagagagtggaggtgataaagtcgattcaattttagaaggggtgggtctttctagaaaaagtaaagtcgagcaggagcgccaagtgagtaaggtagttactcagcctgaaggtgaaacttcaaataaaacagagaacgaataa

SEQ ID NO: 245094 - DNA, 633 bp, Klebsiella pneumoniae
atgagatctatcaaggttggcaatgacagcggaggacgtgaagcaatcaataggctgattaaggcttataaattcaactctcgacagcaactatgcgaccatctttctgtttcaaaaagcactatggcaaacagatatttaagggatagttttcccgcggaatgggttatacagtgcgctcttgaaactggagtttcgctactttggttagctaccgggcagggagataaaaatgataataatgctcaggaaaatagttttggttttgtgaaccactcccacatcaaaccgttatccgaggtagtagcacctgaaattgacaaggccacattggatggtggagctttagttgaccatggaaaagtcatactagataacagcctgatccctcacaacatagctaatccgtggctcatccatacggatgatggttcctatctcgttgaccgtagcggcactccgccagtaaacggtacatggctcgtcgatatcgatgggataaaaacgatggcaaagcttgcacgaatccccggtaatcgattagttgtccagcagggcgaatcatcttttgagtgcagccttgatgatattgaggtcgtaggccgggcagttaaagtcataaagagcatctga

SEQ ID NO: 245095 - DNA, 1215 bp, Klebsiella pneumoniae
atggtaacggtaactaatagtactgcatacggctcacttttttcctcattgcgtagctgctcagaaataacgccaccatgtgaaataaaagatggcacaagcgacatcatcgaagactttaatgtaaagtgtgaaagctatataaaaattttaaaatcccatacgtcaaacctagcaaatcatcatcacttatcaactaaaatggctatgcaaaggctacgacgttatatgaggaccatctacgatgttcaagacactatatctgagtgtttagagcattttttgtcaggtgatattcaagctgcctacgacctcttcgataagacctttagtagtaaaagtaaaagtgagcatcttaaaaacatttgtataaacctgaacgaaatttgtaatgatgacagaccattatatagagtaaggaaatcagatcggtttttagaagatcgcaaggaattatttcacatcccatttacaatgaggcacttagtaagtgcacaaagatattctgttgctggccttccttgtctatacctcggaacatcactatatatttgctggcaagaaatgggaaagcctgactttgatagactttatatatcgtcatttaaatcgataagcagcccaaccgacaagttaatattaaacttctcctcggaattattaaactcgtcaatatcccttaaaaaagattatattctaagagttatccccgaggagatattaatttcatatttatgtttgtggccattaataattgcatgcaactacatcaaaaagcaacctgatgcagcgtttaatgaagagtacatcattcctaacatattaatgcaatggataagcaaaagagagcgctcacctataattggcatagcatatcgctcaactaaaataacatccatcaagcatagcaacttggcaattaatgttgtaattccacctaaagcaacttacaagcaaatgacaacaaatttatattgcccaactctttctaaaacattcaaattaacaaagcctatatcatggcaacttcttaaaaccttagattatccaattaaaagagatacagaatttgataaggcaatcgatcatatacaaaatagagaaattcaaaactttcatgaagatttggttaaattttatccaataaccgatttcagacgtcttgaaaagaccattgatgaagttttaccttatgagccaatagaaggcaattaa

SEQ ID NO: 245096 - DNA, 1104 bp, Klebsiella pneumoniae
atgataaataaatggtttttgcttaatggcccacatcgcctgagaaacggcctgctgctggcgacggtgatatttatcacgggatggctggcattcaaacccggcgcgtatcagtattcattaaatgacagggagaaagtgatggtcacctcattattgcagcaccccgaaacgcggtactttggtttttattctgtggcgcttccggctgaatttacgccagccgggatggtgatgtttatccagggttcagcgatgaccccagtggaaacaaaacggcaatacttccctccatttcagcagttcttgatacgacatgaagaagaactcagaaacatgcaacctcaacttcctcaagatgcgccttatcttaaacagatttatcaacttccttctgacatgaaaggaaaaatatttgaatatataaacacaaattcaatttccgatgtattcagaacgcttgaggcctgtaggtggaacgatggagtatcctttattataaaaatgaaagctcaggattctcgtgataaaaaatatgacactaaaagaaaaatatttagtctgaaatataacatccctgagaaaaaatcacaattactggctattctgtcagggttgcaaccccgccaggataatcagcgcccctcaggcaatcagttagctattcagtatgggcaggttgatgcctcactgctcgggcagtatgaaacttccataaactatcaaaacagcaaagaagtcactatcacattaaagacagataaccatagttataccggcaccccgttgctggataaggacgcccgggtggtggaaacagaatacggagaaaccctgtacaaaggcaaacgtaaggtcaacggccttgagatttcagaatggtggacgaaacagactgatagttattatgcaaaaccagccataatttataattttgaactggttatccatcaagataagaaagaagggaataagctactggagttgtcgatggattacaccgttgacctgttgcacgcggataacgcattaaccgagaacgaactggtagcgctatgggaaaatataaccgaaacaattaaatatcaccccagccagtggtaa

SEQ ID NO: 245097 - DNA, 126 bp, Klebsiella pneumoniae
atgaatatttattgtctgatggtgagcgtacttataaaggaaaagttggcgaaattttacaacatgataatattacacttcttgttgatgaaatcgatgctgagccaggtactgattttgatatag

SEQ ID NO: 245098 - DNA, 513 bp, Klebsiella pneumoniae
atgcataaatccatcttgcaggatgtaaagctctacatagccttcgacagtgaagaccattacgtcatggtgaacaaagcctccagtaacggtcagtggtactgtaccgactgccattgccctttgaagctgtgtaacgatacaactggagaagaagtctggtttgaacatgctcccgatgatgagacaacgaaagcacaggcgacgggatgtggctatctgttagctgcaatcagaaagcgggttttcatgatgcgcttacgcacgatgattaacgaactggatacgctggtagcaacgagatactggttttgtgtgtggtgccagtcgcactaccaaggggaaaaacactgtaagacctgtcaaacggggatttacagtatcagcaggggggattgggcttggagttataatcaaaagagaaatttaacggatatcaacgacaccgttagctatattagctcagatttacgcaacactttagtgggactggaccagacagttctgacttaa

SEQ ID NO: 245099 - DNA, 216 bp, Klebsiella pneumoniae
atggatgctcagaacaagactacccgcctgcttgacgataaaatggttaatatggctttcattaccagctttaccggattaacggataagtggttttacaagttgataagcgaagggaagttccctgagccaattaaattaggccgcagttcccgctggatgcaaagcgaagtggaaaaatgggttcaggaacggattgaccagtcacgaggttaa

SEQ ID NO: 245100 - DNA, 666 bp, Klebsiella pneumoniae
atgaacaagactctcctgaacaaagctctcaagagcaaggttgtccagagttatggaccagtttacccaatctacgtgaagggtatttacgaaaccattaatcaagccctgaatgagtgtccccgtttactggctgtacgttttgacctcagactaccggatgaagacttgcgagattgcctgacgaactataatcccgatgctggagccatcacccgtttcatcgcttccctggaagccaggatagaagccagtctcaaacgcaggaaaaaagctggtaagcgaacctttccgtgtgaggtcaggtatgcgtgggcaagggagttcaatgctgaaggaaaaaagcattatcatgttttacttatgattaacagggatgcgtatctcggttttgggggatatggaagaaatctgagtgtaggtgaacagccagagggattagctctaatgatttataaagcctggattagcgctatagggctggaaggtatgaaatacaaaaaactggtgttcttccctcccagtaactgctaccacctcttcaaagatagctaccgttacgaaggggaatatatcaggctaatgcagagagcactttatctcgcaaaaaagcgcagtaaaagcaacgaagatggttatcgtaattttggccgttctgtcaggtaa

SEQ ID NO: 245101 - DNA, 951 bp, Klebsiella pneumoniae
atggctagtaagaattcaataacaacacatatcagtgatgatttagtctatagtgtaatagaaagagaaatagcgaaaacaaagaaaaatcgctcggagtttttacgtgaaatactagaaaaagaatttgctgcacaaattgaagagcaaaaaatacatttaaataatatgtattcctataccagatattctgatgcttcaagcgtgtatccacttaatgtgacgattgattcagaacgacaagttacgagtgatggttttactcgattcaataaaattgatgaggttctatatcatgaatatgaatctcatttttttggtatgatgagttttagcctgaaacaaatgataaactcgataaaaaacgaagttcaagggttgattgctggagtgttcaaagctcagtggtttaatatcgagtctcagtacgatagtgcggatataaatcttgtttttataaacagagttgatgtaagtcttttcagccataacgatgggaaattttatgtgagaatgaaaattcactttcacgtttcaagatttctttttagtgctgttgataacgataaggatttcctgcgcattgacttccttaatataaaataccttcgctttaaagatgttgcaatcaatggatgcttatctaagcagtatgaacgttatctgtatttaaaacctaccaaagaagtattacttggtggtttttttgctggtcttttgtatagacctaaagaaaagcaggatttgatggcagaaatttgtgacctgctttccgaacagaattcctctaaaaacggtatgctggaactaccggataagtttgtgaaaatacatatcaatagtgaacagattaaagtagatcggcgctctttccgaaaaggatttcagatgtttgaagaaagaagaaaaatacttcatgcagaaaaaaataagccatcgtggttaaagtga

SEQ ID NO: 245102 - DNA, 267 bp, Klebsiella pneumoniae
atgaaattaaccaatcattctgccatgcatcaaccggactcaacacaactgaatgccctgtggcaagtattgaaaaacgctgacgttatagaagcagaaggcgaatcagtgatagataagccattccgacactttccagcgggtaccgctgtcctcgagatttggctgtggtttgaatccgtagacgacacgttctccgtagctgcaaagctatataacaccgaaatcgttctggcctgccataaccagcctcctcgtaaaaactga

SEQ ID NO: 245103 - DNA, 480 bp, Klebsiella pneumoniae
atgaaaactacgttaccccctcccgtggctgaaatgtcaccttacgcgcaacgtaccatcaggcgcgccctgaatattatccgtgaacatctgaacgaacccggagaagcgtttacctccagttgctcactacggaactggctacgcctgcacctggccctgctggagcgtgaagagttctctcttctctggctggataaccagaaccgcctgattgctcacgaaacgctttttaaaggaaccatcaacagcaccgaaattcattcccgcgaagtcgtgaagtccggccttaaacataacgctgccgctgcaatactggcgcataaccatccctcgggccatgcagaacccagcaaagcagatcggcaaatcactgagcatctgaaaaccgccctcaaccttgtcgatattcgactgctggaccatctggttattggtgggatggatatcgtttcatttgctgaacggggctggttataa

SEQ ID NO: 245104 - DNA, 336 bp, Klebsiella pneumoniae
atgaaaatggataaagaaaccgacacagtacggtggggactcaaccgacccggttctcctcaacttggtgcacgtctggtacaggaaggcaaccgcctgcattatttagctgaccgcgccggaacaactggcgcgttcaatgaagaagagtgtcaccagttgaatagcgcatttccgcactttatagagcagatggaattgatgctgctctctggtgagcttaacccccgccatgcacatcgcgtaactctgtaccacaacgaactgacctgtgaagcggatacgctcggtagctgtggctacgtttatatcgctatctatcccactcaacgttaa

SEQ ID NO: 245105 - DNA, 339 bp, Klebsiella pneumoniae
atgaaaactcttcctgcaaatcagcgggtggcgaagccatgcccgccgcctgtgctcgtctggcaaacgctacttacacgcctgctggagcaacactatggcctgacgctgaacgatacgccgttcagtgatgagaacgttattcaggagcatatcaacgccggtatcacgctggcggatgccattaactttctggtggaaaagtacgaactggttcgtatcgatcgcagggggtttaactgtcaggagcagtcaccttaccttcgggcggtagatattttacgggcacgacaggcaaccggcctgctgcggcaacgccatcatccttcggcacgctga

SEQ ID NO: 245106 - DNA, 750 bp, Klebsiella pneumoniae
atggcaaagctaggtttcttttttcttgctcctgtttgggatgcggtaatgtcggtgagtgaaatgcgtacactcatagagcatacagaatggtctattgcccaagcaattacagaggttaacaaaccgggcgtagtacaaatggaagaggtcatcatagagtatgatgatgagcacagcgactatcatcagtatttttactataaaggtgtttcgggtgattcagaggatgaggttaaggccacatacatatatcagctttcgaagatgctcagatattcagcttttatggtcctgtacggcctctttgagtttcatatggtgaagtgctacgagttaatgattaaagcgtccggttatgtggaaacaaaggctgacactcaaaaagcatttttgcagaaagctcacaatatacttaataaagtcattaattgtgggccaggaaatgatattgaggatgttgaccatttgaggcatattcgtaacaagatcgcacatcataatggagaagttattgaatatggtcaggacccaaatagtaatcgagctgttatcagggccatacggcggacaatacaggatggtgttctgcgcatgaatggctttaatgaaatcgtattaaatagagaatttttgccttactctgtaagtcaaattgaacgatatctcacagagatgaaagtttctgtgcaggcgtattatcaaagcaatcaagccgaaagaagtgcaaacgtgtcaagaatgacataa

SEQ ID NO: 245107 - DNA, 1734 bp, Klebsiella pneumoniae
atgagaagcttgagatttcagcgattggttctgatatcagattcgaaaagacttgcgaatcagttcacgtttccgaagagattgaatctaattaccggaaaagataatagtattggcaagtctacactagccaagagcttattgtggtctctaggatgtgatccttctatcgatgacgattggagatctaatgatattaaatcgatcctatattttactataaataataagaaatatttctcttgccgaggaagtcactcaataattttgggaactatcggcggcgaagcgaaaagatatgcgcatataacaggtgacttttcaaaagatctatcagatcttgttaactttaagatgaagcttcctaatcgtagtgatggaagcttagaaacacctccgccagcatattattttttaccattctatattgatcagataaaaagctggagttcaccttggaattcatttgaaaatttagggcaatatgccaaatggaaaaatccgttaatcaaatactttactggttatcttaaaccagagcattttgagattgaagaaaacatttatgaattcaatgagaacaaaaaggagtcaggagtaaaaatagagaaatttcaaagcgcagttgaagttatagtagataactccgctgattcttccatagccttagataatgaggagttcagtaaaattcaagaagagataaataccgaacttctccaattgatcgactaccaaacaaggttgtatgatgctcaggctacgatcacttcaaatatttatgatctcgaaaaacagtatgagttagccattagttctgcaaacgaactcgaagaagattataagtttgcagtagagtccatacctacggataatttagagtgtccattgtgtggtactcttcatgataactcattacctaacagagcactgcttctttcagaaaagaattctctgcttgatgaggcaaattcaatagcatctaaaataatgcaacttaaattatctttagctgaattaaatgagaatgctcagtttgccacgaatgaaattgatagaataaataagaagtacatcaccaatggcggtgtaaatcaaaaagatatcattgctcaagtgatagataatatatccactgaaaatgtctcacgaagcattcaagttaaaattgatcatgaagaactaaaaatcagcaaggccaacaattctattacagaattaaaaaaagaacagaaaaaaattctttcaaccaaagagaaggaagaattgaactcgtcatttattttaaaattgttgggaaatattgaagcactaggttccacaggaataaaccttagcaaagttaaatcacctactgattacaaacggttgcttggtggtggtgctgctgaggctgccaggggattacttgcttatcaactctctgtactgcaacaaatacatgatataaaaacttgcatagtgcctcccttcgtcattgatacacctaaccagcaagagcaggctggacatcgttatgaaacaataattaaagaactaatgtgcagtgtccctcaagattatcaaataatattgtgtgctatggagaatgatgcattaaatgatttcaaacacgatgctaatgttattgaactgaattctaataggcttttagatgcttctcaatatgattctttgagagcagaatataaatccatccaaatgacagttacaggaaaatatggagaggaatag

SEQ ID NO: 245108 - DNA, 816 bp, Klebsiella pneumoniae
atgctgccagtattcgtaatttctctcgctgatgatatagaacgccgtactttaatatcaagagcgatgcatgaattatctattgattttgaatttatagatgctatcaagggcaaaactttgactcaggaagaattatcgcatctaaatttacgttttgttgagtcaagagagaatagaaaattagcctttggagagataggttgcactttaagccatattaaaacatataaattaatgctggagcgcgggattgaatggtgctgtattttagaagatgacatcattctcgataagcgttttggggcattcatagaaagacttcaattaaatgacctctttggatttgagaatgacatattatttcttggaggacaaaacggaacgaaagccagtaagtatatttcacgcagcgtatggaataaaaaaagtatttcgagtgaggttttctataagacaataaaaagtgaaaaatatctctatagaacatgttgctatctcgttaataaaaaagttgcaactaaattgattaatttggcttctaatgattttttcttagcagacgaatggcgatattttaaaaagaaggatattgtcaataagttctacttggctgatttcattaaacatccaatagatttagtaaacagccatattgagaaggaacgggccgtttcatatgcaacatcaaaaagtgttgcgccgatgaaattgcttgacagtataaaaaatattgtaaatgggaatgtttttttgctttggataaaagacacatttgttctttttagaacacaagttcgacgcttatacctgtaa

SEQ ID NO: 245109 - DNA, 819 bp, Klebsiella pneumoniae
atgaactcagccatagttgaatatcttgataagcttgataatcagtggaaagagatagatagactttctgagttggctaaaaaaaatcagcacgacactgagttatataactcattatgcagagcagccacggttttatgcgtatctcacctagaaggtttttataaggatgcggttaagtatttcatctcagatttaaatagcataaaattcaagtatttgccaaaggcgatgaagcgagtattctgccaggggtttgttggatttgataactctaaagaggcgaatgaaaaagtagaacggttgatcgctgaattcgaatcccatgataaattttctttaaatgaaaaatattttcttccagaaaaaaataaaaaccccaaaccttcagtcctagagacagtttgtagttcactagggacaaaggatctttttaactctttggatggaactattttcgataacattttctcaatgacactcaaggaaatttccagaagtgtttacttgctcaacaagaaagttaaaaagaaaatgtcaaatttcccatgcaatgttgatggttatattttcaaaaaaataacagaacagaaaccctcacatcagaatggtgaaaaatcgaaaagaaggacgttatgggaggattttttagatgacctaaatactaaaaggcatgacatcgcgcatggtaataatttcgataacaattcaagtcatgactggataatcatatcgaaagataaatgtcgaatattacaacttgtatgcatattaataattgccactaactcttatattgagccaaaatcagaaatatag

SEQ ID NO: 245110 - DNA, 1071 bp, Klebsiella pneumoniae
atgtcattcaagtttgaattaagtgaattgcaaaaaaaagcaaaagaaagaaccgtgaaaactcagaatattgaatatgacttagaaacattagtcaaaaaaatagataggaaagtaataaagttagatcctgactatcaaagaaagcatcgttggggcgatgatgcatcttctaaacttattgaaagtctaatattaaacatacccattccttacgtttacatctctttagatattgacgtagacgatgaaattgatgatgatgggcagtatcgatattcagtaattgacggccagcagagattaactgcgatttataatttcttaaagaatcaatatccacttgtcgaccttgaagttttagacaatttaaatggtgcgtactacaaagatctacctccattcctcataagaagattagaggaaagaactttaaaatgcttaagaattgattcaactttagatcaacaagttaaatacgacatatttgaaaggttaaatactggggcattaaaactagaatctcaagagcttagaaatgccatttatagaggcccatttaaggatttaataaaagaactttcaatgcttcctgattttatttcaacttgtggcttaagtgaatcaaaaaagaaaaaaatggaagaccaagagctgatattgcggttttttgccattaattacaatgacggatataataattataagaaaggattcaaagaattcttaaataccacaatgcaggaatttaaccagctagatgatgctgatttaaaaaaaatgaaggacacatttattagaaccttcacaaaaataaaagaatcaaatattaaacttcctttttcaaaatggaaaattgaagaagatggcagtttaaaactttcatcaaaattcaatgcttcggtttacgattctgtttgtcatattttcatgaaaacaaacaaaaaaataaaagacgatgacttaagaaatatgtttttatcacaagattattttgatgcttgtacgggaagtgtcaatgatatatctaaaataaaaactcgcatggaaaaagctgaagaggtggcataa

SEQ ID NO: 245111 - DNA, 174 bp, Klebsiella pneumoniae
atggaaattgatctcgacaacctggtcttcagcggcctggatgaagcggaagagcgcaacgcggagcgtctggaagaagcggacaaaaagcccaggcgatcgttgccgacgacgactgcggcgacgcctgcaaaatctgattgtcaaaccggccagcaggccggttttttttga

SEQ ID NO: 245112 - DNA, 1863 bp, Klebsiella pneumoniae; identical to SEQ ID NO: 193823

SEQ ID NO: 245113 - DNA, 378 bp, Klebsiella pneumoniae
atgcaatttggaacatttcaaactctgaacgggaataacagccacgcccgttataaaatcatcgctcacgcaagtgatgcaattatacaggataagctgatccgtgtggaatccggtattcctgccgatcttatcgtaggtgatctcgttagcacatcaggagcgaaagctgccacccctggtgacattgcgtatgttgtcgtagaacccgcaagcgctggtgataaggcgtttattgtagcttctccagagcatactattttagccctggttggcgttgaatttggaagcctgaataaatctctggctcaagcgcaattagcgactcttggctttactttcacagactacgacaccgtagccctccgcacaacctaa

SEQ ID NO: 245114 - DNA, 225 bp, Klebsiella pneumoniae; identical to SEQ ID NO: 189965

SEQ ID NO: 245115 - DNA, 318 bp, Klebsiella pneumoniae
atgcagaataatcaccctgaatggctaacagacgtcctgcaccaattccactatgaacatcacgccccactcctgaaagccgtaaacactatgcagcaagacaaaaccccacaaagcctgatgcaggtggtggcgcttatgatgacggcttgtagcgagttagggagcatctctacagcttgtatgcaggttgaagggctacaggatgatccggcattgctggaagagcttaacgaacttgtagcaagcattcaggatgttaaagatcaagttgatgaaattattgaagaattcaaagcccttggtattacagagtaa

SEQ ID NO: 245116 - DNA, 210 bp, Klebsiella pneumoniae
atgattgaagaaatcacacaacacccacattttaaagaacgagttgaatacgtagaatacctattcgaacaagccctctctctcgaaaaagaaaataaaatagaagagatctcacttatcattgatgtgctggctacagaggccgcgccattcctggcagggattcaggctatcaaaggtattaaggagcgtatgcaagatgcagaataa

SEQ ID NO: 245117 - DNA, 381 bp, Klebsiella pneumoniae
atgagtaaaaaagaacgtaatactattacccgccttgagcgagagaacgtaaacagaatcaaatcatcccgcctctacattaaatctcttgaggaaatcccaggggaattaatagaacacgttgaagaagtacattcaacaccgccctctgtggaagagtgggccgcgttaaatgatcttctcgaaagttcgagcggagtgtattacaaaccacgtaaacgcaaagtttatagttgggatgattcaaatttaaagaaatggcaagttttgggctttacctctttatgccattacctcaatttcaacgcaatgaataacaccgtagccggagtgagagaacttgacggcttatttttaacggagaatgacaactatgattga

SEQ ID NO: 245118 - DNA, 282 bp, Klebsiella pneumoniae
ttgaataaactatacctattgaacgaagccacacatcatcaaatcgaatgtaacactgtgtgccaacgtctttataatcacctggcatctctgcacagtgataatggaaaattccgctccagcattaaacaattatcaagcgctctgggctacagtgaatccggtattaggtattggctatctctgatgcaacaagccaatgttattacgctcactcgtaagagcaactattatgatttcgatgtgtctcacaatgtctctttcatcacctctaacaattaa

SEQ ID NO: 245119 - DNA, 810 bp, Klebsiella pneumoniae; identical to SEQ ID NO: 193822

SEQ ID NO: 245120 - DNA, 195 bp, Klebsiella pneumoniae; identical to SEQ ID NO: 193820

SEQ ID NO: 245121 - DNA, 816 bp, Klebsiella pneumoniae; identical to SEQ ID NO: 193819

SEQ ID NO: 245122 - DNA, 717 bp, Klebsiella pneumoniae
gtgttactaaataaattaactgttgaaaaattccattcgataatggaaagtattcttgagcgattagagaaagatgactatctctcatgggattttatcaatcggttatccaaaaatggatgggttcccccattagcttttgattgttatgattactttcaatgccctttagcagaattatcagataaagaaattgaattagggttcatgagtttttttgaacttaattttgaaagcgtatttctcaaaataataaatcttgaagaggaacaaaatccttttatccacaagatgttagtagaggtagttcaagcatacaggcaagggttttatcaaatctgtattccttcattatttgcaatacttgaaaggtatttggctgatctttcaaatggtggtgatttaagtaatgtgaagtatagtatgggtttggcacgaaaagtttggattgaaaacgacgaggatggtcaattcattgaaaatgatagtgaaattccttatcaatttgtgcagagtatctatttaattaaacaattcttagataagtattttatgaagattgattttgaaagttttgattcgttgaataggcacgcatttgcccatggaagacaacaatactacgcaactcatgttgatgttgtaaagttaatttttgttattacaaacattattggtatgtattatgaaattgaattcattgcttctgaggaatag

SEQ ID NO: 245123 - DNA, 1302 bp, Klebsiella pneumoniae
atgaggtacagaactcttccatacacgtttcaacgaaacggaaattactatctgcaaatccggctttcaaatggcaggatgtataaaaaatcccttctcactgatagttatcgtgaagcatctgctttgatggttggtgttattccgcacattccttttgttaaatcattagctacaccgatcccgatgtttgatgcttttgtgtcaaacctgattgtgtcagaacgtaagtctgtgaaagttccgcagttgctcagtcagccaattgttgtacctactgaaatcgttgagccagtggcacaagttgtatcggaaagggtgctaaccctttcggatgcgtgggcgatgtacaaagatgaaaaagggcgcaactggacaaaatcgatctcaatggcaaatgagcgttacatagaagtgttgctaactgtcttgggaggcgaaactgatgtaatgatgatcacaaagcaggacattaagcaggtgatggaagttgttgagaacctccctaagcgcgttgtacagccttatcgatcaatgaccatccagcaactgatagaatgtgatgatgtgccaccggatgatctcgtgggtgttgaagctattcataagcacctcaaaatctacaaatccttgtttaaaacttttctcactgaaagcaaagacgttttgcagaagtccccaactgatggagtagtggcagcaccttcaaaagcgaggttcggtgcttacagcacagcagagatgaaaaagtttgtggggtgggcgctaaaacagcctgacaactggcaaaagtggatcacattgctgttggcatacaccggagccagaagaggcgagattgccaaactggagaagtcacagataaaattcgatgaggacagccaacggcattacttcctgattgcagagggagggcaggggaaaactgaaaatgctaccagacaagtagtgatccactcgaaattgatcgaatggggatttatggactacgttgatcgccaatggaaggagcggattttctcagaagttgcaggaacgaacatgacgaagataggaaaaatgttttcagatctccgtgatcagcttggtattgcgtatctcgatgattacgggcaaagacgacttttgcacagtattcgtcattctgtttgctctactgcgatggctggatgggtaaagaacattctgcatctacaacaaacggttggtcacgagaaaagtggcgggattactaaacgctatttacatacatttccactgcaaagcatttgctatgtgatcgatggtttaaactgggaataa

SEQ ID NO: 245124 - DNA, 213 bp, Klebsiella pneumoniae
atggctaatttacccccccccattacacacgaaaaagtgcaggtcgttatgacaattgaaaacggccaggtgattgatacccgcaaagttcgggataacgagctgattgccagcatggataccttcttctggatggcaaagaaagcaggttatcaggtaatcgcccctcaccaggaggaaatcagtggcactaacagcaatacgcattcctga

SEQ ID NO: 245125 - DNA, 210 bp, Klebsiella pneumoniae
atgtggcacccaaaagatgacgaagatatagagtgcgtatcttgcgaaattgaaaaccttactgaacttctagatcttatgtatgccagcttcgaaaacatgggagaaaaacaactctttgtgcttttaggtttagctttgaatttatcttcaaatatttttctttggatcaaagaagaggaaaggcggcgtgaaaacaaacctgattga

SEQ ID NO: 245126 - DNA, 456 bp, Klebsiella pneumoniae
atgaacgaggaagtaacactgaccgtatttaaaaacagcccgcacatctgggctggcgggctggaaggggaagacttggcaaaatggcttatgggccgtgcgaacgcaatcatgttcgcggaagcacaaaaactcaaattaagcgaggtaaagggtctgcttatcgagctttgctcacctcaatgtctcagggatgcttacgcagtccttgggctatctcagagcgcgtcggatcccattcatcctctgagcacggaggcaattcagttcgataaggctcttggctgtggatttcataagccatcccacttgtcactgaatctggtaactccagtgcttccggtgggatttgcactcctatcagatcttcgtgaagtacaagaagaatatcagcgaatgaaagctgctctatctgagtcggcatccatccagttcgagcaaaaagcaagtgattaa

SEQ ID NO: 245127 - DNA, 183 bp, Klebsiella pneumoniae
atgatgaacggtcaggcccaccaacaaaagccggacgtcgacaacatgattaaagcgctgatggatgccctgtatgccgaagatgcacatatctgggatttgcgggtaacaaagctctggggtgaatccggacaaattttaatttctgataacgacagcgcgggagataacaacaatgcgtga

SEQ ID NO: 245128 - DNA, 993 bp, Klebsiella pneumoniae
atggatatcaatgagttccgcgagtttttacaggcacaccaggatgcttacgcagcttgggggcagtttgtgtctgaagaaatttgcaacgcacttcgcaactccttaggggatgacaaggccaaactctttctaaagatccgctcagaaccaaggctaaaaactatcgcctcagcattaggaaaggtcagccgaaaaggctatgataatccaatggtgcaaatgactgatttgattggtgtgcgttttgtagtcttgctctctgttgaaatcagaactatcagtgacataatcgagaactgcgataaatggcatgcgactgtttctaaagactatttatcagaaattgatgttaaccccaaaatttttgactatcaatctcggcattacgaagtaagaccgataactcaattcgactaccgtggtgagagtataacgccggaaatgtgttgtgaggttcaagttagaaccttgcttcaacacgcctatgctgaattagttcatgacagcatctacaaaccttctggtgatgtacctaaatcggctgaaagacagatagctcgtagcatggccttaatggagacaacagatgatcttttttgcaaaacaatggaaattttggccgataatagcaaggaaagaaacaagcttttagaattcctttcaggttattactcagaaaaaattggcaagcaatacattgatgaagatttacatgttaacttctccgtcattgatacctttaaagagcacattgacgacaatctgccaaataaaatccacgtgctactcagtgagaaaaaatacattccgatacggataataaatagagttgagtacaatcctctattcactcaaccatgcatactgtttgtatactggctagcaagccagttagactctggtgaattgctttcacactggcccttgccgggcaatattagtgggctggagttagtattaagcgacctaggaaaaagcatttctcgttag

SEQ ID NO: 245129 - DNA, 1086 bp, Klebsiella pneumoniae
atggcgagtgtagactttagctttgaggggcttcttatagagagaattatcgcacacagggtttttcctaaaagtgctgataaatcattaactcccccaaaaaccagcaagtctttaatggcattcaaacaagatgcattagatgcttttcaggtgaggattactgaagctttggcaagtaaatctcatggaattgaaatgtctattggtggtgttggtgatgattgttttttaaatttgtcggcttcaacgttttctaatgatacagatcatttcatcaaggttaccgaacggcttgcaagtaaacttagcgaggcacaatacaatagttcggctcctggtgggatcttagctgtattgtcgggccgtgttggaaatgattcacttccattccttgcggtaataaaagctgaaactcagaatggttttagaactgtggaaaatgatgatcaggtgacaatggagtttattgcagaacttcttttaacgcctgcgcaacgtttttataagattggctttatagttcaaactattgctttacctcctgataactatggtaattataacagctcatcttatcgtgcttttttgttcgaccatttaatgacatcgactgaaacaaaaaacgccgctgggtatttttactcccgattcttggatatggatataagcaagtcatcaaaaaaacttactcaggatttttttgagagtaccagggacttcatcaatactgcacaaatagaggaaagcagtaagcttgcgctacatgaggctttaagaagcgaaatgcgctctagaaagaccacattaagtactgcggatttcgctgaaacaaatctccctgaagaaatgcagagtgagtatttggaatttatgaagaacaaaagcttccctgcagcggcagtgactaaagacaacggctatattgaatccaagttaaaaataagaagcaagctcgtattctctaatgatgtatgggtttccgtgccaccagatcaattaaaaaatcttgtagaaattatcccatcggatgataatgaatcaacgattttgaaaataaaaggacggcttaaaagtcaacaataa

SEQ ID NO: 245130 - DNA, 132 bp, Klebsiella pneumoniae
atgaaatgtataaatacttgttcaattaaaattgtgaacaagtatttcttttcaagaaatcgttcagaaatctatgtcacgttaaaattactgcagcatcatcatattattcagctgcccatcgcctcatag

SEQ ID NO: 245131 - DNA, 771 bp, Klebsiella pneumoniae
atggattgcgcatgcgcccttgttgcccggggaagaggaataaacgacgtctgccgcagtattggtgtgtcgcgtgcgcagctgagtctcagggtcaaccgctcaccagactggcaggatagccggttgcaggccagctttgatgatacggctgtgttatcccggatacatgcaatggtggcggaactgcccacatatggctatcgccgcgtatgggcattgttgcgacgacagtcggaacgggaagcgcttcctgttgttaacgcaaaacgcgtgtaccggattatgcgcactcaccacttgctgctggagcgcaaacccgctgatcctcagcgtaagcgtgcacataaagggcgcgtgtcggtcacggagagcaaccggcgctggtgttcagatggctttgagttccgttgcgacaatggtgaaaagctgcgggtcaccttcgcacaggactgctgcgatagggagatcatcgactgggcagcgagcacaggtggctatgacaaagaaacggtgcaggacgtcatgctgggtgcggtagaaaaacgcttcggccagcatctgccgtcagaaccggtggagtggctgacagataacggttcagcctacagagcgcatgaaacgcgggcgttcgcccggatgctgggacttgagccctgcacgaccgcagtttgcagcccggaaagtaatggcatagcagaaagcttcgtgaagacgataaagcgggattacatcagtgtgatgcaaaaccggacagccaggcagcggtga

SEQ ID NO: 245132 - DNA, 225 bp, Klebsiella pneumoniae
atgaacaatcaaaatactaccgcagacatcgattttactcacgataaactggtcgacatggccttcatcacatcttataccgggctgacagacaaatggttttataagctcatcaaagacggtgaattcccgaagccgattaaattgggccgcagctctcgctggactgaaagtgaagtaaagacatggttaaaacaacgtattgaagcatccagagggcattag

SEQ ID NO: 245133 - DNA, 615 bp, Klebsiella pneumoniae
atgagtaaaaagggcataatcaaaacacaatatggtgatggtatcgaaaactatcaaaaaagaataaaagaaactatagtaaaatctttaaacatccaccctcgtacagcgctaattagacttgacctgaggtttcccagggaggatatgttttatcgtgatgatcctgccgttatcactcgattctttaaatcacttaatgaacgcatccctgtttatcttaaaaataagcgaaagtcaggtgtaagggcacataatacaacattgcgttatgtctgggttagagaatttggtaaacaaggaaagcactatcatatcgccttattagtcaataaagacacgattcattatatgaatgcatttcagactgataaagggaatttttatacaatgattgctgattcgtggctaagtgctctggaaattaacaatataaggaaaagatgtctcgtccacttaccacttaactgtacttattatctttataaaaaagatttaataaatggtgatattgataaagtttatgagcctatcaaaaatcgcatggactatttaattaaagtcactcaaaagaaatcagatggggagcgtaacttcggctgcagtgtgaagtga

SEQ ID NO: 245134 - DNA, 174 bp, Klebsiella pneumoniae
atgtcgctactaattgctactgcagtgtggagtactgtggttagggtgttttataatgtgttagatatgaagtatgagttttttattattgatatgtcatcgttggtagtgatgttaataatatggattattgtgggtgttagtatatattactataccgacattatttcgtaa

SEQ ID NO: 245135 - DNA, 942 bp, Klebsiella pneumoniae
atgcaaactcagattagagtaaaaaatctccgggaatgccgttttttctttatgtatataaaagataaagtattaaagtcagcaagcatcgtttttgatattaataaccctgacatcgctctttcagagcgaataataaacaacactcttgaacgattttatccagatgctccagatcgtgcgttattcattagagaaatggagttaatcttaagtacgacggttctcccggagaaatatttttcatggctaaatgatgacaaaagggcagcttactggttttggggtaatttatgtaattaccctgattttaatgactcgattaataaaaaaattaactcaactaattatacaaaatggtatgaactggcaaagctaactttagtcccaacagatcatagcgaacgatataatgcaataattactgtcattgatactatttgcatatataccaataaatctccacttataagagagtggttgaacgataaaaaactattctggggggaagcaatccctctgttgagtaaatttaaatggctgactccagatgatgaagattccagtaggtggataattaagcttttgggcggataccagaaatcctattgcgagggtaacaggagtgttactccagtaaaaataccatctcctttgagtgctgaggagtgttattataccgtatatgctcttattgatctgtggaaaatccccactgattatcaggataaaataataaccagaatcaataaggctttttatcaaaaaacattcaggaaaaacctctcaattcaaaagaatcgaaaggatatcagcgaagaacatcaaaaaagactggatacattagttaagttttatcgttctgatagaatgtcagttattgaaatgctcattgatgacagattaagaggtgttgaaacaagaatatcaaagtacaaataa

SEQ ID NO: 245136 - DNA, 741 bp, Klebsiella pneumoniae
gtggaacataaaaaaaacaatgacgatgccgtgttggcggtgatggaggacatcatcaatacgtttgatgagtatgtcgtctgtttttcgttcgcgactaagggcatcgcgaaacagggggaagaactagcaaaacactcctatgaaaaggggcaccgtatctggatcgggtcggatgtagcaacaaatccaaagatgtacgcaagaatagacacggtggagtgtattgagaaatgcaagaaagatggctatttctccaacgagttagcaaaatccttgctaagtatcatgtactccctgtgggatgaggtttatcgccaccggctcgctaaagttactggcttagatgctcagtatattgaatgccctttaatgggcgacttacgcaaaatccggcactgcataatccataacaagtccattgtgccggacaacggaattcgatttgaagcgctagagtggttgctcccaccaagagaggaattggtggtgacctacaagatgttcctggaacttaatgatggcatacgaggggacaaaatgagaatccagggctggagaattccaccactgttacaggaagttatgccacaaatgtctgaaaaagaaagaaaagattttcatgcgttcttcaagaaaccggaaaaccgaaagaataatgtcgaatggccaggtttgggaaaatttttaggccgaatcaaatactatcagagcaaaaacgatagtagccccaaagcctga

SEQ ID NO: 245137 - DNA, 1836 bp, Klebsiella pneumoniae
atgctgacagcgactccgattcggacagtgattccgactccgacagcgactcggattctgacagtgactccgattcggacagcgattccgacagcgactccgactccgactctgacagtgactcggattctgacagtgattccgactccgacagcgattcggactccgacagtgattcggattctgacagcgactccgattctgacagcgactctgactctgacagcgattccgacagcgactcggactccgacagcgactctgactccgacagcgactcggattctgactccgactctgattccgacagcgattcggactccgacagcgactcggactctgacagcgactccgacagtgactccgattcggacagcgattccgacagcgactctgactcggacagtgattccgactccgacagcgattcggattccgacagcgattcggactctgacagtgactcggattctgacagcgattccgactccgacagtgattcggactctgacagcgactccgattcggacagcgactccgattcggacagtgactccgattctgactccgactctgattccgacagtgactccgactccgacagcgacagtgattcggattctgacagcgattccgactctgacagcgattcggactccgacagcgactcggatgctgacagcgattcggactcggacagtgactccgattcggacagcgactctgactctgacagcgactccgattccgacagtgactcggattctgacagcgactcggatgctgacagcgattcggactctgacagcgactccgactctgacagcgactctgactctgacagcgattccgactccgacagtgactccgattcggacagcgattcggactctgacagcgactccgattcggacagcgactctgactccgacagcgactctgactctgacagtgattccgactctgacagcgattcggattccgacagtgactccgactctgacagcgactccgattcggacagcgactctgactcggacagtgattccgactccgacagcgattcggactccgacagcgattcggactccgacagcgattcggactctgacagcgactcggattctgactccgactctgattccgacagtgattcggactccgacagcgattccgacagtgattcggactcggacagcgactccgactcggacagcgactccgactctgacagtgactcggattctgacagcgattcggattccgacagtgactcggactccgacagcgattcggactccgacagtgattcggattcggactccgactccgactctgacagcgattcggattccgacagtgattccgactctgacagcgactctgactccgacagtgattcggattctgacagcgactccgactctgacagcgattcggattccgacagcgactcagactctgactctgacagcgactcggacagcgattccgacagcgacagtgattcggattctgacagcgactccgattctgacagcgattctgactctgacagcgattcggactcggacagcgattctgactccgacagcgactcggactctgactccgactccgattccgacagcgactctgactcggacagcgactcggactctgacagcgattccgactccgacagcgactcggattccgacagcgactcggactctgacagtgattcggattccgacagcgattcggactccgacagcgactctgactccgattccgattcggataccgaaccgcaggcaaataatgatacccatacggcggctatcgataccgtag

SEQ ID NO: 245138 - DNA, 1566 bp, Klebsiella pneumoniae
atggctgccaggcaaaacattccagcacaattacgcttaaagcaaatacagattcagagcttgaaagggatatcgaactgtaccataaactttcctgctgataagaaagttacggctatcatggggatgaatggttccgggaagtcgacaatcatccatgcccttgcctgctgctataaaccccttactgctacttcgaaagaaaataaccgattctccgatttttttactccgcatgatgataacaactggcgcgacagtggttttactgcccatttttatgcaggctcactgaataaccagggaaacagaatcatatttgtgcccacgccggcaccggatgacacctttacccagctctattctaaagtcgcccgctggcagccagtatatgcacgtcgcccggtcaaggaatccatatacctcggacttcagactctcgggactttatctgatgatcttgctgcatcccgtcatgcaaagtatgtcagccatgttttcgggcctgcacacctcaaacaaaaaatacttgattcaatgtgtagggttcttgaggctcattactccgatttgatggtctgtactacccagaagggctacaccttctataagtttaccaaaaatggtatctcctatactgagcacaccatgggagcaggtgagaaacgtgtatttgaagtgcttaaagctgcacatgacccctccattatgccaaatggattgctccttattgacgaacttgatgttctcctccatgagaaagccttcaaaaagctggttactgagctgatcgaaatagcagatgaatctctgctggaaattgttttttcaacccacagagaatctatcgttcagttcaagcgagcaatcaatatcgtcagtatatttaacatgggtacagggatccgcgcatttccaggtgtatcagctgatgcgctacgccagttgactgatgttcagccagaaatggtcagtgttttcgtggaagatgagctggcgcgtacggctatcaatgtacttctggagcgagaggctctgaccgataaggtgaatgttgagttgttcggtgcggcagaaaactcggcggtcgttctggcagggttgatgcttgccggcaaggatattaaaaaggttatgtgtgttcttgatggcgatgttaaccgaacagtcccggagaggcataaaatagtaaacaagtgcctgactgggacagataaaagagaacaacgtcgtgcggttatgacccggatttttgagtttagtcttgctgctttccctcaaaaaggtgctccggaatataatcataaacgctggtttgaagcgatagatcctgccactatttcggcagaagagtctgctgaatatatcaagcttagaggtttttctatgtcaattaacggactggcagactggcatgaatattatgaaagactgaatctttttgccagaaaatccaatatagaacataccgtcctgagctatatcagcaaatactctccggagtgggataattatatttcagcggtccgtcaggaaattatcgtaagagctgctgaactggaataa

SEQ ID NO: 245139 - DNA, 747 bp, Klebsiella pneumoniae
atgtatctcaataacgaagttatgtaccacgtaaagattaaaaaaggtgacattggacgttatgtcctgctgcctggagaccctttcagaacggatatcattgccaagtatcttgataaccctgttctgatagcgcataaccgtgaacataaaacctggaccggtactttgctgggagagaaagtaacagtcacttctaccggaatgggatgtccttctgctgcaatagctgtagaggaactgattgcctgcggcgctgatacgtttatcagggttggcacggcaggacgaatgaacgaggaagcaagggatgaattaatgataggtggtatagtcaccggcgccgttcgtgatgagggaacaacgaaacaatatgtcccggttgaatatccggcgatcgcgaaccgtcaggttgttgatgctctagttctggcggcaaaaaacctgaacctgaaatttggtgaaggtattacttataccaaagactcgttctacagtcatgttttccctgatatggcgccgctgggtgaagaggcaagaaccaagcagaatgtatacgctaaggcaaacgtgttactgaccgagatggaggcagcagccattctcgtggtttcatccatcagaggctgtcgtgcatcgggcatcatggcattttctgatgccatagatgcggctgccgctgtagacctttcctgccgtacggcatgtgaggcgataaaaattctgattcagtcagataagctgtaa

SEQ ID NO: 245140 - DNA, 645 bp, Klebsiella pneumoniae
atggcaatcattatgaatgatgttatcagccttctcaaaaatgctccgccagggattgctcgtggttttttaaaaaaaacttataaaacaggagattatgttattaggcaaggtgcctgtaacgatcacctgtgttttcttttacgtggcgaagtcgaagttatgcaggtcactcatgaaggaagcgaattcttaatcaaacagttacatgctcaggatgtctttggggagctggaaatttttgataaagcttttaaaaccaatgccgttatagctataacggcatgcgaagttgttaaagtcgcacgcgagtatgtctttgaatggatgaaacttgattccattttatcgaaatatcttttctcgattatcgtagagcgctatgtacagacgtgcacacgctttgatcacctgtcatctctgaccatcagacaacgtctgctgctgagcattgatagacatcttaaaaaaggtgatctggagaaaatgaagaaaagccgattaatacaggaagtaggcgtaccaaggagaagtctcaatcgtgttctcgctgaatgctatgcagagggacttatttcatacaaccggggtgtgtttgctgtaacaaaccagcctcgtctggcagaaattatatccactctgtaa

SEQ ID NO: 245141 - DNA, 723 bp, Klebsiella pneumoniae
atgaaattcataacattactacaatatgcgattccatcactcattatatttttgctaaacaaatatgtaccatctatagataattcagccgctcaattggtatacccaatcgtggttctagtaagtatttatatctcatctaagctcactgaatcagaaactaacgaaaaaatagaaaatgagaagaaagggattagaacaatatatttagagttactatcaagacaaaacaaaaggcactcgatagaacttggtgttataaaagataaaatcaagtccgaaatatcaagtgtaattcaggcagaaacgattaaaaaagtctcctccgtggaaagtgagttaacattagagaaaaataaagcttttggtgttgctcaaagaaatgaagagttacaggaagagattgaaaatcttatgcttgaaaacgattattatcaaagtgaaaaaataaaacacaatgatagttcgcaacgacttttagacctgatcaggggctttcatcataaccttgagcaaattcttaaaaaaagcaacattgaatctgatgagttggataaaataaatgaattgtctattgttttgcacaataatatagatgagttcaacagttcgattcaagatatagtaaggcaggaacaattaagaaatgttaacaaaagacagaaaaaacaaggggggtattcatttacatcccctttggttggcaataatggcttaaggtaa

SEQ ID NO: 245142 - DNA, 534 bp, Klebsiella pneumoniae
atgagtatttctgagttgggtggcgtattaaagacaatagaaaacataaccaacgtcaaagaggaaaaaactgatagcgatgtggcttactcttttggttcgctagactattacaatgatgaagtcggtataatgtcctatacctacctcatacaaacaagaaatgaggtaaagttagtaactttatcgaacagtttcgagtatgacacaattggcttatattccgataccagattatttaaaatggtgaatgatttcaattcaacatatatgggatacaaggcattcgtattagaaaaaaggaaggatgaaagtattattggcttgagtcttaagcgagatatgaacgatacgctttcagtaaccttcaacactgacttggttttttatcgtcatacagacctatctaaagaagaaacaaaaagatcatttactatttgcttaaatatcctcagtaatgcaccttcattattcagcgaaatgatgacaaagtatggcattcggcataaaaacatatctaacgaaaatatgtaa

SEQ ID NO: 245143 - DNA, 552 bp, Klebsiella pneumoniae
atgtatgagcaaggacgtctgctgcgcaataccgagcgcgggaagctggcggcagaggatgccaacctcagcgcgggcggcgtggccaacgccttctccagcgcctttggttcgccgatcaccgagaaagacgcgccgcagcttcacaaactgctgaccaatatgattgaagacgccggcgacctggcgacccgcagcgcgaaagagaaatacatgcgcattcgcccgtttgcgttctatggcgtctccacctgcaacaccaccgaacaggacaagctggcgaaaaacggctcttacccgtccgggcatacctctatcggctgggccaccgccctggtgctggcggagatcaacccgcagcggcaaaacgaaattttgaagcgcggctatgagctcggcgagagccgggtgatctgcggctatcactggcagagcgatgtcgatgcggcgcgcatcgtcggctccgcggtggtcgctacgctgcacaccaacccggccttccagcagcagttgcagaaagccaaagatgaattcgcgaaaaggcagaagtaa

SEQ ID NO: 245144 - DNA, 312 bp, Klebsiella pneumoniae
atgcgctttcttcgcccgcatctcatcgatgctggtttcacagatgtggagctcgaacgattcgtagagttcggtcaggggtttgtttccatgtcgcctgcgctcagggagctggaagccaaactgctcggtgcgctgctgaagcacggcaatcatccgatcctcgaaatgtgcgccaaaaacgccacggtaatcactgaccctgccggtaaccgtaagtttgtgaaaggtaagtcgagcggacgtatcgacggcatggtagcgctggcgatgtctatcggcgcgcagaccagtgatgaggtagaggagtag

SEQ ID NO: 245145 - DNA, 1476 bp, Klebsiella pneumoniae
atgcggccatcaccaagtgaacttaaagatgagatggacaaagtaagagataataaatttagaaagtatgttaaaagaattacgttaagaaatgttagaggttttagcgaagaagttatagattttaaaactccggtaacagctttaataggtactaatggaggcggtaaatctacgatacttggtgccgtggcattagcatataaaacagtaaaacctggaaagtttttcccaaaatcatttttcggcgatgaatctatgagtgaatgggaaatagagttagaaattactgacaaagatacagtgccagataggaatataactagaactgcaaaatttaaacaatctaaatggaggcgagaaagctttccggaaagagaggttctttatatagaaattcagagaacagtacctgcgggtgaactttcaaaattcaagcaattcttggctggaaatagagatgattttaacgaattacctctaaatgctgacactattaaatacgcaacagcggttctcgataaagatatcacgcattataaagcaattgtaaaacgatctgacccatcaactaaaatgtatgtgggtatagcaaacggtgctattagttattcacaatttcattttggtgcaggagaagcatcgataattgaaactattgatcgcatagaaaactcaaaggacaattctttagttttgattgaagaactggaaaatggtttgcatccagttgcggttagattatttgtacattatttacagaacgtctctaaaaggaaaaagcttcagatcgtatttactacacattctcaggatgctgtaaatgaactttcaccagaagcagtatgggcttcaattaataaaaaagcttggaacggaaaactgagcatcgaaagtttacgggcaatcacggggcagcagattaactctaaagtaatttacgttgaagatgattttgctaaagaatgggtagaaaatgctattgggcgttatgctccccgcattgcttctacggttaaagtttatacagctggtggctatcctaatgtaattaaggttagccattaccataatcagaaccctacgataactagtccatcaatagcattaatagacggtgatatacaaggtcgtccaggtgttggtgacttaccggaaaatgctaaatttttgggtgatacttaccctgacgcgattgtgtttaattttattgctaacaataaagatagacttgtatctatcctaaggcaacgatgtctgctgacaagattcactgtagaccgaataaatcaagaaattgcaagcgtggttaattcagcatgcgatcatcatttgtatttctctaatttgagtaataaacttgattttgcttctgaaatatttatacgcgctggtatgattgatgtttttaatgaggagaatccagatttttggagcgatataattgattttattacagagggattagaggtttga

SEQ ID NO: 245146 - DNA, 474 bp, Klebsiella pneumoniae
atgtccgaactgattttaccttcggtcttcccgatgaatgagcaacgtaccatccgtcgtgccctgcgattactggagaaatatcagcggcagcccagtgagtcgttccttgccgctagtttcgcgaaaaactggttacagctctatttggcaaagcaggagcgcgaagtctttgttgttatctatctcgataatcaacatcgtctgctggagcatgaaacgctcttcctcggtacgattaaccataccgaaattcatcctcgcgaaattgtgaaatctgcactgcgtcataatgcagctgcggtaatcatctcccataaccacccatctggcattaccgatgccagtaaagctgacagagccattacgtccaggattatagaggctctggggctggtcgatgtccggctactggatcatttcatcattggtgatggtgaagcgttgtcgtttgctgagcatggatggctataa

SEQ ID NO: 245147 - DNA, 324 bp, Klebsiella pneumoniae
atggagctttcgaaagcagcagaaaccctgaaagagctgggtcatcctacgcgcctgagcttgtatagagagctggttaaagccgggcatgaaggtttacctgttggcgagctgcagaagcggctcgaaatcccagcgtctacgctgagccatcatctttcctcgttgatatcagtttctctgatacgacaggaacgtcagggcagaacgctcttttgccatgctcgatatgaaaaccttgaggctctgattgccttcctgaccgaagaatgctgctcaggaactgacgactgcctcaccatgccccagaagacggagaactaa

SEQ ID NO: 245148 - DNA, 2709 bp, Klebsiella pneumoniae
atgtacactaatgtaggaagctattggtataaatttgattttcatacacacactcctgcctcatcagattacaaagcgccagcagaaacagcaaaagagtggctcattgccctgatggaaagagaggttgactgcgttgcagtaactgaccatgttagtggggcatggattgatatcttgaagcaagagctaaaagcgcttgaaacatcctatcaagaatatcgcccattaattttattcccaggatgtgaaataaccgtaagcaccgggcaatctagggttcatatattatcaatttttgacccctcttgtggcacagctaaaattaatggtgtgcttggcatgtgtgggattacggaaggacatggagatgcagagtcaacatgcgctaccgaatctgttgataaagtaattgagctgataagcaaggaaaatggaattgctattcctgcgcatattgatggtcctaaagggctattaaagggaataaaaaacaacaactcagaaataagtacatgggcaaaaaaaattgttgcagcagaatttgtcgatttaaacttccttgatagcgtagatgtagaactacaaaagacatttcaagatataggtagagttaaaggttctgatgctcacgaaaagtctagactaggagctaatacctcttggatcaagatgggaaaaccaacaattgatggtttaaggcttgccttatacgataataaattctgcgtaagtaacgaaattgacgatcctaattctctaccaaacctgtcaattaacaacctaacaattaaaaaaatgacccactgtggaattatcccaggaaaacctgttgagataaaactgcaccctctcttcaatgctataattggtggacgtggcgctggtaaatcaacatttgttgaatcactacgaattgcgatgggtagatctgaagagttagtcggcttacaatctataaaaagagatctagattcttttattgatggagttactagagatgataccgaaatcagtgtaggaataaagaggcgtgatgatttatttaatgttatatggacaaaaaataatgacattgaaataaagaaatttgaaaatgaagagtggcaagatgctccgggcaaaccagaggaaagattcaatataagcatttatagccaaaagcaaatcaatgccttagcatctaatcctgaaagtttactaaacatagttgatcgaacaccacaagtagatatttccagctggaaacagaaattagcttcccaacaagttacatcaattaatttagcaaaaagcattaggaaaattgagctgagcgctcttgaaaaaacctctattcaagctcaaattgatgacttaaactctgatatatccagctttgaaaagggtgggcataaagatgtttttaataactatcaaacgctatcaaaaaaacaaacaaaaatagaagatagtttccaaatagaaagtttgagcaatgcattacaatcaattattgattttaacacagtccctcttgatttatctaatttaggacatgagttagaaaatgaaaatgaagtaagtgaaattcataaaaatttcactgctgaaattgataaagtcatatctgatatcaaatcatcaaaagaaaagattgacaacattgtacagcaaaccgtacaagcactcgataactctgaatggaaaaaaaatagtaaaaaaatcattgatcggtataaggacgttgttcaaacttacgaaagcaaagggcatgaactgaaccctcaagaatatgaacaatggatcgaaaaaagaaataacacacaaaaacagttagatgaaatcgtagaagaagaaaataaacttgagtcttacaaaacagattttaatcgttcgatttccttgagttacatcttacgtagacgcctacaaaaaaaacgagagaaattcatccgttcagtaattgggaataataaatatgttaaaatgtcaatcattccatttggagataaaaacaatattgaaaatgatttccgttctattctaggttatagcaatgggttcaattcatccatttatcaagatgatcgtgaagatagtttactttataaagtgataaatgatggtggagatttaagaaaaacgataaaatatatctcagaaataaaggatactatattcaaaattgcagcaagtgaagatgtaactatacatagagtcgatggcagatttaaaacatcgttatgtgaaaaaataaagtcgcagccagaaatattagaaagaataattaattggcttccacaagaccgtttactggtagaatatgcaagagatgttgaaaaagggaagttcgcctcaattgacagaggttctgcgggacagaaagccgctgcaattctcgcattcctgttaagtcatggagataatccaatagtagtcgatcaaccagaagatgatttagataatgctctaatcaataagttaatagtatctcaaatacatagcaataaaagaagaagacaaattataatcattacccacaacccaaacatagttgtaaatggagatgctgagtacataaatgttatgcattttaacggcggtcaggtgcaattactatctgcaggtggtttatgtgacactgatgtcagacttaatgtttgtgagataatggaaggtggaaaagaggccttcaacttaagatataatcgcttacttaaaatgtaa

SEQ ID NO: 245149 - DNA, 3141 bp, Klebsiella pneumoniae
atgaaggctggattcaatagcaaacgcctctttggcataacacgctcgaaaggtaagatgtacgagtttggtctggatgagtctctgcatctcagaatgcctgaaggttcagatcctctgcagctgtttattatgaccgtagcaaccttgggcgacgttaccggggtgctggctgagctgtcactgccattagtttctcttccccctgagccgcaagcggagctgaatttctgcgccagcttttttgacgcagttctggattcaggatttgcacaaggcctcgaaagcacaacattactattagcctctgccgcctattatgtggctcgacgcccgggaagtagcttagtccttgcccgtcgaattgaacctaaagaagaagacaacaatgttgagcatttgcttcaatggttgctcaaagcggactggaggacttactggcttttagacgacaaacgttatggaccgctgctaacatcgttttcgcgtgctgttgctaaccattttgccgaaggtacccagctacaagagattgatgtactgatgaaactcctcaggaatgaggcttataaaatgggcactcccgaggaagtgctttatgcagatgtcgccatatcgatttgtcgtatgaggcttgcagcatctgcttgggtaaccctctcccaatattcaggtttatcagtggatcattggcggccggtcattcagagggaacgctttcctaaagaactctggccttctcagattcttttaggggaaagagggatattcagaggtgactcgggcttgattcagatgcctacaagtgccgggaaaactaggtcgattgagttagttctgcgcagtgcattcatgtctgggcgcacgaagcttgcggttgtggttgcaccctttcgggcactctgccatgaaattgccttatcacttcggcaagatttggccggcgatgacattaaagtcaatgaactgacggatgccttgcagattgacttcgttgaacaaattgctgaccttctgggaagtgccccgccctcaacatcgaacgtattagtcctcacacccgaaaagtttctctatgtgctgcgtcagtcctctcaggctttgaaacacattggtcttgtcgtttacgacgaggggcaccagtttgatactggcgtgagaggtataacctatgaattgttgctcaccgaaatcaagggattgctgcctgatacagcgcagactctacttatttcagctgtgatgcaaaatccacaggccattgctagctggctgatgggtgaggataaggcacaggttattgacggcgcaacgctattacctacgagccggtctgttgcctttgcaagctggacagagtcgcttggacagttaatgtttcatgaaaatggatatgacaaagaggactactttgttccgagaataatcgaagcggcacagctatcgggaattaaagcagacagctcgatatttccgacccggacgaaatcgagcgacgtatcgctctatttgggtctacgcgttattagtaagggatccgtagctattttctgtgggacaaagttgattgcaaatggtatagcaaaaagggctgtccagattgcggatgcaggatataacacgttatggccttcaacctacgctaatcctgaagaagtcatggcactgaaaactattattgagggtaatttcggtagcaattcctttcttttaaaagctgcaaagctgggtatatacacgcatcacagtaatacacctcagggtatacgcttagcactagaacatggtatgcagaaaggactgattaactttattgcatgcacatctacgcttgctcaaggtgtaaacttgcctattcgctatcttatcgtgcagggagtatatcagggggtaggacgtgtcaaagttcgcgacttccagaatcttattgggcgtgccggtcgtgcagggatgcatactgagggggttgtaatcttcgctgattcaacagtttgggacagaaggaaaaattggcaggaaggatggaaatttcaaagcgctgtggagcttctctctcctgaccgcgctgaaggcgttaccagttcactccttttattgttaaaaccttttgcactcccccgtaaccaagaattgccctttgctgggggcgatttgctggattttatggataaggaggttgagtgggaaggctgggctaatctggtggcggattcagaccctcgcctcagtaagtcgcaaaaagatgctctagtaaaagcgctgttgagctccttggcagaacggaaaaagatgacgcatacacttgaaagctatctaatggcaaactgtgctgcgatggatgcaaccgcctttgaacagagggccggggaacttgcacgcgagacattggcgtactcgcttgcctctgccgaagaggctgagaaacttgaagaatacttcagattggttgccagacgtattgagtcggttgagagctcacccttaaagcaggcattcttcggcaagacattgctgggcgcaaagcagactaaatttattgaagtatggtcaggcgaacatagagcaatgctgctagcgctggattcctctaatggatggctcaatgccgtctggccactactgaccgagctctgcgacaatcgttttttccgtagcgtcgagcctgcaggtgcagggttcgagatcgcactttcgtggatgtgcggaatgagttacggagaaatcttcaagaaagcatctcagatgcaggttaaaaagaaagccggtaagcgtaaacaaaaagtgagtgacgacgatattcttaagttcttggagagcacactggcatttgattgttcgctcattctggcagctcttgcacaattcctttttagtccagaggaaataatcggagagcaaggggcatcgctcgctcattttcagaagagcctaaaaaatggcctccctgacgtgctatccatgagtatatttgaggcgggatttgctgaccgttttatttctcaagctattcgcgacgctctcctccaggatggatatggaggcagctcatttgatgaggctaggcaaaatcatttaagcgttattgagcaagttgtcaaaggaacccctgcttatttcaattacgttttaagctcatactga

SEQ ID NO: 245150 - DNA, 810 bp, Klebsiella pneumoniae; identical to SEQ ID NO: 198040

SEQ ID NO: 245151 - DNA, 558 bp, Klebsiella pneumoniae; identical to SEQ ID NO: 198041

SEQ ID NO: 245152 - DNA, 276 bp, Klebsiella pneumoniae
atgaataagacctggcttttcaccaccctcaccctggcgctggtcgccgccgcgccggcccacgccattagcgcgaaataccgggaacagcttgaacgttccggctgcacgcagatgaccgacgggatcacctgcgatattcataaaaccaaagccgagaatgccgccgccgcgcagcaggccgacagcggcttcggcccctgggtgggcacctggtatgtttatacggatatggcgataaaattgatgagattaccgtcaccgctaaaacggtga

SEQ ID NO: 245153 - DNA, 750 bp, Klebsiella pneumoniae
atgagcctggcaattcagaaagatgtcgatttttctgcggtggcgaccggatatttacctccggtaactgcaggcgtggagtacttcaatttttttaacagcgaagactcgctgacacgcaacctgatccccaacaagccgactcctgcaaagaacgggagtccgctctttaacaccaacggacaaagcttcctgctgaccaatctgcttaatttcatcaataccgggataaaactgactgatgaaatgaccattattacggtggcagaaccaaccggcgccgatggtaatttcccgacctggtccactacaggttcgccgattaccaacggcggtagcctgacctcgcagtcatttatgcggcagagtgccacgacccgaaacccgactatttcgcttagctactcaacggacggtttcgtgaccaggaataatctatcctacggcgtatcgtcaggtgttaatcagatcaaacttcgcgcagtagccgcagcattcagccagacggcgatgacgtctcgcctgcacgatttgacgaataatcaggtacagcaggccgcagtcccggctaacggcgtgctcggcaaggccggaaacattttgctagggtcgcattacaacgccgcagagagctcacagggtaatctgtacgcggccgcgatttacagccgtatgctctcaacagctgagatcaatcaggtatatgctgcgttaaaggcttattactcaaagcgtggcataactgcatga

SEQ ID NO: 245154 - DNA, 2394 bp, Klebsiella pneumoniae
atgatcaagcacacagcagaggctggggtcgagattggtcgattgtcaaaaatagccaatgcatcgacaactgattttcagaaatatgccatagctgccagtgccgcggggatctcccaggagaagttctccgacataatgaaggatgttaacgataaggtcggtgacttcctgagcaccggcgggggtgagctccaggatttttttaagaccatagctccaaaggttggtgtgacggctgagcagttcaagaatctttcaggcccggctgcaatgcagctatatgttgataccctgcaaaaagccaatgtttcacaagcacagatgaccttctacatggaggccattgccaacgatgccactgctttgataccgatgtttcagaatggcggcaaagcgatcagtgaaatggctgatatatcggagaagctgggtcttattctcgaccagaaaacaattcgtgcggcgcaggagctggaaactataggctggttggcttcatctgctatgcagggcctgagaacgcagattgctgcaggactcatgccaacagtcagcgccttgtcaggtgaatttatccagtttgctgcaaaaggaatagatgctacggccgtgtcccaaactctggatggttggcttaaaaatctggctaaggccgctgtaactgtcgctggtgccttcatgggcgttacaaaggccatgggaggaatggttgatttgtggaatggggttaaggatattgacctttcacaccccattgatgcctatcaccagattaaagatgtctttaaaaccgtatccaatgatgtaaattcagacttgggtaatattcaaaaatgggtagacgaaacatggaaaaaaattggcgaggcggggagtaaaggtgggagtgatcttgttaagaatcttacttattggcgtaatcaaataagttttgcgcaggggcatatcggaacattttctcctggaacaggtagtaagactaaagcttactctgaggatgctgggcagcgattacttaaccagattaacgagcaaactgcagcattcaatgcgcagttggacgctagcgataaattatcggcggtcgcaatgcagcgcctgaagtttgaagagcagataaagactatccaggagcgtcaggccaaagggctgccagttactaaagatcaacagtcgctgttatctatgtccaaagagatagacacagcgttcaaacggcttgaactaagtcagaaagctaccgcaactctggacgactaccggaaaatgcaggagcaggtcacgccgaaggagctacggcagaatgagactttgcaaaaacgcctagaaattcttcaaaagatggttgagctgaagaaactgactcctgaggctgctgggaagcaggcgagcgacctgattagtaaatcagtgctaccggattcagttatttctggggtgaataaggctggtggtactctgacgtctggagcaactaatagcgacctgtcagggcagggcatgaacatcatagggctgcaaatcgatccgcagcttgaaatcattgataaattgaaacaagcccagaccgattatgcagtatggctgagccagcaacagcaggcgataacacagagcacagtcctgaatgagcagcagaaacagcagcagctactggccttacagcaacagggccagcagaaccaggaggcgttaagtacagctatctacgttgcgcagatgcaatccgcccaaaactccttctccagcatcaccgattcgatggggatgatgtttggtgagcaatcagcgatgtataaagctgcttttgtaacacagaaagcattcgccattgcacaggcttcgctgcaactcccaatggcaatggggcaggcattagccggattacctttcccggctaacctcgcagctatcgcgcaagttattggactcatggcttcgattacttccagcataaccagtgctgccgccgttggcttcgcctccggcggttacaccgggcccggtggtaagtatcagccagcgggtattgttcacaaaggtgagtacgtcttcgaccaggcgtcaacgaaccggatcggcgtttctcagctcgaggcacttcgaaatggccagccgcttgatgcaactctggggcgcacagggtttggtactggtgtccagaacgtgaacagcgataacagcagcaagaccaccatccatgctcccattgagcaacatttccatactccgcccggtgtaacacctgatcagatggctctctccatggctcaaacgcagaagcgggcgacaacggaagccctggatcaggttgctgcgcaagtgttgagaggagatgggaaagttggtaaggcaatgcgcagtaaatatccaggcagagggttagagtga

SEQ ID NO: 245155 - DNA, 921 bp, Klebsiella pneumoniae
gtggaaagcgataacttcgatgaccctttgtttgatcaggcaattagctttgtaatcgaaaagcggaatgcatccgtagctggactgcagaggcagttcagaatcgggtacagccgtgcatcgcggttagttgaacaaatggaggagattggagtcgttagcacccaagggagtgacggaaacagagacgtcttggcgtcctcgcaattcgacatagccgctcttaacttgaaagctcttagagaggaaaaggaagggcggcgtcaagaagaattatcaaggcaagccaaaattgcaaactcagtcgatgaacaattaaggctttcagcaattacaaataagagaattgtaatttggctcaaagatacaggaaatgtagcgccatcaggcaataaggtgtttatcctcaaatcctcatcgccttttgaatatttggctaagcaacagaaaaataaattaaagcctggagatgctgaatacagcgatatacttgatggatatcgtttttctgccacaatgcagatgagaacccccaccagtgttctttgtcagcatggcaggatagagaaggtgcctgcgcataaactaccccgcattgttaaacaggactggcaaggcatatggcttccacacctaaaacccgccgcagaactgggtgcatgggcaagggatgtcaacgggtcgatggcttctgatgttggttatgttcctcaagatggtggagatttcttgcgatttttgctacttgctcaccagattgttgaagatgatatcagtgatgaggaaagagtaagatggctagaatcctgttatcacatggtaggcagtgacggtgaggctataggttcctttatggagcgttatggcgatcgcgcagatgttgctcttagagcaataaccaattcggtaaaaaaagggtaa

SEQ ID NO: 245156 - DNA, 168 bp, Klebsiella pneumoniae
atggccggagtgccgctcccgttgtccctgagtgatatcgagcgctatctggcctcacgttccatattgattgaccgaaccgaatttgacactgccatacttgccctcgacgatgcctggagggatgagtgggctgaagagcagaaaagacaggcaaaagtgaagtag

SEQ ID NO: 245157 - DNA, 207 bp, Klebsiella pneumoniae
atgcaatttcttctgctttatctcttatgcggcttgcctcttggtctcattgaattcatttctgtgttgtttatcagggatggcggcgcggtatggctcaaggttgtttacggcgtaatcgctgtgcttttatggccgctaatcttcgccgtgctattcgtccctgagcggattctttgcaagtggcggagggctctcggtggctaa

SEQ ID NO: 245158 - DNA, 489 bp, Klebsiella pneumoniae
gtgtcaaattttctttcttttattggggtgcttgtatcaatagctagctgttattatgcatacaaagcattcacatctgctaaagaaatatcctttccggaaaacaaaccacgtgaaaatatgtgtgttattagatttttctcgaaagaagctaaggaatttgaaggttttataaacaaaaataaacataaaaaagtgtatttgaatattgagtttgaaggaagtgaatttgaaattaatgaggatggtgattcccgctggttggttgtctggactgatacctttcaggaagtccctaaaggtgaaaagcctgacacttcaaactgtaacgggtatcaattgactatcattcctcatgaggatgggtttggtaattttcactggtttcgtggagcttatcaactatcggggcatttctatattgatggatatagtgggccttatcagggtctaatgagtgctgttatctctgctgccaaaaccatataa

SEQ ID NO: 245159 - DNA, 459 bp, Klebsiella pneumoniae; identical to SEQ ID NO: 215893

SEQ ID NO: 245160 - DNA, 645 bp, Klebsiella pneumoniae
atgctttggaaaataatttctcttgtattggtcggtttttttatatttgtgcttggtttgtggcttggctctgttcaggcagaatgggcgaaacctgagaataaagatgctgtcgcttatttggctatgattggtgggtgggtttcgggaatagcaacgtcagtggctgttattatttctttatatgcaacataccaatcttctcaaagtaatgttgaaaatgttcaggtttcatatgatgtttttccggcagttgaaaaaaatgatataggtaataacattactgttaagaatgtgaaacccgttacagttcatattttgaaagtatttattgctattgacggttctaaagttagtgcggatataagtctactaaaacgaggtggatatcctatccctcatgcattgtatcaattaggtgagaagtgggagtttgcattttatacacattacagccctcagtgggctgcgattttttcaaaacttgaaagtggtggtgaactgacatttaaaaaaggattttttattatcgagtctgcaatgaagcaatataggttgaaaatgcctagtgattttctgaacttattgagcaccagatatgaaactttcaaggcggaaaaggaagaaaacaagctcacattttga

SEQ ID NO: 245161 - DNA, 1032 bp, Klebsiella pneumoniae
ttggacaagcggtatcaagtttttgtcagttcaacatactcagacttggaaactgaacgtcaagaggtcatgcaggctcttttagagctggattgtatgcctgcgggcatggagttgtttcctgctactaatagtgatcaatggagcttaataaagaaaataattgatgatagtgattattacattgtaatccttgcaggtcgttacggctccttagggcctgatgggataagttatactgagatggagtatcgttacgctgttgaatcaggaaaaccagtaattggttttttgcacaaaaataaaggtcttttaccatctcagcgatgtgaggcatctcctcaaggaaaagaaaagctggaagcatttgaagagcttgttaaaaagaaactttgccgattctgggaaacccccgcggacttaggaagccaagtcagtagaagtttgattaggcttatcaaagatcatccagctgtgggatgggttcgtggagatttagttactagtgagagttcagcaaaagaaattctcgggttgaagaggactattgaggaacttgaaaatcaattaagtaagaacaccacaactgcaccgaaagggactgaggatcttgctcaaggagaagatttgtttacctttaaatgtagcttccatgcttctcctacagagtggacatctgatggatcagagtatgagtggacctctcagataagttggaatgcattattttcctatatttctccctatatgattgatgaaatttccgatgataggttaaaaacgttgatcaacgcttctatctgtgaaattgttgaggcggaattgaggtcggatgatgatttaaaaaatatgcacataaagtatattcgtatggatagttctgatgtccagacaatcaaagtacaattacgagctctagggcttatggtccaaagcgaaagaaatagaagtgtaaaagacaagggtacatattggaccttaaccccttatggagagaatttaatgactactctccgagcaataaaaagatag

SEQ ID NO: 245162 - DNA, 864 bp, Klebsiella pneumoniae
atgacacctttaggcgtgtatggatatatatttactaaagaaatgatatttgacggtggaacattaacccctcgattcaataacctcgccgatcttaagaataataaatgcaatggagaatcttatatacttacaggtttctttactcctaacccgaagaataaaaaaaatatttctcaacttcttttcgatctttcagcagttctaagcttcattgaacaaaagaatgtaatcatagcccactcgctcaaagaggatgaaaccccttcaacattcggcgacgacttccccaccagtttagatataaaacggaagcgtggcccaggacaaataataatggaagactgtttttccaaacacggaagatcagaattcattcgattagccattaacaaactaagtgataatatcacagcggatcaaaacccatttagaacagctttcttcaaatccatgctttcttttagagaaaacataaattatgttgatgtaaattattacctatctttctctgcacttgaatcgttgtgtagatatatacaagatgattataaatcacccaaagctccacaaataataacaacaacgctgcaaaactatggtttcaatgtttcaaaaaaagataatattttaccacaaagaaatatcatgcattattgcgcacttcgcaactcactgtttcataaaggtgattacattgcatatacgaaaaacgatgatccggacagcataatatatttaaaaaattattcatcctctctatgcctccttctttctttgtttataatgaaatatataggatttgatgataatcatatcaactgggactcatggattgatcgacaaccattcattagcagatag

SEQ ID NO: 245163 - DNA, 603 bp, Klebsiella pneumoniae
atgactagcagcctgttaccgccggggtcgtccgcgctggagcgcaggctggcgcaagcctgttcaggtatcagtgatttaaacgtgccgctgcgtgatctgtggaacccgtggaaatgcccggcaaagtttctgccgtatctggcctgggctttctccgttgaccgatgggaggaaacctggacagaaactgctaagcggcagtctgtcagtgatgcgttctggatccatcagcgcaaagggacggtggcggcggttaagcgagtgatcgaggggctggggtactcaatgactcttgaggagtggtgggaggtggccgaccccgcaggcacattccgtcttgagattgaccttaatgatattggcataactgagccgatgattgccgaacttgagcgaattattggagacgcgaagccagtcagtcggcatatatctcagctaacattatcagccagcacaggcagtattaccagtattggtacagcggcgtttgatggcgaagtaatcacagtttatccaaagggttatcttcctgatgacagtatttattttgatgaggtcgccagttatgacggcaattattactattccggggattaa

SEQ ID NO: 245164 - DNA, 603 bp, Klebsiella pneumoniae
atgaataatacgcttctccccccgtctgccagcgcgtggatgcgcagcgctgaggccgccacggcgaagttatccggtataacggttgccattcgcacactgtggacgccgaccgcctgtccggttgatttgctgccgtatctggcctgggcgttttcggtggatcgctgggataagaactggccggcggagcgaaaaattgcagcgatccagcactcctactggctgcatcgccagaagggcactcgcgcagcggtaaggcgcgtgattgaggatatgggattttctgccaccttcgcggaatggttcgacgtcggtgacgagccgggcaccttccgccttgaagtggatgttaacgaggtaggactgacgccaaagacactggacgaactaaaccgcctgattggtgatgcaaagccggtcagccggcatctggcgcaattgactatcagcaccagtgcgacagcaatggcatggataggggcgggggtctttgatggcgaggtcgttacggtttaccccagggggtacattcctgatggcagtatttattttgatgaggtcgcaaattatgacggtaactatcaatattccggggattaa

SEQ ID NO: 245165 - DNA, 585 bp, Klebsiella pneumoniae
atggagctggccgagctgattcgccttctggagaacgtcgtgcgcaccggcacggtgacggagatcgacgagaaaaaatggcgcgtgcgggtgcagagcggcgggctaaaccccaactggatgcgctggacggcgcagcgcgccggggcgtttaaggtctgggtgccgccatccatcggcgagcaggtctggttcctgtgcctgggcggaaataccgatatcgcctttattggcggcagtctttacagcgaggacaacccagcccctggcgcatcgcgtagcgagatggtggtgaccgctcccgatggtgccaaattccgctatgacgcggcggctggcgcattgcaggtgacgggcatcaaaaccgctgcgatcgaggcatcggtaaaggtcacgctggatacgccggaggtggagtgtaccaatctgctgaccacaaagggcctgaatgtcagagaaggcggcgagatgcacggcgatatcacccacaccggcggggcgtttacgtctaacggcgtgcaggtggataaacacgatcacggcgccgtcgagcgcggcggaagttggacggagggtacccgatga

SEQ ID NO: 245166 - DNA, 1152 bp, Klebsiella pneumoniae
atggctggcgtggttaataagtttggtttaaaacgctatattcccagtgaaatcagaaaaagaataaggattgatgctggatatggttgtgtaatatgtggggggttatttgttgattatgagcatatagagccggagtttagtaaagccgttgagcatgatcctgataagatgactttattatgttctttatgtcatgacaaagtaactaagaaaatattctcaaaaaagaaagtttgggctgctaaattaaatccgaaaacaaagcagaaggggttttctagagatgttcttgatccagaaaacacatctcgaacggtttttattggctcatccgagtttagtatgcaacaagttcttttggtgattcacaataaacccgtattatggttttcggaaagtaaggattcagattcaccgtatgaactaaattttatttttcacgataagaattctaatgttgcaggttttgttaataaaaatatttttacgggggttttagttgagaatgatatatcagctcaaggatatactatacaagtaaagaaaagtcgaaagatatttgttgagattgaggcgaagggtggagagccacttagaattaataagttaaattttcaatatggaaaagcaaaggtatctttaaaaggtgatggcactttgatactaggaaatgcgcagtatgaaagacaaaagatgagtgattgtaatagtgctgctattttatttcatggtgcacctaatacacacttcaaaaaaaatggaagaataataaataagctttttgtggcagttaaattagctctaagaaaaaacaattccattataaactacagaggtatgagggtggggtgggtttttgataatacagtggtcactaaagattatttaattgctggttttattggagagagaggagagggaattgtagcttctataattggcgactctccaaacgatgtaataggaaggcttgttgagacagatattaatgatggtgaaaaaggttgggttgttgttgttaaggatgaggagagtgaaataggggagcctatatggatttcaccaaaagataaatcgactatgaattccaggtttttttccgggtatgatgtctcatatagaattttagcgaatttttctgagcattaa

SEQ ID NO: 245167 - DNA, 384 bp, Klebsiella pneumoniae
atgaagcatttcagcactaaagccatcgggtcagttatcaccgaaatgaatcggcaggataaaaagtggggcgctgaccgcgatcagcatccgttcacctggcaggtcatccttagcgaagaggttggggagttcagccaggcaattttgcatgatgaatttggcggccataaatcgggaacggcgcgcgaagagatgatgcaggttgccgccgtcgctctccagattgtcgaatattacgatcgccgttgcgtgcctgcgtcgggggtcgaagaggcacggccggtgcttgcgttgctagccatcccagcaggcagagaaaaaatcggggggctgcgactggctgggctgagttgtctgcgctccgagggaagagtggtttga

SEQ ID NO: 245168 - DNA, 2610 bp, Klebsiella pneumoniae
atgtctgattccgccgctttagcatggagctggaacgctaaacggcaggctatcaaccccaatagcgttgtagattctgcgattgagtatctcactccgaaaggtgagcggaaggcgctcgcctatgcggatttggtcgataccgtttatcgcacccccatgcgcccgcgcgagggcactgcgcgggaagcgttcgatcgcaaaggccgcgctaactacctgcgccgccgggttcagactctgccagcgtttatccgcaagcgtttctctctgcgcctggaatcgctggagcgccacgacccaaaagaggccgtgcgctggctgttcagcacgtttgagcggcacgtgttacgccgcatcgacgcggtaaactctcaatacctaccgcagagcgcgctcccggccattcttgcgcccctccgcgatgattttcacctgctgccctgggcggacaaaaaacgcctgaaacgactggcctataagctcgcaaacctgatgaaaagcgagtttatgcgcgagtttgatttccagcatgagaaaaccgccgatgtggagttttccacgctctacgcttacggctacatcgccagcaaggcgacgactctcaatatcgcgatccctggctggagcaggtattgcgaagaggagctggaagccgaagaggcactgcgcgccgttgcgcgccttcagtcggaaaagtggtggttaggtaaaatccgccggatacacgactgctggcgcgaacacctcatgatcgccgcgggctacgtcagtaaggtggcgtcgccgtattgttctgatccgtgcttcaaagagtggatagcccagaaaaaagcgaacttcgaatacctccaggcgatggagctggaagaccaggacaccggcgagcgtagttctttgctcgacaaggtcatgggtagcacgtccaaccccaaaaacgcccgcgccgagctgatggtgcgcatgcgcgggtttgaggatatggcaaccgaaatgggtttggtcggtatgttctatacgctgaccgccccgtctcgctatcactccacgcacgtaaaatcaggcaagcgcaacgacaaatatcgagacgcaggcccgcgtcagactcagaaatacctctgcaaagtctgggcgcgcgtccgtgcgaaatggggccgcgagggtattcgaaccttcggctttcgcgtcgccgagccgcaccacgacgcaaccccacactggcacctgttgttattcctgcacccggaagaggtggagtatgcaacggccattttccgcaagcatgcgctgaaagaggacggcaacgagccgggcgcgcaggagcaccgctttaccgttacgccgattgatgaaaaatttggctcggcaacgggctatatcgcgaaatacatctcgaaaaatatcgacggctacggcatggacggcgagctagacgacgaatccggccagccagtcaaagagatggcaaagcgcgtgcgcgcgtgggcttcgcgctggaatatccgccagtttcagcagatcggcggcgccccggtgaccacctggcgcgagctgcgccggttagggaatcgcgagctggttttgcatcctgagatcgaagaggcgcgcgcagctgccgatgcgtcggactggccggggtacaaccacgcccagggcggcccgttggtgtctcgcgactgcctgcgcgttcgcctaagctacgaatacaccgaagagggcaatgattatggtgacacggtcgccaaaataaccggcgtctattgccctctcaccatccgtgaatccgtcatttttacccgcaccaccgattacaaaattgtgccgaagcgtaagctgtcgccggtcgagaatttgaccttagaaggccgcgcagcggcccctcggagttctgtcaataactgtacggggcgcgccgaatcggacgaaaaaccaccgtcagaaacggcggtgccagctgataaagccgcgcccgacgacagttcagtgacagaacttccgctgaatatcgatgttttgaggcgatattcacgccagcaaaggcaggaaatcaccagcaggctaagaaaatccgcccgggaaagctcagatcaggccttcacgcgcaccgcgcgcggcctgcgcacgtcgattgatgatgaatccgcgctggcgtgggggccaaaagttaccgccgcgaaagatatgagcctggcgccggaagaggcggaacgccgctggcgcgaacagctgcggatcgaggcagagcggcgcgcagataactatgccgccgcggttgcggaatatcagaagaaaaaggccgaagccgcaacgcgccaggcgcagcaacaggaagcgacgcaaaagaacggcatctccgaagaggcgatcgccagcatcggcgcgcagctgcgcagctgccggatttttgtcagtgatgagattgtgcggtcagtcgctggcggcgcccgcgttcgccacggtggtggcctgcttgcggcggacagtggccggttgcgcgaggtgaaggtgtggcacgcaggcgagaaagataaaccaacctccgaatacatggcagtacgtgacctggtcacgcgctggaagaaagcagctaaacggaaaaacgagaggtaa

SEQ ID NO: 245169 - DNA, 957 bp, Klebsiella pneumoniae
gtgattaagtccccgatcaaatgggccggcggcaaaacccgtgttatgccgcagctgctgaagcacttgccgaaagctgattgcttgattgagccattcgtcggcagcggtaccgtgtttctgaatacggaataccgtcactatgtcctttgcgatagcaatctgaatctgatcaactttttccgtcaattaacaggccgaccagaagacacaatttctgcctgtcgctgggtatttagtggtgggaataatgccgaggaattttataagcggcgcacggaatttaattccctaactcaaaaagcggatttagatccggatgctgcgctgcttcatgctgcgtattttttgtacctgaaccgccatacgtacaacggcctgtaccgcgaaaatctgaagggggaatttaactcaccctttggcaaatatgccgcgccttacttccctgaaaatgaaatgcgtttgtttgccgaaaaggccaatgacacgaacgcgattttccactgtggcgattttcgcgattccatccccggcactatgcagctggcgtatgacgtggttatttactgcgaccccccctacatcccggccagcaaaaccgccaatttcaccgcctacggcaagccgtttaccctggacgatcatcgcgccttggttgcaaccctgctcgatgctcatcgtcagcatggcgcccgctcggttatctcaaacagcgatacgccggaaacccgcgagatctattccgctttcaatctccacgccttcagtgtccgccgctctgttagcgccaaaagccgcgacatggccggcgaagtgatcggtgtgcttcctgattccgtcgattgctacacgcgcagctgcgctagctgcgaagacgtcgaggaatgcttagcgccgacagcgatttggatcggggttgatatggccgccggcttcgataacggggagccattctga

SEQ ID NO: 245170 - DNA, 204 bp, Klebsiella pneumoniae
atgacccaattagtacagctaagtcggcatagctatgtttatcgtggcttcactattcacatgtgccctaataactcaaaaactatgaggagagcatataacgttttaaataatggaaattactttggtcgtgactttgcattagcggaagcctgcaaaacgatagatcgaattgtgaataataaccgttttattagtcgctga

SEQ ID NO: 245171 - DNA, 1788 bp, Klebsiella pneumoniae
atggatgatattaatatcagcctcgacgaacttaacactattgatttatcccccttaatccagagtaagctgccagttacctgctttgatatcgcaaagtatctttcgagcttaggggatggaagagcggagataagactgctaacccatatttgcggttttcactttcgtcccgaaaatccacaggtaccatttggtccgtgctttcaaagcagccaaggtagatcagcaattccggatgacattaacgggttgtcgctggaggtactttctcaattttgcccgacgatagagctacccgaacttcaagctcgtattgctgatacactttgggttcgtaaaattggtggaatccgttttcctttgctggcggtccgtgcttattatgcgtccagcatggctattatgacatcgcaagggacgtgggttagtgctttagaacgcctagagcgtgctcttcggctgtgttgttttttccgaaagaatactgatttcagggatgaatttgatcagctttcggcacatctactagcagagtatgaacgtaccagagaacaagccgattcaccttatccgctgcgactcctgcaactcgatatcgactgtaaagtgagtgagccatctgttattgcccaagaactcctgtctctgacaaaaaaatatctggctcaaaaatcattttcatttgccgtcgacgcttgtaaaacagcaatcccgattgcgaatcgttgctgtgacagagatacacagtttgagttctggcggcttcttgccgatacacatctggaagagtcaaaattccaagatggcggtatgatttcggcagcctgcatgcagaatgctattgaagcactggctaatattccaggaaccagagtagaacgtcttgcgctgtatgaagaaatgcgtgattaccaaatcgaatcccgtcaccagatgtccatccttcagtctccccctcaagacattagtgagattgtccatcaagccaagagtcgggtagtcggaagagatttgtttgatatggttttcagacttgcgatgctggtctgtcggccaaccggcattgagagacttaaggctcaagcaatagaacaaaaggccaacagcatagcttggatgtttggatcaacacatattgatcatgagggaatgacacttgctcgcatacccgcaggattggggattaatgatgcaaatggggcagttatttggcctatcatgatgacgagaatgcgtatcgaccatgagttggcagtcgccgggcaaattattcctgctacggatgagatcacaatgaaatatccaatctcggaagcgttttttcgcgatatattcatcaatcatcccttcatcccgtttgggcatgaagaatttttcatcaagggtatggtttgcggtttccaaggagattttatgacggcatgccacgttctgctcccccagatcgaaaatagtctgagatatgtggcgaaaatcaaaggcgaggagccatcgcagcttcacggggacggttcgcaagagcgaaatggactcaagggattactggataatccactgattattgacgctttcggcgtagacataattggcaatcttcaggccttactggtagataaaatctatggtgatttacgaaaccaactagctcacggatatgtgcctgccggttactacaatcaacctccctgcatttttgcatggtggcttgtattgcacattctaatgaaccctacggcgagatactggcaagccacttacggccaagagagtgagactcagacctaa

SEQ ID NO: 245172 - DNA, 840 bp, Klebsiella pneumoniae
atgacgtcgattattaaaatgcgtggcgccgcgctcaaaaatcccattctgacgctggatgacctgccattctcgcgacagaagtgtattaactggcttggtgctgacaatgttactatgtcagattacggtgtcgaagcaataaatgattatcagaatggtcaggtttatccgtccattgacacctctgcccgcactcgtgtttgccagctggagacagaaaaaggaattaatgttttgaaattcagccccgaaggatttgcggtcaataccatcaatgcctatcgggtactgaatccggagcagttttctgataagtcggcgctctcatttgccatgctggtcaaggcggagtcaaccgactattcatcagggtaccgcgctatatttcatatcggcatgatgaacagccttggcagcaatgtcccgatgattcgtcttcagttcacggcaaataacagtttcagtgtaattgcacgacattcatcggcggatgaagtggctgaacaggtgggaatgaatggcctgacagagggctataacgtcatttttgttgagctggattacgtcaatcagactatcagaacaaaactgaatgatggcgtagtagtcactaaacctgcatttacgggtgcagacggtaaaaacatcgtgacgccggctgcggtcgtggggctgggtgggtacctttcgaactccggtcaggccgggcgaaccaccatattttcaggttcactgcgtgaaatgagcattttttccggtccacttacggacagtgaaattacgtcggttactggctggctgttagcaaagcgccgacagctgaataattcgctgtga

SEQ ID NO: 245173 - DNA, 1818 bp, Klebsiella pneumoniae
atggatttttatttttcccgttttgaacatcgccgaccgcctgaaccgctcagcaccccgcgctgggtgagaatgatttggcaggtattagctgtggccgccctggtgcttggtgccaattatatttactggcgctggaccgcgtccttaaacactgacgccctgtggtatgcgatccctctggtgctggcggaaaccctggcgtggattggcacagttctgttcaccattaatttatggcaggaaaaagatcctccgccaggggtccccccgacggagatcaacgactgtctgcgcgcggatgaagcggtggagtcgaggccgattaaagtcgatctgtttatcgccacctattccgaagacgtggagctggtcaggctgtcgatccgtgacgccatgcagatgacctatcctggtccgctcgattataaagtgcatgtccttgacgacgggcgtcgcccggagatgaaggcggtctgcgagcaggagggggcgaactatatcacccgtcagagcaatatcggctacaaggccggtaacctgcgcaacgggctggaacataccgatggcgactttctgatcatctgtgatgccgatacccgcgttttcccgaccctgctgagccacacgctcggctattttcgcgatccggacgtcgcctgggtgcagaccccacaatggtttttcgatctcccggaaggagaggatctggcgagctggctgcggcgtaaagcaggcggtgcaggctatggcgtgggctggctggcgcagaaaatcgtcggtccggtgaccattggtcgcgatccttttttcaacgatccgcgcatgttttacgacgtgattttacggcgccgcaactgggctaacgccgcgttctgctgtggcgccgcctccgttcaccgacgggaagcggtgatgcaggcggcgctgcgcagctacgtctggagcgttgacgccgaaatcgcgcgtcatacgcgggatattcgtgacccggcaacgcgggaagcgctgcaggacgccatgcgcccccacgttgccttcgatactgaactgacgccctataagttccacgtctcggaagatatttatacctccatcctgctgcacggcgacgctgcccgccgctggcgctcggtaatgcacccgcggattgagtcgaaaatgctctctccgcaggatatgctgacgtggatgatccagcgctttaagtacgccgccggatcgctggatatcctgttccatgacaacatcttcaaccgacgccgctttaaactctcgctgccgcaaacgctgatgtacgcgaccaccttctggtcgtatctggcctgcgtgtggaacaccgtattcctgatctcgcctgttatctatctcttcaccggcattccgccggtgtcggcgtggtctacccctttctatctgcactttttacccttttttattgtctccgaactggcctttatgttcggcacctggggcatttctgcctgggacggccgggcctcttacctctcctttttttcgatgaatctgcgggcgctggacaccgttttgcgcggggagcagatcaaatttcacgttacgccgaaagagcgacagacgggccgttttctctatctcgtcaagccgcaaattgccatcgttttgctcaccctgacggggctgatatggggcggtattcaggtggcgcgcggtcaggttgacgacccctccgggtacgtcatcaacattttctggggcgcggtgaatattgccgccatgctgccactgatcttcgccgccatgtggacgccccccgaagagcaggaggcgagccgatga

SEQ ID NO: 245174 - DNA, 2694 bp, Klebsiella pneumoniae
atgcatgccgctaaccgtaacgaccttaacctcctgccctcggcggtgatgatctacgatgagcgcgaacgactgcaggcctggaataataaggtggcgctgttttatccaacgatcgcgccctggctcgccgtcggcgcctctcttgagagcctggcggagaagtttatcgatgccggatacaacatcgacccaggccggcaacagacgctgcgcgaggcgattatccgcaactgccgccagacgaaccactgtgaggtccgccagtcgggcaaccgccggatttacgttcagcatcagcggctggcggatggcgggattgtcagcctgcataccgacatcaccgagcttgacgaggcccggcgttcgcgtcatcaactgcatgatgactttttattcaccgcggagtcgatccagatcggcatctgggactggcaggtctccggcgacagcctgcaggtgaatgacaccctgctggcgatggtcggccagtcgcgggcgcagtggcgctttccgctgcgctttatgctcaacctggtccacgaggacgatcgagccactctgcagcaggcgatgatcgcctcgcaaaacgagcacatgccggtttttgaatgtgagcttcgcgtccagcacccgacgcagggctggcgctggatgctgctctcggggcagatcgtcaccctcaacatgcagcagcaggcagagcgggtgatcggcaccttgcaggatattacccggcgtaaagccgcagagctgctggccattgaggcggcgaaggaggcccgcgaggcgaacgaagcgaaaagcgctttcctcgccaatatgagccacgaaatccgcaccccgatgaacggcattctcggcatgacgcagctctgcctcgacacgccgctgaccgcggagcagcgagagtacctgtcgctggtgatgagctcagcccagtcgctgctgcacattatcaatgacattcttgatttttcacgcattgagtcgggaaagatgcaggtggacgtagagccgctggagatccgcccttttgttcagtcgctgatccgcccgcatatgcctgccgccagcgaaaagggcattgagctgctggtggatatctcccctgcggtgcctgaggtgctgatcgtcgatggcccccggctgcggcaaatcctgaccaacctgctgggtaatgctctgaagttcactcatcagggggaggtcctgctggcgatagcgccggccgagaacgacaaccgctggcgctttcgcattcgcgataccggcatcggcattgccccggagaagcaaaaggcgatcttcgaggccttcagccaggccgatagctccaccacccgtcgctacggcggcaccggactggggttaaccatttcggcccgcctggtcagcctgatgggcggtgagctgacggtggagagccagcctggggcaggcagcgaatttgccttcaccctgccgctggaaggcctgaacgccgcagcctccggtagcgccccgctgagccgcttcaaccaccagcgggtgctggtggttgacgacaacagcacaaacctgcgcctgcttgacgccatgcttcgccagatgggactgatgccaacctgcgtgaacaacgctggcgaggcgttacgtcgggccgccgaaggcccgccatggccgctgatcctgctggacgcgcagatgccggatatggacggcgtatccctggcgctggagctctccgctttgcctgaagcccggcaaagccagattgttatgctcagctccatgagccgtcattttgacgccaatatgcttaagcgcatcggcattgcccactatctgcataaaccggtggcacagcgcgaactgcatcaggttatcgccggcattctggtgcccacgccggtggtgacgacaacgcctgcccccgttgcgcaaccggtcagggaccagaccgggctaaatatcctgctcgccgaggacaacctggtaaaccagaaggtcgccagacggctgctggagcagttgggtcaccgctgcgaggtagtgaacaacggtcgggaagcgctggagcgctggcgcgcagcctgctgggatcttctgctgatcgatctgcaaatgccggagatggacggtgaaaccgccatccgcctgctgcgggaagagacccaggcgctgggcaggcaacatcagcccgcgattgccatgaccgcccacgctatgcagggcgatagagaacgctgtctggcgatgggttttgacggctatatcgccaagccggtgagccaggaggcgctacgggaagccatcgcccgcgtcggcgcggcggaagatagcgcgccggaggaagaggaaggcctgccggacgaagcccgcctgctgaaacagtgcgccgacgatcctgagcttgtcgaggagttgctgggactcttcgctgcaggacttaatgctgcggccgccgccctcaaccacgccattgacgccaatgaccgggagacatggcgccgcgccgcccacaagctgcgcggcgaggcggccacccttggttttcaataccttgccagtgtgctccagcggctggagagccaggcggcctcgccagaccaaagcgtgccgggcgacctgcgcgacgcgctgaccgaggcgatcgcgggctgccacctgtggctgcgccgcagaacgcaggaggttccccatgatcgctag

SEQ ID NO: 245175 - DNA, 639 bp, Klebsiella pneumoniae; identical to SEQ ID NO: 225769

SEQ ID NO: 245176 - DNA, 195 bp, Klebsiella pneumoniae; identical to SEQ ID NO: 36234

SEQ ID NO: 245177 - DNA, 195 bp, Klebsiella pneumoniae; identical to SEQ ID NO: 36234

SEQ ID NO: 245178 - DNA, 582 bp, Klebsiella pneumoniae
gtgaaaatcgagaactacaaactcgatggggtactgaatcaggatcacgcctaccaaatcggaatgcgtcgcctgatgaaatatctgcagcagcgggtgacgttccagaccactaccgagctggacgcgctgtgctacaacactggcgatcgcattgtgctgacggatgatattccgggtaacaacacgatttcctgtctggtggaggcgatgacaacggctggtggcgtgacaacgttcaccgtcacggagccgctggactggtcttacgaaaatccccgcgcgctgatccgctatcaggatggctctgcatccgggctgatggtggcaagcagggtggatgattttcagctgtcagtcccgcacctgagcgagtttgatgatccgatgaaggttgacctgtcgtcggcaaccattgagccgatccgcctggtgttctgcggctcaacgcgccatgtctacgacgccattgtagaggagatcgctccgcagtcagacggaacctgtcaggtcaccgctaaagaatacctcgaatcgttctatgcctacgacgacgctacataccccggcgacgtcgcgtaa

SEQ ID NO: 245179 - DNA, 582 bp, Klebsiella pneumoniae
gtgaaaatcgagaactacaaactcgatggggtactgaatcaggatcacgcctaccaaatcggaatgcgtcgcctgatgaaatatctgcagcagcgggtgacgttccagaccactaccgagctggacgcgctgtgctacaacactggcgatcgcattgtgctgacggatgatattccgggtaacaacacgatttcctgtctggtggaggcgatgacaacggctggtggcgtgacaacgttcaccgtcacggagccgctggactggtcttacgaaaatccccgcgcgctgatccgctatcaggatggctctgcatccgggctgatggtggcaagcagggtggatgattttcagctgtcagtcccgcacctgagcgagtttgatgatccgatgaaggttgacctgtcgtcggcaaccattgagccgatccgcctggtgttctgcggctcaacgcgccacgtctacgacgccattgtagaggagatcgctccgcagtcagacggaacctgtcaggtcaccgctaaagaatacctcgaatcgttctatgcctacgacgacgctacataccccggcgacgtcgcgtaa

SEQ ID NO: 245180 - DNA, 582 bp, Klebsiella pneumoniae
gtgaaaatcgagaactacaaactcgatggggtactgaatcaggatcacgcctaccaaatcggaatgcgtcgcctgatgaaatatctgcagcagcgggtgacgttccagaccactaccgagctggacgcgctgtgctacaacactggcgatcgcattgtgctgacggatgatattccgggtaacaacacgatttcctgtctggtggaggcgatgacaacggctggtggcgtgacaacgttcaccgtcacggagccgctggactggtcttacgaaaatccccgcgcgctgatccgctatcaggatggctctgcatccgggctgatggtggcaagcagggtggatgattttcagctgtcagtcccgcacctgagcgagtttgatgacccgatgaaggttgacctgtcgtcggcaaccatcgagccgatccgcctggtgttctgcggctcaacgcgccacgtctacgacgccattgtagaggagatcgctccgcagtcagacggaacctgtcaggtcaccgctaaagaatacctcgaatcgttctatgcctacgacgacgctacataccccggcgacgtcgcgtaa

SEQ ID NO: 245181 - DNA, 228 bp, Klebsiella pneumoniae
atgcaaaatatcgaaccccgtcaattcaaagtcgataaagaggcgctggccgaattgctgaccgatgccaaaaaagaagaacgtaaagaccgcgcgctcgctgtttcaatccgtcttgaggcactggcgatacgtatcaccaaagaggggatgagcggtaccgaagccgccgaactgctgcgccgtgaagccactcgctttgagaatgaatcacaggagctgcactaa

SEQ ID NO: 245182 - DNA, 447 bp, Klebsiella pneumoniae
atgaatgatttcaaaccctttgaggacaagctcgccggattgatagcggccctttctcctgccgggcggcgtcggatgaccgccgacattgcgaagaaactgcgccagcggcaacaacagcgtattaaatcgcagaaagcgccggacggttcgccctttgccccgcgtaagcgccagcccgtcagggcaaagcaaggccggattaagcgcgagatgttcgtgaaactgcgtaccaaccgctatatgaaagcgagcggcaacgacagagctgcggttgtggaatttaccgggaaagtgcagcgtatcgcccgtgtgcatcagtatggcttaagggataaaccagagcctcatagcaactacattaaataccataagagacaattgcttgggatgaacaaaaaagaggaagatattataaataatattgtactggggtatttggagtga

SEQ ID NO: 245183 - DNA, 666 bp, Klebsiella pneumoniae
atgaatacggatgattatgacaaaactttcagtattaaaaagattcatgccagaaactctaagcgggataaaaaccttcttgcttttgaaaaagcgcatgagattagaaagtttgaaattgacctgtactggaagcgaaccgcttatttttggaccttaattgctgcactttttgcaggatattttttacttgcctcaaaagcctccagcgatcctttaaaacacatcgatttatatctaacattcatatcactaactggttatattttttcgtttggatggtttctggttaacaaagggagtaaattttggcaagaaaattgggagtttcacattgataagcttgaggacaatataacagggcctttatacaaaactgttttatgtagaaaagataacgaaaataaaaacaatactccagcagatgatgttttttcccctggtagtttttcggtttcaaagataaatcaatttattgctgtatatactatgattctatggggcggattaatgatcgtatcactagagtctttttggcatctgctgtttttcagcatggttttatacttcgtcactaatgtgatgtataaaaaaactcgcagtaacataaaagatcgctccgaccctctaaaaataaaggtaatagaaagaaaaaccaccttataa

SEQ ID NO: 245184 - DNA, 603 bp, Klebsiella pneumoniae
atgaataaaaacctgttaccccagggagcatcttcactcgaaagaagactcgttgatacctctgcgtctgtcagtgatttatcggtcccattacgtgatttatggaacccactgaaatgccccgttaaattccttccctatctggcctgggccttttctgtggaccgctgggaagaaagctggagcgaagaggaaaagcgacgcgaagtcagtgaagcattctggagccaccaacgtaaaggtaccgtagccgccatccggcgggttgttgaacgcctcggttactcaatgagtattgaggagtggtggcaggtagcggacccggccggaacattcaggatggatatagacctgaatgacgtcgggattactgaaaccatggtgcgcgaacttgaacggctgataggtgatgccaaaccggccagtcggcatattgctcagctgactcttgccgccagaacgcagggggccgcgtttaccggcgcggcggttttcgatggcgatgaggtctcggtatatccgccagagtacgaacccgacagcggtattttttataatggtgtcttcccgtacgaaggcgatgtggattttataggtgaataa

SEQ ID NO: 245185 - DNA, 3708 bp, Klebsiella pneumoniae
atggcgactatttccgaacaacctgtatgggaagatgatgtttacctgattgcccgtggcgaccgggtggagggcgggcgggatggcgtcgcaaaccgccaggcgtcacaactgtctaaccggacggcgtttctgcgtgagcagataaagagcctgattgatgacggggtgatgttttcccgcgattaccggaaagaaatcatcacgctcacccgccacggtcaggcgattatcaaggatgattttctctactatctcagggacagcgccccgctgccgtatgtgacgaccggcaccacggatgcatcatgggcggtggactccccgtttttcacctcagtcagcgacccgaacctgcgtaaaaatctgggctctgagggtggttcgcagctgattttcggcctcggcaatatcattggcaccacctcgcaaattctctcttccactgatacgcctgacgcttaccagtctaacggcttctatgcgcagaacgacggcggtgagggcgtatggcgatttaccgggaaaacagccccggccagggcggggacgcacgtaataacccagggcaaggtttataacgcgaaggggaatgagtatgcgctggaaatatgccggggctctatcatcgttctggcaaacggcgcgaaggcgtacacctatgatgagtgtacagaccagacaacggatgattttgtgtgcctgggacaggccagcaacggcattctttcccgtctgacgcttggggtgtccacaggaaataacgtagcgacctatgatggcggcgctcgtctggacctcatttatccaaccaatatgtaccgcatcggtaaagagcctattaagggctattccggggtcaattatcgctttggctcctcttatctcatggtttatgccggtcagtcttacacttatgccatgaccgggaagcgtctcgacggctggcggcatggtgtaccggagattgaggaaaaatggcgggcggttaacaaacaggagtactgggggtcgctgagtcttcagaactgtcatatatacggcggcacatgggacggtgatcacaccatccgaaaaatgccggaacagtgctctgccggagtggcgattctggcgctgaacccggaaggctttttcacccacggtgtcaccatcaaaagcacctttaactgggcgcaggttgaaatgcccgcgatgctggagccgacaaaattcaatcgtgacggccacgcctttgataacaacgagctggattatgagtacatcaccagcgcgattgcggcatcgggagcgacccgccgtgccggcaactttaaccgtgtcgtacacgatggcagtaagtttgaaggcgggcgtcgcggtacgtaccgtaacgcctgtgactggaccgcgctctataatactgaagtgactatgcgccaggcgtggcgcagtgcgaataacgtttccgggacgctgccggagtatatcgcggtgatgaccggtaccgggctgcacgtttctggcggatactggggaccagcggctgcaaaggactacaacgcgaaaaatggcgtggtgtacggtaccgctcagaaccatgtgttcacaggcgtgtataacgagtggacgtacaacttttacactgtctcccgctggggctttatcggtaaagccagccgtctgctgggcctgcattttgactgcgtcagcatgtacaaagacaacttcaccgagtacagcaacgtgcgctttgaagggggctgtttcccgtcggtcgatgatggcggcaatgctaaatatcatgatgatttctggcattacgacacccccaacggcgtgtccacctttatctggggcaacccggtgcgtgacctcggggctttccggcatacgggctttgatttcaggtacggcacgaacaatatgtatattcctgccggaaccgactgggattcaattcgtaaccgcccctacgcaaaagaaatgttcaacccgaacggattacagttaaatgccgggccagcgatggcaccctggcagcagccgtccatcaagtcggaaatctgtatctggataaaggaccataccgggaatttcaacccgagaaatatttacgcatgggtgaccgctgccagccaggacggtccgaacacggatgaggcgttgtacaagtcgtttgcagagccgtttattgatttcggtaacggctacaggatgctgaaaatcaccaacaagcggctgacggcatgggacgggctgtacacctacgcgcgaaacaccggtatttattttgatgttccggcagacggcagcacgcccatcacgattaaagcgattgaggcctatacgggcggggtgccgatgttcccggggggctgcggcaactacatcccggaggcaaacggtaattcagtattaagcccggccaccaaccctgtggggctggatagctccctgggtggagggctgtttttccccggtgatattataggcccgtggtcgcatgtgcggcgtacgcaaagtggttacatcatctccccgacgctgacccctggatatacgctcgatcggaaaatggtgacgggcggctgcacgctggaagctgcgtttaaggtggcattcagtgcgaccgttgaaacagttaacagcaacggcaccactatcatcaccgtgccagcggcattcctgccatatatcgccgtgggaataccgctgtatatcaccggtggttcatcaaccagcgtgaccgggcaggtgcagctgattaaacgtctgctgaacagcgacggcacatcatcgccgcgttatctggtgcagggtaccgtcggagctgtgggtgacacgctgaccatcgatcaggcgaaagtcccggcgtacacgttctacaatgaccgcaatttcaatgcggttaccgcgaactcagtgaccgttaacggggtatcggttgccacagcgcaccgctccaccgtctcaatggggattggatacagcggcgcgtcgggtgttaaggcagcagaatggtatttcaacggcggcatcacgccgtcgcacaggctggttgcatcatcagcatccgggatgaccctggaggcgggcggtaatttttcagtagtcggaaatacgttccccgctgccgatggcacctattcgctgggcacctcagccggtcgctggtcgcaggtttttgcatcgaatagcgttatcgggacgtcagatgagacgcataaaacccgcccccgggcagacaccccggcggaaaccgacgcctattatgaaatcgggcagctccccggcgtctggcagtggctggaaaaatatatggtcgaaggggatgacgcccgcctgcactccgggccgaccgtacaggcggcgattgccgtgatggataagtacggtctggactggcgggaatattccgcattctgctatgacgagtgggacgcacaggatgcgattatcgagacctgggatgacgagtgggaggtgatacccggtaccccagccgaactggatgaagccggaaacgttcttgttgaggcggtaccggaaacgcgcactcttatcagagcggcggggagcaatgttatccaggaggcgcgagaagccgggagcgtctacgcatttcgcaaggaggaactgctcttctggatttcccgcgcgaccatcgcaaagcagcaggccctgcatgaccggctgacagcgcttgaaatgaaactggcgtcctga

SEQ ID NO: 245186 - DNA, 963 bp, Klebsiella pneumoniae
gtgaaactgactataactcttttagttgcgttaacaacggttgtttcttttctatgggtataccaggggcttgagaacccttggtatttacttagtgaagaacaacatctgtatatatattccacgcaagcacaagtaattgctgctatttatggcttgacggttacaggttatatatttcttaggaacaaccaagacaaacagaaagaaaatgattcaactaaaatagatgcaattaatttaactcaaagcaatgaaagagttttattatttgcgttaacttttttttcattatcaacaattctactagctgtttttactttggtgtcatttgatgataaagtgaacattgttaggattgtgtctaaaaatttgtgtacggcatttttcataataactatttttcttttttgttacttcatcctgtatgtcctgcggttggataaaattgaaaaagcaagtagggaaataaagaaaaccatagacgagtatgaagaaaataaaacttctgctactcagacctcgtcgggcatgaatggaaatgagaacaagttcaatgatagcgatatgattgaagaaggaaatgaaaatcaaagatatgatgacgccactgactctctcgctctatttctatacaaattcaatcagttggaatcatttgttaatagactgcttgatgaattacattccaatcaaatccaacccactgatgtttattttgttctacctcaatattatagctcctctaggaaaggggggaagcgtcgctctatttcaatcgcattaaatgagttagttaaatttaggcgtattgatagtcgtttgaataatgatttgagggaaataataaagtatcgcaatgctttggttcatggtcaggatttaattccatcaaaaattatgcttcaaaagattgataggatttcaaaggaagttgaaagtttattaggaagtaaagattaa

SEQ ID NO: 245187 - DNA, 138 bp, Klebsiella pneumoniae
atggcgaatatcaaaaaaggtaaaagccgcggtgctgcaacacctacggctttcgtgcgaattaactggatcaattcacagggggaaattatgaacacgaaccaactgaatttcaataacgggggcgcccatggctaa

SEQ ID NO: 245188 - DNA, 3828 bp, Klebsiella pneumoniae
atggccgatatcgagaacattggctcctcttcgcctgcaatattactgttgaacgccaagaatcttgatgtggcagtcaatagtattacggaagctatctggaaagatcgtttcggaaaagaaagaaaaacatggcacggaattgaatctgactttgccacccagattgcatcacagcgggatcagtttgccacgcaaataactgctcagaaaaaccagtttgaaggccagatttcagaacagcatgatcaattcacggcacaaatcacggggcaaagagatgaattcaacgacatgctcgcagcctcaggctattcgtggctgaaagattatgttgacgggccagttacatttacaaatcgcagtcaggtcacagtttataatggcgtggcatatcgccttgctgcaagtgcgcctattggatttacgactacaggcactgacgcaacgagctgggaaaatgattctcagtatcttgttgctattggtgacaatgatatccgtcagcaaatccaataccagttaggacaatggcttcctgatgctgtttctctttttaatgtgaccactgattataccgcaataagggtcagagggttttatttcgcctatgatggtggtgcaggtatatggattaaaacaggtaatacagatctatcgaaggcaggaagtcatgtagttgatgaggcgaagatttataacgcaaatggtgtagagtatgcgctggatgtgagttatggcgaaattagcgtcctgagtaatggcgctaagtcgtattcatttgcaaaacttctagaccaaacaaccgacaactttgtatgtcttggtcaagtgataaatggaattgaatcacatttaactcttggaatatctactgctaatgaccgtaaaacatatgatggtggggctcgcctcgatattatagtgccaacaaacgactatagaattggtaaaaaatatgccaagctctatactggtgttgattattatttgaataaatccaggatctttattcaggctggagcttcgtataaatactcggttacaggtaaacgccttaacggtttccaacatggcgtggatgagattacagagaaatgggaggctgtaaacaaaggtatttattggggttcagttagccttcagaacgttaacatttacggtggaaccatttctggagaccatgatattcgctctttacgcgattcatgttctgctggggtagggattctggttttaaacccggaagggttttctacgcatggtaccgtagttcgtgaggattgcttgtgggccgttgttgaaacaacggcagaagttgaggcgaccgagtttaataaaaatggccacgcttttgacaataatgaaatcgattatgaatatattgttcctgcatgggttaacgcgggtataactacccgttttggcaactttaaccgcaccacccactacaacagtaaatttatgggcggtcgccggggtacgtaccgcaatggttgtgactggtcagctctgtacaactgtgaagtaaccaaccgtctggcatggcggaatgcggccaacgtgtccggtgatatacccgaatatatcgccgtgtgtactggtactgttctgaatgtctctggtggttactgggggccggcagcagcaaaagattataacgcgcgttacgggactgtatactcaacagcgcaaaatcattcatttttagctgtttatactgaatggacctacaatttcttgactgtaagcgcatggggattcaatggcaaggcgtcgcgtctttccggccttgagcttaaacttatcagtcagtataaagataactttacagaatactcatcactgcgctttgagggtgggtgtttcccgacaacggatgacggtggtaactcgctttacccggacggcttctaccattacgatacgccgaacggtgtatcacaatttgcgtggggaaccccaatccgagatctgggagcattccgacatggcggattcgatttttactacggtacatataacgtatatgtatttagtggtactgactgggattcaatacgtaaccgcccgtatgcgaaagaaatgtttaacgcaaacggattacaaataaacgcaaaaccagtcatgttgccatggcaaaccccctcagttaagtcacatatttgcatctggtataaagaccattcagggaattttaatccacgtaatatttacgcctggattactgccgcaagccaggacggcccgaacacagatgaagcgctatataagtcctttgcagagcatatgtttgatttcggcaatgggacaaaaatggcgatgatcccgaataaaaggctgacggcatgggatggcctgtacacgtatgcgcgaaattgtggggttatggtagatgtgcccgctgatggtagcacgccgataacgcttattgcggtagaggcttatcagggtggcgttccattgtttccagctggctgcggaaactacatcccggaaacgaacggtaattccgtgttaagtccggtcaccaaccctgtggggctggacagctctctgggcggtggtctgttcttccctggtgatatcatcgggccgtggtcgcatgtgcgacgtacgcagaatggttacatcatctccccgacgctgacccctggatatacactcgatcggaaaatggtgacaggtggctgcacgcttgaagctgctttcaaagttgcattcagcgcgaccgttgaaacggtaaatagtaatgccacaacaataatcagcatacctgccgcttatttgccttacgttgctgtgggtataccgctgtatatcaccggcggctcatcaaccggcgtgaccggtcaagttcggctgattaagcgtctgctgaacagtgacggaacatcgtctaaccgttacctcgtacaaggaaacaccggggcggtgggtgacactctgaccatcgaccaggcgcaaattccgccgtacacgttctataatgaccgcaacttcaatgctgttaccgcaaactcggtgaccgtaaacggggtatcgatcgcaactgcccatcgctcaagcgtatcctctggtattggttacggtggcgcatccggagctaaagcgctggagttctacgtcaatggtggaaccgcctacacgcaaaggattgttgccacgtctacgacggtaatgagcctggaaaccggcgggaacctgtcagtaaacgggaatacctacccgaatgctgacggcacctattcgcttggcaccccatccggtcgctggtcgcaggtctttgcatcgaatagcgttatcgggacgtcagatgagacgcataaaacccgcccccgggcagacaccccggcggaaaccgacgcctattatgaaatcgggcagctacccggcgtctggcagtggctggaaaaatacatggtggaaggagatggcgcccgcctgcactcagggccgaccgtgcaggcggcgattgccgtgatggataagtacggtctggactggcgggaatattccgcattctgctatgacgagtgggacgcacaggatgcgattatcgagacctgggatgacgagtgggaggtgatacccggcaccccggctgaactggacgaggagggtaacgtagttgttgaggcggtaccggaaacgcgcaccctcatcagagcggccgggagcaacgttattcaggaggcgcgagaagccggtaacgtctacgcatttcgcaaggaggagttacttttctggatcagcagggcaaccattgcaaaacagcaggatatcgaaaaacgcttggcagcaattgaagccagcatgtcatcttaa

SEQ ID NO: 245189 - DNA, 1860 bp, Klebsiella pneumoniae
  misc_feature (16)..(25): n is a, c, g, or t
gtgtttcattatccannnnnnnnnngtccgtctcgtgggctcggagatgtgtataagagacaggattctttaagtggattcatctatattgatggtcaaggctatagggcgggacaaataggtagttttgttagaataccaatcggatttaataacttatatggaattatcagccaagttggagctagtgcatcaccattagaacctgacgaaaatacaccagtggataacagatggctccgcatacaacttataggagaagcacaaagaaatggaacatttcaaagaggattatcacaatatccaacgatcggtgataacgtccatctagtatcggaaaaagaattgaaacaaatatatggacaaccgaacgaaggatattttgttaaagtaggacatatatcaaatgcagactcaataccggctcttattgatattaataagcttataaccagacattctgctgtagtagggactactggttcaggaaaatctacaactgtagcaagtttgataacagctttatctgacaataataaatacccttccgcaagaataattatgctcgatctgcatggagaatatggtagatgcttaaaagatagggcgaatatatttaagatcaatgcagaccccaaccctattgtgggtgaaaatgaattatacataccctattgggcccttaattttgatgaactttcagaagtatgttttggtgggatagattcagaaaaagaacgtaatatattactcgagaaaatacaaaaagtaaaaagtgagtctcttaagagagtacctcgagatggatcaaatcaggatactttaagcgcagattcacctatacctttcaatttgcacagtttatggcatcaattgtatacagaaacttttggaacatacattaaaactcaaggaaaacaaccacttgaaacactggcttatgaaacattagatgatggatctgagttgaaaggtaatgcactatcaggcatacctcccattttcaagaatgtatcaaatgaagctggtgccacaaagataaattacctaccatccccacttcctttaggtaagcaactacaagcattaggttcaaagctcagaattccaaggtatgacttcatttttaaaccgggtgaatggacaccatcaatacatggtgatatcagtaaagacttagaccagcttcttaaaggatggattggagacaaacctgtaactattttagatttatctggtgttccatcagatatattgaaaaccattataggtgctgtattaagaatattatatgaagctttattctgggcaagaaacttatctcaaggtggtaggcaccgacctttattaatagtcatggaagaagctcataattatttaaatagtcaagataacagtatcgcgtcacgtatggtacaaagaattgtaaaagaaggaagaaagtatgggataggaacaatggtagtaactcagcgcccatcagaaatcgatccgaccatactttcacaatgtggcactttttttgcccttcgccttaacaatgcttctgatcgaagccatataacttcagcaatgtcagataatcttgatggattaacaagcatgcttcctattcttagaacaggagaatgcattgtattaggagaggccgtaaagttaccgatgaggacattagtattacctccaccaaaggaccgcagacctgatagtcaggaccctgttgtatatgatatcctcccacaggatgaatcaatgacccccggtggctggaatatattaccagaaaaagaaccaaattatgccgaagtcatcgaggcttggagatcacaaagcccacgaataagtaaagtaaaattatag

SEQ ID NO: 245190 - DNA, 1194 bp, Klebsiella pneumoniae
atgaatactacacacgatcctatccgtcatataaaatacttaagacaatcattatctcaagataacgaggctatcggctttttcctatcagcaggatgcccgttgtcagttgatatgcctgaaggccagtggccattaataccagatgtagttaatcttacgaaatatattcattctgaattaaattataatgagcaatacgcaaaacttatatcggaattggagaaagcagagaaaaataaaaataatatagaagatatccttagctttttgcgagcacttgtatcagtgtctaaaggtggtgaagttagagggttaactgaagaacagctttcgattcttgaaataacaatatgtgaaaaaatagcaaaaaaaatcaacgtgagcctaccaaattcagaaacaccatatcataatttggctaaatggatacgctcaatagatcgcaagattgctgtggaaattttcacaacaaattacgatcttttaatggagcaatcacttgaagaaatggaaataccatactttgacggtttcgttggtgctaacaatccattctttgatcttagagccttggaggataacctcatccctaaacattggtcaaggctttggaaaatacatggctcaatcaattggtgtcaaaaacatgtgggtaatcaaaaaagagtatatcgaactcaccccaaccataaagagtcatcacacttaatatatccctcacacctgaaatatgaagaaagtaggaaaatgccatatttagccctactggatcaattaaatagatttatcagaaaaaaatcatcatttctcgtattatcaggctattcctttaatgatggtcacttaaatgatgttatcgttagtgcactaaagtcaaatccaacagctatggttttagggttaatgtatggcgattattatactgatgataaggaaaaatacccagaagcttaccgattagctaaaaatcaacataatttgaatatatggactaacgatgctgctatcattggaactaactatgggaaatggttttacaatgaaaacaatgatgacgacaaagaaatatttggatttataaaaaaaataaaaatagaagatagcgtttattgtaactccaatgttaacttcggtgacttcaaggacttttccagtttcttacaaagaattattggctctatgaaggattaa

SEQ ID NO: 245191 - DNA, 384 bp, Klebsiella pneumoniae
atgaaaccatatgtgatgttttatagtgaaacctatcgaaaaccaacccagtcattagagcattttattgatactacggtaagaactttcacaattgaatctgatgatagtgattcgattaatgcaggaacaatgataacaaaagtgaacgaaaatggagatgacgattttatgtatatgtctactattgaaacaagagagatagaaaacagtgatcagaatttctcttatcaaagcactgttgttacagagtcgattgaaaatgatgataatgattacctatcatgcgcaactttggttacaaatgtggtggaatcgaatgataatgattttcattcaatacatgacgacgcactagtaagtcatgttcatttaataaattga

SEQ ID NO: 245192 - DNA, 849 bp, Klebsiella pneumoniae
atgataaataacattacctacctaataataagattcttaaattattcattactttttcatacttcggatgatgagaatttcgacacgctagaaacaaggcagcaatgtgttcttgataacttacgactatccttaatagcaatacctttaggaaacaaaatttattatatacttacatttaaaaaatcatctcctgatttacttaaaaaggaaaactttggtttcctttttattcttgattacgacttaaaatgggggagaaagtcgccagatttcatagagagtcaagttgaaaaatatgtaaaaaacattgaggctcaatctatagaaaaaacgaaggaacaagaggaatttttaaagcaacggatatcagaaaataatgaaagcatgtcagttatacgtaacaaaataacccactacaccacgataatgttagcatttgcaagcgctttagtgtatttattcacaaaaacatccgctatatactcctcaagcgttctgattttaatctattactacatacttttaattataacagttcaggtggttaatttagccttatttttaagaaaaggtatgctgattagttcattttatcagtcttcatttaaagagttgagaacatctgcttataaaaaagaattaacaaaatcattttatagagattggtttgccaaaaatgatgatgtgagatattttgctggcatcgtaaaaaatgccgaaaaacatttatatcgtgccatttgtatcggatttatttttttcacattgataacattatcatctaatgaaaataaccaaactgacacccttcattcctctgaagtttatatcgttcaatatttatag

SEQ ID NO: 245193 - DNA, 306 bp, Klebsiella pneumoniae
atggataatgaaagtaaaagatcaaaaacagaaaaaacattaaagcaaaaggtggcatttgctcaacttaagcttaaccgtcttaagtcaatggagaaatcagaacaaaagaaaattgaaacaaggctcaagattattcttggtgcggaagtagctaaggctatgaattgtggtgtcgagcaggtggataaagaacttgttatggggattttactttcagcgtctgagttgaatgatattgaaagaagcaaatatataaaagcaggtagatggtttcttaatcaaatggatggaagacagaaataa

SEQ ID NO: 245194 - DNA, 564 bp, Klebsiella pneumoniae
atggttttattaaacagtaaaagaaaaaacaaaaaaggtttctcattgctcgaattattacttgttctggggattatcgcagcattagtggtagcggcttttattgtgtatcctaaagtacaggcttcgcaaagagcgcaagcagagtctaataacatagccaccatacaggcaggtgtaaaagcactctatacatcagcatccagttttaccggattgacaaatactgttgcggttcaggcgaaaatattcccggataatatgttgagcggttcaggttcttctgcaacacctatcaatgcattcaaaggaaatgttgtcttggcatcggcaaatacagggccttccgcagcaacaggctcctcatttacaataacctattcaaatgtgccagcagcagaatgtaccaagattatcactgcagccgcagggaatttctatacagcaggtgtaggaactgcaggtaatgttaaagccgcaggtgaagtattagatgttgctaaaactgcgacgcagtgccaaagtggtgggaatagtaatacattgatatttacttctttataa

SEQ ID NO: 245195 - DNA, 1173 bp, Klebsiella pneumoniae
atgatctatactccttttcagaagttcattggcaacatcaacgacaaattgacttctttcactatgattacagacagtaaatacatcagatatccagtgccagtaagcaagaagcgcaccaagatgagcttgggaatctatcctcacctctcattagcaaaggcaagagctttacgtgatgaatacctgtcgttgcttgctaatagtgttgaccctcaagttcataatgaaaaagtggctaatgacctgaaagatgctactgaaaatacattgcaagcagttgctgaacgctggttagaagagaagaagaagacagcaggactctcgcaagaccacgctaacgatatctggcgtagtcttgaaagaaacatctttccaacgctgggtaatgttcctatcaaagagattcgccccaaaatgctcaagcagcatctagacccaattgagcaacgaggtgtacttgaaactctacgccgcatcatttctcgcctgaatgaaatttttcgctatgctgccacggaagagcttatagagttcaatcctgccgacaatctcgctcagcgtttcagtaagcctaagaagcaaaacatgcctgcccttccacccgatgagctaccacgcttcatggttgctttatctaacgcatctatacggttagaaacccgtatgctgatcgagtggcaattgttgacgtgggtaaggcccggagaagcggtccgtgctcgttggtccgatattgatgaagagaacagatactggaacattccagctgagttcatgaagatgaaacgtcctcacaaagtgccgttgagcaaagaagctcttcgcatacttgaaaacatgcgccctatcagcggtcatagagaatgggttttccccagcatcaaagctcccctcagtcatatgcatgagcaaacagcaaacgccgccataatcagaatgggattcggtggtgaactggtagctcatggtatgcggtctatcgccagaacagcagcagaggagtctggtaagttcagaacagaagttctcgaggcggctcttgctcactcgaagaaagatgagatcatagccgcttataaccgtgcggagtatctagcagaacgagcaacactaatgcaatggtggggtgattatgttcagactcagaaatttaaggctctagcggcgtga

SEQ ID NO: 245196 - DNA, 1470 bp, Klebsiella pneumoniae
atggccttgttgaagtttcaggatatgaaggcatcgcaagaggactttacggcaaaaacagccggagaacagatcagacaaattggtgaggctgttaatggatacattaacttacgctacgataaactttccacgttaacatcgagtagtagtcaaagtaatgatccgggaccaagaacgtgtaatgcgtctgagtgtgaaataacctaccagacactaataaatgaaggacttctgcctgtttcttatagtggtcttaatatttacaagtcatcatataaaatcttactaaaacgtagcggaacgactcctaactatgttattaatggtttggttatagctactacggcatggaaagagggtgggaaaacacgctacgatctccttgggaaagcaatgcagactgctggagtggatagcggtatgactcaaagtacaacagttatttccgggatgcaggggcaatggcaggagtcttcttctaatttcagtaatattacgggtagtggtttacttggattcagaacgggctttaatagtgcattatattctatatatttacgccgtgatggcactctccccatgacaggtgatttaaatatgggaggcaacaatattaataatgcaaaaaatattactgcgtccggtaccggtagcttcggtgggaatatcacatcaggtggcacggtcacagccgcagggcaggtggttgctcataatggatatggagacactattgcgcttggtggtgatgctgctggaaatgattatgagataagattaagtaatggaactaaacctctgagtattttttccccaaatgccgcagattatatcactgtattaaatgtttataaaaatgcaaagatacagcaacgccttgcaactaatggcctcgatcctaatgatttgccttcaggctggagtggtggtctaagaaccaatgatgtctatgctgccggaacagttggtacaggttcaggaggtgctgtcaatgcttatttaaatagtagtggtaatatttatgcatctaatgatattaacgtagggcatcaggtcaacactcaatatgtctgggcctcaggtaacctgaactctaactacattcattcaaatgggaatattgatgctgatggtaggcttaatgcaggtgagtttttatacataaatggaaaagcaaatgtagggtcgggttgctctccaaatggtttacaggcaactgcatcaaatggattactattatcatgtgttagtagtaaatgggttaaagcctctggaacttcaggattttttacaatgaacaaaggcgtttgcttggttaataacccggaaacaaacacctgctcatgtcagtcaggcactgtagcgaaagaattgttttatacaacagcaactgaacagttaggtggtggtagccatggtggcggcacaacagtggtaaaagagagagtattatatcaatgtagataa

SEQ ID NO: 245197 - DNA, 321 bp, Klebsiella pneumoniae
atgaaaacgcctctgccgcctgtattgcgtgctgctctgtatcgccgcgccgtggcctgtgcctggctgaccctgtgcgaacgtcagcaccgctaccctcacctcaccctcgacgcgctggaaagcgccatcgccgccgagctggagggcttctatctgcgccagcacggcgaggaaaaaggccgtctgattgcctgtgcattactggaagatttgatggaggccgggccgctgaaagccgccccggcgctgtccttcctcgggctcgccgtgatggatgagctctgtgcccgccatctgacatcgcctgtactgcactga

SEQ ID NO: 245198 - DNA, 705 bp, Klebsiella pneumoniae
atgcacggtaagggccgtcgcataaccctccgctatccacaggcgttttcccgcctgtttctgtccgtctataagatggcatgcccctttgacctgcccgcctttcagggtgcgtttaagaccgtcagcgttaataagctggaggttaaccagcgtgccggtcccgtcatacaacggtaccaccacatcaccggcgcggtaggccacgccgccggttttgtgcgacgtggtcagcgtcagacactcacgggcgggaaagcccttgcacgtcaggtaggcgttgccggtggccgggcgggttttctccagcagtctgacggccagcgcggccgctgctttgcggtcggcttcagtctcagcctctgcggctgctgtcacccccggggctacctgcggcagattcccggtgacggcgttcaccttcccggcggcctcggatgccgatatgccgaacaccttctcaaccagtttcaggccgtcaccggcaccgcactggttacagaaccatgtgccgcgcccctctttatcgtcaaagcggaaccggtcagcgccaccacacaccgggcaggcctgatggcggttttttatcactttcatccccaatgccgggagaatgcgcggccagtggccgcacgcctgttttacggtgtccgttacgttcattttcatggttttttctccctcagtgcagtacaggcgatgtga

SEQ ID NO: 245199 - DNA, 321 bp, Klebsiella pneumoniae
atgaaaacgcctctgccgcccgtattgcgtgccgccctgtatcgccgcgccgtggcctgtgcctggctgaccctgtgcgaacgtcagcaccgctatccccacctcaccctcgacgcgctggaaagcgccatcgccgccgagctggagggcttctatctgcgccagcacggcgaggaaaaaggccgtctgattgcctgtgcattactggaagatttgatgcaggccgggccgctgaaagccgccccggcgctgtccttcctcgggctcgccgtgatggatgagctctgcgcccgccatatcacatcgcctgtactgcactga

SEQ ID NO: 245200 - DNA, 177 bp, Klebsiella pneumoniae
atgagagtctgcgtcaacagcgtttcttcttgcttcctcattttccttcgttcttttatatacttttcgtggtttatcaatatgtatgctattgttggtattaggaacagcgttattctttttcttcttactgaaaacaaatgcgtcagtatagatttctttggtttcagtttctaa

SEQ ID NO: 245201 - DNA, 297 bp, Klebsiella pneumoniae
atggtgctgaaagcggatgtgatggcaaacccgctcgccaacaccatcggccatcagggctacaccgagccggagaaagaggtcatgcatcaggtggtgaccttcctgaccaggaaagtgagcgacttctccgtcacgccagcggatgagccggtgctctccctgaccggcttcccggccgtcgcacttccgcatatggaccacgacgccgccagtacgcccggagagcgtaaagtctggcaggagaaaatccgtcagcgcgaggctgacctgaaagcgcgggggctgctgccatga

SEQ ID NO: 245202 - DNA, 840 bp, Klebsiella pneumoniae
atgagccatgcgcgacccggtctgacgacctgctctcagtatgatgctgccctgcacgccttgtcggcggcgcgccagcgctgggctgaaacctcagtgaaccgtcgtctggcgctcctgcgccagatcaaggatgccctggccggcattgccccggcgtgggtggccgccgcggcggcggccaaagggctgccggcgggcgatccgctggcgggggaggagtggctggcgggcccctgcgcgctaatggtcggctgcaacgggcttatcgccaccctggagcaactggaggagaagacctttctgcggcggatcccactgcggacgctggcggacggccgcctggcgctgcgggtggtgcccggcacgctctgggatcggctgcttctgtctggtgttcgcgctgagatatggatgcagccaggcgtcacccgggcccatctcgaccgctatgcggcgcgggcatacgacatcccgcctgccgcgcggcagggcaagctggcgctggtgcttggcgccggcaatgtggcctcgattgcgccactggatgtgctacacaagctgtttattgagaatcaggtctgcctgctgaagctcaatccggtgaatgattatctgcacgatctgctggcccaggccctggcgccggtgattgccatggatgcgctccgcatcgtcaccggcgacgcccgggcgggagcgtggctgactacccatcccgctgtcgatgagatccatatcactggctcccgcgagacccatgacgtcatcgtctggggcgagggtgagacggctcgccagcgtcgggccgccgggacgccgctggcccgcgtcgggtga

SEQ ID NO: 245203 - DNA, 1959 bp, Klebsiella pneumoniae
atggttggtagatgtgcgtcgctgtcatcattgcgacttactgagccagccgttgacgggcagtggatcgttcttgaaaaagccatttccggtggtcaaatcattaacgaagttttgacctatgatgcggctgacacagtcagccctgacaatggctattctgtttttgtgacagccaacggtcgacgctggaaagctgacctgtcaaaaggatacaaccctctattcttattgggggcgttcggatacgaaagtatctcctcatgtatcaacaaaatcgcgtatgaccttgcggttttatggggaaacaagaagggggttattgattactgcacaacaattagaatcccgggcatgcctcatggtgagacgcgatataatgtgactggggcgatccatatcccttcgttcgtcaccttaaagatggacgttgacacatattttgattattacactgtaactaataccgatggggtagtaattgataacagttacttccctatgttacttgattctgcgtatgatacatcatctacagcacgcccaaggtctgtactcctgtgggaaactgagagagatatttttacaggtggtaggctgatactgactcaccctatcgggtcagcaagaacgtcgaacgcgggtatcaagataggcaatacggctacgggttttattgacgttcgctgttgccgtgtccgcaactttgagtcaattggcttttactacggcattaaaattaacccaattgacaactacataaacacatttgatggcttccacctcggaagaaacaactatgccgtcgctgtccttggggataccaaaagtaactcaggagaacgcttcgtatttagagatgggttgctttctgattctgattctgacctgatttacgtagagaataatgcatttgagttattcttccacgggtgttctctggattatccgacaggcgacatggtaaaaataactaagaacggtaatgctctcatttcgttcagtcaatgccatattgaaggcgtccagggaatgcttgttaatgttgtgtcttcgaacacgtacccaaaatacgggaagaaagtcgtattttcaaactgcatgatagaccttggttctggtcagagcggggcttcaagatggaataaaacgtggtttttttcatcagtcatcaacacatatgttttgattgaaaaatcatgccgcgtgtggtgcacaacatcaacaatgaaccaggctaaaaccgcttatcagtcacttatagtgtctgggcaaccagctaataacgccattgttttagattttccgcagaacatcgaagatctgcttgacgcatcaacggttctgcttggtaagttcaacccaacaggggaagataaacgagtaataagtaccaaccgtttcagcggaacagatggcgacgcatacaccggatctgtatcaaccgctgattcatatggttggtatcgggttaatgggacgtggacatatagcccagcagacactaatgatggtgatgggttgcaatctatttccgttacatcagatagtgaaagcaatgtgtattacataatgtgtgctttaccctaccatgttctttctcatgaaaagttcagggcgttaggggcgataaaggtcagctcgggatatacaggtgccgtaaacgtatcctgtggtgtggaagtccgtagtattttcacaatgaacagcgccactatatctgaaaatactctggcaacaaactacagtgccgctgtagatgttgcagctttagcagaatcaaacggaaggattgataagtttcagggattttgtacccaggctgtccaggcaacctcgtattataatacagcacacccaatgagccatgtacgtgttggtttgcgtatttcgggatttaccggaacaatttctctaaaattaccaactgtaaccagtcatcgactgctggggagctaa

SEQ ID NO: 245204 - DNA, 231 bp, Klebsiella pneumoniae
atgagcgacaaagatatcgagcagcaaatcaaatccaaaggtttaaccgcggcccgcgttacgttggatgattttaaagaaaacatcgtcaatacagagatcgttaaacacgtttccgtatcaggtcaggtactccgttgggccgtactgaccacgaaaaatggttttgctgttactggcagaccctcatgctcagcctcttcagaaaacgatgacgctgaaattggttag

SEQ ID NO: 245205 - DNA, 489 bp, Klebsiella pneumoniae
ttggcgctgtatgcctggcttgacggtgactggtggaccgtcctgtggggccatctgctgtgggtggtgccctggatgctgtttattttgcgcccggcctggcgccagcgcgatccgcggctgacggttgtcgcccgcacgctcggctggggatccacgcgtattttctggttgctgaccctgccttcgctaactcgcccgctgctgaccgccctggcggtgggcttctcagtgagcatcgcgcagtatctgccaacgctatggctgggggctggccgaattccgacgctcaccagccaggcggtggcgctcagcagcggcggcgaggcgcagacgctcgccgctcaggcgctgtggcaattactgctgccggcggtatgctttaccctaacggctctgctggcctggctggcaggctatagcgcgcgaaaaaatttgataccgaatcaaagaagtattgatacttatgaaaagttgaaaattaaataa

SEQ ID NO: 245206 - DNA, 669 bp, Klebsiella pneumoniae
atgaatttattaaaatactatcaacaatatcgcgacaagtggtgggctttaccgctcgttctgcctgcgctgttattaccggtcgccagatgggcgaatacctacaccatgctcaatggtcatatggtatttttgtattatcttcccctggcgctggtgctcagcctgatgatgttttttggctgggcggcgatccctggcattattattggcctgctgttaactctggcccacggcatgatgtttgagcagtccatcggtgtactgttccatttccttatcccctgcgtgctctgctggggcggctaccgcatttttgtcccccagcgtcagcaggtctcacacggcaacgtccgactgatgccgcatcgtctgttctggcaaatgctgctcccctcggtcatttttctgattttgtcacagattgccgaatatcttggactccatccgcgcacaacggaaatgaccggcgttacgccatttagtttacgttcattaatcacctttcaggcgctaatggtagggtgcctgaccggcatgccgctgtgttattttgtgttacgggtcattcgtaatccttttcatttacgcggctttatttctcaggttcgcttacaaattgatccaaaaataaaaaaattgaaattatttgctgggcgacggtattaa

SEQ ID NO: 245207 - DNA, 1824 bp, Klebsiella pneumoniae
atggcttttaatccgcctattggctcttcagccccggaagtattattgataaatgcaaagaaccttgattttgctctgaatgacattaccgcggcgatctggcgggacagatttggtcaggaaagaaaaacctggtatgggatcgaatcatctttagaggtgatgcgtgcagcgcaactggcggccttcatttcacagttcaatcaacaggcgcaggagttcgacgcgcagatgagcagtcaggccgcacgatacgaggcagtgctgcaggaggcagggagaacggttttagggcgttatgaagatggcccatggacactgacgagttataaccagctgatttcctacggcggtacattctggaaactggcggcgtcggttgttatcggctccggttataccacggcgggtaacacacctggaacctggaacgctactgaccgggttaactttgttgatgtcgggcaggatcagcttcgtggtgaactgggcgcaatctttatgcctgcgccatcgggaaatactgtgcaagatactctgctgctccaggctgctctgaacgttggcggccagattatttataaccgccccggcgagtatctgtataacacccacagcgtgatcaaatccgggacatctttgcatacttccgccggggtgaactggaaacaggtagccggaaaatctaaccccttcctcgtcaacgaggcgttttccgcatcgcgctatgctgtaaccagcatgaccaaaaacgaagcggcgattaacagttatcttgatggcgctgacctgaagagcaaaaactacatcaccgtggtgtgcgagaaccacccgtttattaaaggagactgggcggctttccacggggcgaaggagttcgcttatgacggtattatgcgtgtcatttccatcattgatgcaaatacgtttattgcagaaagccattcaatgccaaccgcaacaacttccactccggatgatgtgttctggcatggcatgtactgctttaaggccgaccataatattgaggtcgatatacaggggaggattgacggcaactggcgcaataactctacggcgtcgacaaccgattttgatgaacgcgtgaagtttatggggatggcgttctggggggtgcagcacctgaccgttcgcattaatgatgcgttcaacatccgcaaatatacagttctgtttgcaaatatccgtaatgcctacattccgcgtattaatttctataacttctcggatggcatccatttccagccgccctatgttggggtaagcatcggcacactggccggggcgaccggtgatgatatgctggcgctcacgaacggcgactatgaaacctatcagttgagccgcggacacggctacagtctttacgctgatcacctgatgccgcagaacgcacttacggccatgaaggtggtgggggcgacaaactatcgttactgggatattggcatcggttctatttccgggtcaacgcggcttcatgttatcgctgcaattcgcgatctgcctctgacgtggactgatattggcagatttcacatcggttcgtgcgcctgtgcgtctcagacgaaagatgatttttatctcaataccgaccgaatggatgagtttgttattgataactataccgtctgctcacctgaaggcgggactcacagcgttacaatgggtaatcgtttcggtgttacgactaaggaaggtgcgaataagcaggtcatttcttcccaagctgactcgctgattaaaatttcgcggatctgggccgatttttttcccgcaaacacatcgaatcagcctatttag

SEQ ID NO: 245208 - DNA, 1395 bp, Klebsiella pneumoniae
atgaaagatcacattttgtccgtcaaagagaaaattggttacggcatgggtgatgccgccagccacattatttttgataacgtcatgttgtacatgatgtttttttacaccgatatttttggtatccccgccggctttgtcggcaccatgttcctgctggcgcgcgcgctggacgcgatttccgacccgtgtatgggtctgcttgccgaccgtacccgcagccgctggggtaagttccgcccatggatcctcttcggcgccatcccgttcggcctcgtctgcgtgctggcctacagctcgccggatttaagccacaacggcaagctgatctacgccgccgtgacctacacgctgctgaccctgctctacaccgtggtgaatatcccctactgcgcgctgggcggcgtgatcaccgacaacccgacgcagcgcatttcgctgcagtcctggcgcttcgtgctggcgacggcggggggcatgctctccaccgtgctgatgatgccgctggtcaactttatcggcggcgaagacaaagcgctcggcttccaggggggcatcgcggtgctgtcggtgattgccttcctgatgctggccttctgcttctttaccaccaaagagcgtgtcgaagcgccgccgagcagtacctcgatgcgtgaagacctgcgcgatatctggcgcaatgaccagtggtgggtggtcggcgtgctcaccatcctcaatatcctcgcggtctgcgttcgcggcggcgcgatgatgtactacaccacctggatcatgggctcggcggcgctgttcaccgccttcctcacgacctactgcgtcggcaacctgattggctcggcgctggcgaaaccgctgaccgactggaaatgcaaagtcagcgtcttctggtggaccaacgccctcctggcggtgctcagcgtggcgatgttcttcgtaccgatggacgccgaaatcaccatgtttgtctttatcttcgtcattggcgtactgcaccagctggtgacgccaatccagtgggtaatgatgtccgacaccgtcgactacggcgaatggtgtaacggcaaacgcctgaccggcatcagcttcgccggtaccctgtttgtgctcaagttagggctggcgctgggcggcgcgctgatcggctggatgctggccggcggcggctatgacgccgccgctaaaacccagaacagcgccaccctcaccatcattatcgccttgttcaccctcgttccggcggtgtgctacctgctgagcgcggtgatcgccaaacgctactacacgctgaaaacgccgttcctgaaaaaaatgatggccgagctggccgagggcgcgcgtcgcaacgaacaagatttcaccgccgccccgatcgacaaagaatggcaaaactaa

SEQ ID NO: 245209 - DNA, 2013 bp, Klebsiella pneumoniae
ttgaaaagacgtgattttatcaaagctacagttcccattgttgcttttagccaactatcaaaccattcaaatgccggaaccagtattcctactgctcagtatcgcaatataattacctgtgattgcttggatgatttgttacaaacagagccagaatacgaagggcaaagtcttttattaattagggcaataataaatggccctgttttaaatgagatttttattcatgattcttatgatttgtcatcagaacaggatggggtttcaatctttagaactaaaaacggtgcatgctggaaagcggatatttctaatggttacaatccgttattgttaggttttactgaatcagataataatctagctgaatgcataaatcgattaatattaatcattgtcaaaaaagcagtaagtaactcgactgactacatttataattacactattaaaattgctcctccctctaatgatgctaaatgttattatatgaagcattctattgtttctccttcatttttatcattcaattttttggcagcgactgtatttgattataaatttgcaacgaataccaatgcttttattatagataatagtttgttccctgagttacgtaaagaaaatttatctaaacgctattcttctagacaaataatgtcgtggaatactgaatctagcttctttgttggggctaaaattatattaaatcatccgacaggcgaacataaaaactttagttgcggtctgttaattggtaattctaagtccggatatattgatgtaagaggcactaatttatctaacttttcgtgttttgggttttattatggcctgtgtataaactctttcgatacgtatatacttagttttaatcaattccatttcggaagaaataatattgctatatgcatacttggttcatataaggaaaatgctggtgagaaaattacttttattaatgggacaatagcagactcagattctgatctaatatatattgaaaataatgcctttgaattatttttttcaaattgctcactagattaccctactggtgatttaattaaaataaaaaataatggaaattcctatatatcttttaatcaatgccatattgaaggtgtgcaaggctgtttggttaatgttattgactctactctatatcctaggtttggtaaaaaaataatattcagcaattgtatgattgatcttcattcgggtcaaaaagaaaaattcaaaacatggtttttttcttcaaccccaaatacatttatattagttgatgagtccactcgtatttggttgggtgttcgaaattataaagacttaggtagttcttactatgctttagtgcctttttcgtcaaaaaataaagttttgattaaatggcatcaatcgcaagaggatttatatcacaactctttggttccacttgcacaggtttcttatgattctacgtcgttaatatccataaatacattttctggtatagctcatcaaaagtatacagctaataaaaacaagtttgatgccgatgggtggtttgttagtgatggtgactggttctatggtgaaaaagataaagaaggatatcaatcattaaaagttctctcatatgattcaaaggcagagtttgatttgacctatggtgttcctattcatgataatattttcgagaactatagattttttgggttagttgaagttggtgatgattttaaaggcaggattgaaattgcgggatttcttaattatcatttcctcgaagaagaaaagatcttgaagccaaatttaacgagaaaaataattgggactaaaactattgtaagcaaagatttcattagccaacattcaaatttgatttcttttgctacctacccagtcaaagtccctcaagaaaacaagttttttgttactcttccttttttggtctgcggtatacaatttactggttttacaggcacaatagcgataaaattaccagctgttgcaaatgacaagttactttcctga

SEQ ID NO: 245210 - DNA, 1050 bp, Klebsiella pneumoniae; identical to SEQ ID NO: 197163

SEQ ID NO: 245211 - DNA, 282 bp, Klebsiella pneumoniae; identical to SEQ ID NO: 144616

SEQ ID NO: 245212 - DNA, 1080 bp, Klebsiella pneumoniae
atgcagattggttttatcggcctcggcgcggtggtggaaaccgcctatttaccggcgctgcgtcgcctgggggacgtcatcgaccgctgccagggctatgacctggactgcagcagagcgctgccggggatccagcgctgtagttcgctgtcggcgctgctggccgaacccctggatacgctcttcattaccacctcatcacttcagcatctgcccgtactggagagggcgttagccagcggcatttcccgcatcgtggtggaaaagccgatcgtggccaaccttgagcaggccgcccggctgcgggcgctgctggcgccgcctgagcaggccgcgcgggtgctggctcttgaccactggatggcgcgaggcgttgcgctgaacgctcctggcccgcagtggcgggcggaaggggaggccagccgcctgccgccgccgcacctgtcagcgcaggatatcgtctggctcgaaggctatttacaggagccaagcggctttaacagcgctggtgagccggtcgcactcaattttgccaccggggagctggatacccggcagctgcgtcaccctgatggggtgatcctcgatatcggcacccatgtcctggcgatgctccgcgaaaccctgcacgccagcggaagcgatacggcgctgagcctttcccttcgggtggcgaaagaccgcctcggccatgacattgctcctggggatacgagcactgccgagggggaggcgcatctgcagggaaccctgggcactatcccgctcaatatctggctcaacaaatatgcgggtcccgcgggcgggcaaaagggaatgcgaataggactgcgggacgggcgaataatcaccctcgatcgcgcccctgagggcgaagtggtgacgctacaggacggcgagcgggtgcagcgctggacccggcccggggcgatctatacgcactgtcttgatgagcagatcctcggcgctgataatctgtttatccgggcgccggacagcgtggccgggctaacgcagcgtaggcttgaggaagtggaatggctgctcaggttgcagcagcaattacgcggcccgcattaa

SEQ ID NO: 245213 - DNA, 1608 bp, Klebsiella pneumoniae
atgcaacgttcagcactactcgcactcatcggtgcggtgctcttgctttcggccggcgctgctgcggcagcaggagatataactcaaggcaatgaaatgaatgggcttttgcggatgctctatgacgccgcaagtgaatggtcaccacgactacagggctatgcactcacattgctggcttcccttgcactaatccaattggtgtggacgttcatgcctttagtcatgaaacaagctgacttcggcgaaatcgtcggcgagttgatccgcttcttcatggctattggctttttctacgcgatcattgagcattctgttccttgggcgacagccgtagtagacagttttcgagaagcagcaggcacggctagcggtttgggccgtgcgcttcagccgggcgatatgttcgcggtcgccgtcgatttctcgcgcaccatcgtagagggaatctcagttttctctccgggtaaagcggtcctcatcgcgcttgttggctgtttggttttactgtgcttcgccttcatcgcggcattcatgtttgtgacgcttgtagagtcatacgtcatcatcaacgcctccgtgctgttcttcggctttggtggttcgcaatggacacgcgactttgcaattgctccgctccgcttcgttatcgcagtaggtgccaagctgttcgtcctaacgttgatcgtaggaattatcgtcacgtcggcgaagtcttggttagcagcgtataccaacgatgaagcgtctctgatgacattggcgggcttggctctggtatgcgcatacctgactaagactattcccgaattgatcggcgggatgattagcggcacgtcgatgggcggcggatcagccattggtggcatggctgctgccggtgcggccggtgcgacggcggcgatcgcaaccatcgccacggccggtgcggcggctccggccgctgccggtgctcttggcgcggccgggagtggtagtgcagcgggggcaggtgcggcgggtgccggtgggcttggcggcggcggtctggcggccgcgatcaattccagctttgccggtggtagtgcgcccgccgcagccgcatcaggtggcggggcggcctctggcctcggcgcgagcactggcggtcaaacggcagccaagggcgcgtcgtcggcaggtgccagagtgggcggcagcggcgcaccacaaacgccgggcgcagcgccgcagcagcctaacagcggcgtacagcaggccgccaagcaggccggaaaagcggcgcaggccaacgacgataacgaccagcaagcgacaccaaaagggggagttgtcagctccggcaacgcactttcccaagcggccaatggtggcgcaaagatgctcggcgtgatggcctcgatggcagtgccgggcatggagaacgcgcactctttgtctcttggcgcaggcactccaccacctgttcccggcgatgccaactcgacagccccggccaacggcgcggaaactgtagtcgaggaatctaatgttatccgaccagctttggacaccagttctactcccggtcgcctcgcttcgctcgacgtgcagggcaccgcttcgaacaacgatcaaccggagaaataa

SEQ ID NO: 245214 - DNA, 1347 bp, Klebsiella pneumoniae
atggccgttcctgctcatcacaggtcacgtaatgcatatcactttacgtcgatagaaaatcttgaatcaataattgataatggtattttttcgacaaatcagaaaattgctcgtggcattcagcatgtaaatgttgctgaagagggaatacaaaggcgtagggcgctaatgcaagtgcccggtactaatgggcgctgcgttcatgattatgtgccgttttacttcgctaaaaaaacgcctatgcaattagccgttctgcacaagaagaacgtcgatcagcaattcattatttatttttcagttcctgtgctggtgctggagacaagacttggggcgtattatacgaatgcgtccgcaaatacagaaaatccgccagccttcttttccggtaacaatcaatctgaacagcttgacattctggattggcaaacgatcgatagtaatcgatggagatatgaggacgacgctcagaaacatcgtaagatggcggagcttttgttacccgaccatgtgccactgcacgaaattaatcagatagttacttggaaccgaagtatatctgattacgtgagacaaatatttcagaataaaggtgtttgtgcgccgaatgtggctgaaggaggaggggatcattactattgtgagcctggaaattggaattcctctttggtcacaggccccttcttcctgaagcgttcttttgaggaagctgtttcttatgttgtttcgtttcagcggcaggggatgccgaaattcaatagcctagatgatgctttacgtgctatccgcatcaattttacagttatcagagagttagatgacattgatgggttaggtgcaaactatgggcctcatagggaagatgttggcgctcattctcgacgcgttgcccgtcttgtgttgaactcacccgaatataatcagttagaccctatccatcgtgatgtcttggagctatctgcctatcttcatgacataggcaaggggccgaaagcgcgctgggccaatagcttcatggataaagctgatgacgagcatccaagaaaatcactctcaatgctaaagcgaatcttgacggaggatttcccagcgttgcctcaggatataattcgaaaaattattatgctggtcacatatgatgatctactaggtgaaatagtagctaaagggcggaacaaaagccagttgtttgatatagttacttctcctgaggacatcaatatgttggtggctttgagcaaagctgacattggtgcgctgaatcaaatttggttggaacgggtttctcaagatattgataacctgagaattgaagtcctccaaaagttgcaaggtaatattttatga

SEQ ID NO: 245215 - DNA, 1140 bp, Klebsiella pneumoniae
atgatggaatttgtttctggagatttttttgattttgatgcggatatcatgattaacacggttaactgtgttggagtgatgggtgccggcgtggcgcttgcattcaagaaaagatttcctgaaatgtatgaagattatgtcgagaagtgccgcctagatattatccgccccggatttcctgatgtatggattcaaaaggacatgatctcaaaacagatagagatcataaattttcctactaaaaatcattggagaaaaccatcagaatatcattatgtagatgatggattgaaatggctatccaattatcttgaaagtaaaccggggaaaattgttacattgcccgcattgggttgtggtcatggtggcttggattgggacagagttcgttccatgatcagtgaaaggctaaaagattcgcctgcgcatatatatgtatttgcgcctcaagattcagtacaggcaggtaatgttaagaatgcagattctggctacgagaagcttctcggctcggtgggggctggacttgtaaaatatacgtcggacacatatccgaaaaaattgcgttcttatacaaagaaagacttgtattattatccgcgacagcaaaataattttatatacgattattcaattgtttgcagtagcaagcctgaagcggatgaaatggatgctatacgaaagtttgttgatttttgtattctagaaaaaagtagcgttcttttgggaggtactgcctttgagaaaaagctggcgcttgaactctcggctcgaggtttagtatgtggctgtctcttgccatctggaatctatgattcggtaaaaaagatatcctcggcgaagcagaaagagaaacctaatctcctgtctataggtaatccagaagtagctttcgataagaaggagttcatgccttctgtttttgcgcgaatgtatctttctgggaaagtggtattttttgctagtaaacttgcttggctggagaagtacaatgggcaactcaaaagagcctctctaaactcatttttttatgaatctaaatgccgttctccacaagatgtagccgctgtatctgatattggcgctaaaggatttgacttggatgttcagtttggcaaatttttcggagatcataaataa

SEQ ID NO: 245216 - DNA, 1068 bp, Klebsiella pneumoniae
atggacgacctcacgctggaagcatacattcacaacaccatttcatcgaccccctcgcaaaacgtcgagttttgctggcagggcggtgagcctaccttatgcgggctggatttttttgcaaaggtggtcgagctccagcagcgttaccgtggtaacaaaatcatcgccaacagcctgcaaaccaacggcatcttgctgaacgataaatgggctcgttttttgcgtcgtcatggatttctggtcggattatccattgatggccctgcgtcactccacgacacctggcgtacgacgggctgcggaaaacccacctgggaaaaagttgtgcaggccatacgctgcctgcagcagcatgacgttccggtgaatgccatggtggtggtcagccgccagtctgcaagccaggggaaaagtctctatcgctgcctgagccgcgagctaaaccttcaccatctccagtttattcctctcgttgactcccctgctccctggtcagttacccctgagggctggggcaaatttttgtgcagtgttttcgacgactggctggaaaacgatgttggcagggtgtttatccagtactttgataatctgctcggcgtatgggccggccagcccgccacgctctgcaccatgcagcctgtctgtgggcagagtttactggtggagcaaaacggcgatgtctacagctgcgatcactttgtctcagaggaatataagctgggtaatctgaagcaagatgctatggcagcgatggcgagctcgccatttcagcaacagttcgggaagcaaaagggccaactctctgcccgctgtcagggctgccactggcgctttgcctgccatgggggatgccctaaacaccgttttaccatccatgacgacgaagcacagaattacctgtgcagcggctatttagcctttttcggccatatcacgccctatatgaacgtcatgcgaaggctttttttaaattgccagccgcccgcgctcattatgagtcttatcccggagattcggcaaaatatattacaattaacggagtctgaagatgaaagaaccaaataa

SEQ ID NO: 245217 - DNA, 1152 bp, Klebsiella pneumoniae
atgcccggcacctttgccggggctatcgccgccgacaaaggatggtccttgccgcagatctatctcggcctgacgcttgcgatgctgatgatggccgctgtctccccgttcgttgccaggctgctggctcgctttggcggaaggctggtggtcaccagcggtaccttactgatagccgccagctgcgccatgatggcctggcgcccttcgctggccggctggtacgccgcctggctgctgaccggcatcggcatgcggctctcactgtatgatgcgctgttcgccgcagtggtgaatctgtacggtcagcaggcgcggaaaactatctctcatatcactctcgctggcggtctggcctctgccctcttctggccgctgggcgaggcgttattaaccatcatgccctggcagaatgctctgcggatctatgcgctgtttggcctgctgagcgcatggctgagttatcaactgcctcgccagcggctcagttcagcggcgaaatcaccagcctcgccagcgacagcagagggcgaccggcgtaacggggcgcgttacgcgatctttattgcgctgatcaccttcatctctaacggtacctctacccatctgccggagtttatcagccactttggtctgccggttgccgtcggtatgctgtggggattcggccagaccggcgcccggctgggggaagtgctggccggtccccgggtcacctcactcacgctaacgcgttttactgcgctcgccatgccgccctgttttctccttggattgagcagcacgagctatgccggatgcgcagccgggtttgtgctgggctatggcgcgattaacgggctggtgacgattgtcaaagcgacgctgccgctggcgctgtttagcgcagaaagctacgccagccgcacgggtctcctgctgatccccgggcaactgatggcagctgtttcaccctttgcctacgcatggctgaaccaccggctgggcattatcggcggaatgtgggtgtccaccgggttaacgttgatcgttaccggactggcgctggcgattgtgcgcgaggcgggtaaggcgcaggatgaacgtaatgtagaatatccggcagcggccgttgaccaaccgatagccaaaaacaaccttgctgaagagtaa

SEQ ID NO: 245218 - DNA, 2148 bp, Klebsiella pneumoniae
atgtcacaagttaatgagaaaactaaagataacgatgaaatcgatttaggacgtttaataggagagttaatagatcatcgtaagttaattatatctataacaactctttctacgttgattgcattaatatatgcaatatttgcaacccctatttttcaagctgatgctcttgttcagattgaacaaaaacaaggcaacgctattttaaatagccttagtcaagtattacctgattcacaaccgcaatcagcgccagaaatcgctcttttacaatcacgaatgattctaggtaaaaccgtcaatgacttgaacttacagatcaatgtacagaggaagtattttccactaattggcagaggatatgctcgattaacgggacaaagtgctggcgaaataactgtagggatgcttcatcttgaatcccaagatcaaacagagacgccagatattacattgaaagtggcggatagccagaaatttataattgaatacaacggaaatgaagttagtggtaatgtaggagaaataatcaaaaaagcaggattgacgatcagagttgattcaattgatgcaaaagaaggctcagtattcgagattaattatgtagatcagctcaaagcaataagaaatcttggtacatcttttaaagttacagaacagggaaaagacactggtatattaagcctaacgttaactggcgaaaatccaaaattaattgccaccattttaaatgatatcagtgaaaactatttagcacaaaatattgctcgtcaggctgctcaagacgcaaaaagccttgattttttaaatgaacaacttcctaaagttaggacagaattagatatcgcagaaagtaagcttaacgaatatagaaaacaaaaagactctgttgatctttctatggaggcaaaaagtgttctagatcaaatcgttaatgttgataaccaactgaatgaattgaccttcagagaagccgaaatatctcagctctatacacgtgaacatccgacatataaggctttaatggagaaaagaaagacgttacaggatgagaaaaatagactaaataagaaagttagtgtaatgccttccactcaacaagaagtattaagactcagtcgggatgtagagtctggtcgtgctgtatatctacaattattaaacagacaacaagaattaaatattgcaaaatcaagtgcggtaggtaatgtaaggataattgatcaagctgttactaatcccaaaccggtcaagccccagaaaataatgattgttctgattggcatagtctttggtttattcatttcaatggggcttgtccttctccgggtatttttgcgaagaggaattgaatctcctgaacagttagaggaagctggtgtaagtgtttatgccagcgtcccagtgtcagaatggttgatgaaaaagattgataaaaataaaagaaagaaaaatgaatccacaattttattaacagcagaaaatccagctgatatggcagtcgaagcgattagaagccttagaacaaccttgcattttgctatgctagaggcgaaaaataatgttttaatgatttcaggggcaagcccaaatgctggtaaaacctttgtaagtacaaatctcgctgcaactattgcttcagcaggcaaaaaaatattgttcattgatgccgatctccgaaaaggatatgttcataaaatgcttggtggagaacaagttggatatggtttatcagatatactatcaggtcaaaaggatgtgaattctgttattaaaaatagtagagaaggtggctttgattatatcgggcgagggcaagtgccaccaaacccagctgaattactaatgcatactaatttcaaaaagtttatagaatgggcatcaaaaaattatgaattggttattatagatacaccaccaattttggcagtaactgatgctgcaattattggacaatatgttggtacagtgctcctagtggctcgttatgaagaaaatacagtaaaagaaattacagttagtattagaagatttgaacagagtggagtggcagtcaaaggatgtatactgaatggagtagtgaaaaaggctagtaactattatggttatggttatcatgactatggttatacatacaagaataattga

SEQ ID NO: 245219 - DNA, 147 bp, Klebsiella pneumoniae
atgatgtccctctgggatgcgctccggatgaatatgatgatctcatatcaggaacttgttcgcaccttccctagcactataagaaagttcttaagcgcgtcgtcagtctcattcctctcatttctctcagaaaatgagaaaaattaa

SEQ ID NO: 245220 - DNA, 1005 bp, Klebsiella pneumoniae
atggaaaacattgcgcttattggtatcgatctgggtaagaactctttccatattcattgtcaggatcatcgtgggaaggccgtttaccgtaaaaaattcacccgaccaaagctaatcgaatttctggcgacatgcccggcaacaaccatcgcgatggaagcctgtggcggttctcactttatggcacgcaagctggcagagttagggcattttccaaagctgatatcaccgcaatttgtccgcccattcgttaaaagcaacaaaaatgacttcgttgatgctgaagctatctgtgaagcagcatcacgtccatctatgcgtttcgtgcagcccagaaccgaatctcagcaggcaatgcgagctctgcatcgtgtccgtgaatccctggttcaggataaggtgaaaacaactaatcagatgcatgcttttctgctggaatttggcattagcgttccccgaggagctgccgttattagccgactgagtaccattcttgaggataatagtttgcctctttacctcagccagttactgctgaaattacaacagcattatcactatcttgttgagcagattaaagatctggaatctcagttgaaacgaaagttggacgaagatgaggttggacagcgcttgctgagtattccctgcgttggaacgctgactgccagtactatttcaactgagattggcgacgggaagcagtacgccagcagccgtgactttgcggcggcaacagggctggtaccccgacagtacagcacgggaggtcggacgacattgttagggattagcaagcggggcaacaaaaagatccgaactttgttggttcagtgtgccagggtattcatacaaaaactggaacaccagtctggcaagttggccgactgggtcagggagttgttgtgtcggaaaagcaactttgtcgtcacctgtgctctggcaaacaagctggccagaatagcctgggcactgacggcgcgacagcaaacttacgaagcataa

SEQ ID NO: 245221 - DNA, 141 bp, Klebsiella pneumoniae; identical to SEQ ID NO: 36145

SEQ ID NO: 245222 - DNA, 2745 bp, Klebsiella pneumoniae; identical to SEQ ID NO: 156463

SEQ ID NO: 245223 - DNA, 165 bp, Klebsiella pneumoniae; identical to SEQ ID NO: 199685

SEQ ID NO: 245224 - DNA, 327 bp, Klebsiella pneumoniae
atgctgcacgaaacccggcagtacggcattccggcgacactgcgtgggctcgtcaataacgacatgaagaccaccactgacgcggtgctgcagctggtgaaggatggcgtgaccgacggagtgcagatcgacccgacactatatacgcagtacagcatccggagtgtgccgtctctggtggtacggtgtcaggccgggtatgacgtggtacgcggtaacattcacgtcaaacaggcgctggagaaagtggcacaaaccggtgactgcgcacaggtggcccggcagatgcttgatgcgccctcgaatgccgccgggagccagccatga

SEQ ID NO: 245225 - DNA, 276 bp, Klebsiella pneumoniae; identical to SEQ ID NO: 245152

SEQ ID NO: 245226 - DNA, 2112 bp, Klebsiella pneumoniae
atgtcgacaattaacggatctgtaaaatgggaaaatgatatcccattaatcactcgcagcgataaagtagcaggtggaaaagaaggactggtaaatattcagacggagaaacttgttaaccgaacagaatttcttcgggataaaatcgatgccaccagttcactgattaaatcaggtgatatgccctatgccagcgaggcggcagctcaaaaagcgattgatgagggaattatccccgccgatggattgttttctgttcgtagcgaaaatccgcttttatggtgtgctgaatataaaaatatttcaggggtgccggttccgacaggtaaaaatatcgcgtcctcactgttaactgcgccagcggttcgaccagattcggatgaccccaagggattgcataaggggctgagtattaccgataacggtcaggcgttttatgtgatccatgaggataaaatcagttattaccggaatgacggcggcgaagctgtggcgtttctggatattccgtcatccggacagctggataatgttagcggatatgtgacttcacgtctttataacagtgtgatgccaggtgtttcattccttttacaggacgatgaaactggcgtcattatgttcggtgacgatgagcaaacccatgttcccgctctttccctgaaatatggttcagacctggcttattcggtggattcaatcccgggcgtggctcatgttgagctggacgaaaacggaaatgttttgcgttgggtagatgattcaggtattccccacggggcggctaaagacgacagcgccggctcgacggcggtaataacgtcttcgccggttatttcaccacagttttatgatgcggaacttgtgtcagaaattggttataaccagtggattaacaacgttgcggtgaaattcgggcgggattattttttcagtggcgtacgacttgggacgactgcgccagaacgtattctggggaatctggcaatctgccgccgtcagggagagcgcggcaaatttgggtgctatgagtttggcccgcgcgcggcagtcctgggcaatacggcatcaacggacgaccacgacgcaccatcaattttgcttgatacgcgagctggcgccaaaaaacccatcatgatttttcaggccgaccattcggggtcgaccgtctggctgcgtaaatgggaatccttaacgcttgatccggcaaatttaaccgggccggaaaccgtgtcggacacgtcgaatatgacgtatgcacagtcataccgtaacccacataatcaggatgaaattctggtattcgcgcgtcgcggttcgacaaactccgcccggtgggttgtgcaccactcggcggataacggagaaacctggcggtcaaatccgtttatcggcggctatgatttgtatatgaccagctgccagagcgcagatggtgaagcggtacacatcgccattcagcagcaccctcgatcaacggatacgcgggtgctgtacatgaaagttaaatgggacagtaagtcactggttaactacgcgggtgacgtactgcttgctgatgtgaccactgacgcctacgttaacccctttggcagcgaaattcctgacgttgtttttgaagcctcgctggcgacaaatacaaaacggctttttgaggttaaagatgatggcgcatcgctgttgtttctcattgccgagtttaatgcgaaaaactattcctatcgtcggatgaaattgtcgaagttttcaggttcagagcccgtaatctacgacgttggcgattgcggatctccaatgaacgatgatgacgcgacattttacgtaccaggcgggacgattatttcagattcagatgtccttgtgtgcagctgggcgaaagtcccggctatgggcagaataacccgctataccttcgatggtgaaaactggagcggaaccattattgatgaagtgaccgacggtcgaaaaatatgccgcccacttgtttttcgtgaatattaccagagtggtggcgtgctgaaatatcaggatacaaacaccgttgtgtatttgcgtggtgtttataacgcctatcgcgactttgatttagatgcagtgctgattaacgtgtga

SEQ ID NO: 245227 - DNA, 222 bp, Klebsiella pneumoniae
atgtctgtcatctcttctgcgattttccctgaacatctccttactcagcttcagcagtctactgacgcagctgtccggaaattgaaatctttcatttatctgcatcgcaacagtagctggtatgtcaacggctcgggcaattatgccgtccgtgcgcatatctcttctgtcaaagaccagggcgttaacgtctttcttaccgttcgtacaggttgccagtaa

SEQ ID NO: 245228 - DNA, 675 bp, Klebsiella pneumoniae
atgaattcccggacaacaaaagatatttcctgcttccgttcttatctgccggatgccctgcgtttaagatttgaagataaactaaccatcagggtcatagcccagcgccttggtctcagtcattccacaatacatacgctttttcagcgatttattgcatccggtatagcgtggccattacccgactcagtctcattcgctcagcttgactctatcctttatgccaacagaaaaaatgaatccacacgccctgaaatcagcgaggaaaaatggcgaaaagagcggcgagccagctacagccgtgaatttaaaatcagtctggctaagcaggcattacaacccggcgctgttgttgcccggatcgccagagagcacgatatcaatgataacctgctgtttaaatggaaaagccagtacgaggacggcttactgagcgatgatgacatacaggaatgcctgcctgtcccggtggcactgactgatacgccagagccgatcagaccggttacaaatcccttctggcgcaacaagcctgatgagtgccctgtgggcgatcccggaaatgccccccggtgcgagctgcatcttaagtcaggtgtggtaaaactgtttgaccctctcactccggaactgtcacgggcgctaatccgcgaaatgaaaggcggtgtccgatga

SEQ ID NO: 245229 - DNA, 348 bp, Klebsiella pneumoniae
atgataatgctacctaccggcaccagaatctggatcattgctggcattacggatatgcgttgtggcttcaacggcctggcctctaaggtccagaacacgctgaaagatgatcccttctccgggcatatcttcgtcttccgtggccgcagcggcaaaatggtgaaaatattgtgggcagaccgtgacgggttatgcctgttcgccaagcgtcttgagcggggacgcttcgtctggccggtgacccgggaagggaaagtacatctgacgccggcgcagctgtccatgctgctggaaggtatcgcgtggcaacatcccaaacggacggaacggcctggtatacggatataa

SEQ ID NO: 245230 - DNA, 810 bp, Klebsiella pneumoniae
atggggcgcttacagattacctacacggggcgtaaagcgtggtttcgtccggcttcggtaacgaaggcggtgcagggtgttagttttaacgtgcgggcgggggagacggttgcgctggtgggggcgagtggttcaggtaaaaccactataggcaaattgatcgccgggatgttaaaggccagcagcgggacgctggcatttcgtggacatctggtgacgacgtcggataagaagctagtctccacctggcgtcgtgagtgccagatgattcagcaggatccgtactcctcactggatcctcgtatgtatattgcacagctcctcgaagagccgcttctgctggtggagaccatgaatcgcagcgcacggcaacagcgggtgcgtgaagtgcttgatgaagtaggtctggactctttgtttttacatcgctacccgcatcagttgtctggcggacaacgccagaggatagcgatcgcgagggcgataattcgccgtcctgcgttcattattgctgacgaacccacctcggcgctggatatgacggtgcaaaaacagattctgcaactattgaaaaggctgcaggccagttacggatttgcctgtctttttattacccatgatcttggtgccgtggagcaggttgcagaccgtattatggtcatggaacagggaacgctggtcgagagtggttggagcgacgatgtactggacaaccctaaccatccctatacacagcgtcttctgcgctgcctgccaatgctaaaaccgctggaacaggggggatatcagctacagtgccagcctgcctga

SEQ ID NO: 245231 - DNA, 861 bp, Klebsiella pneumoniae
atggatactaaagactggctaattatacgcacggtctgggagttgaaaaacatcactcacgccgcgcagcaactgcaaacttcccaacctgcgctgagctaccggctgcggcagattgagcagaaactggacgtccggttatttgatatttcaagtaaagagctgatttttaccccccagggtgaacagattgcctggtatgcacagcgtttccttaaggactggcggcagatgagggagtcgctggcgctggcggatgatcgcctgcgtggtgaaattcgcatcggagcttatagtaactacgcggcttatcgtctgccagctcttatgcgtctctatcatgacacctatcctgaggtagagctgcggctggttacgggatattcacatgagatcatggctcagttgcagcgcggggatatccatctggcacttgtgcgtgaagagtccaactggaaagagggaaagcgtattgtggatcgcaatcactactatgctattaaccgtaatcctttcagaatagaggatttgcccatgttaccgcagatccgcatttccggggtgccctcgccctatgtcggtgacactatcgaccgttggtggaatcaacgttttagcaaggccccacatatcgtgatgacggtagataaaatcgaaatttgtatggaactggttaagcatggcctgggctatgcgcttttggcaaactatttggactttcctccagacctgcattcacaggtactgctcgatgttgatggagctccactgcccaaccactcctggctactgtatcgtaataacgcactcatccccccgcgtctggcacattttatcaggctgtttgacgagggaggataa

SEQ ID NO: 245232 - DNA, 1215 bp, Klebsiella pneumoniae
atgctacccgtcaccacgcgcgccagacgcgccggaaagcgttttttattgttagataacatgttgcttgagctgggtttttcagcagtattccccctgttgtctgtccactttgtcgaacagttggggtggcaggcagtggtcgtaggcggtgcactggccgtctggcaattcattcagtctggaaccgggatcatcggtggcgccattgctgatcggctaggcgccaaacccaccatggtggttggcctgctgttgagggcgctgggcttcgccgtgatgggtatcgccaacaccggcttgctcctgatgctgggatgtgcactagcggctttagggggcatgctgttctctccctgccgctccgcactggttgtcaaactgctgcgtccggcagaacgggggcgtttctactctattctgatggtggaagacagcgcttttcgcgtgacaggtgccctgcttggcagttggctgttgatgcactacgacttcctccacgtctgtatggcaggggcactgtttttcgttctggccgctggctggaacgcatggaagttaccggcctataaactgtccagtgtacgctcgccagtactgactggtatggcactgccgctacgtgatcgccattttcgccgctatgttctgacattgaccggttactacattctcaatgtacaggtgatgctgatgctgcctatcgctatccaatccctcgcccatacgccggcggcagtcagttggatgtactcggtagaggcaatcatggcggtgacgttactttacccactggcgagctggagcgaacgccatttcctgctggaacggcgcctaaccctcggattagggatcatgactatcagcctgttgtgtgtcggtttcactcactcgctgatgccgctgtttgtactggtgtttatcttctttctcggttcacttatcgcagaacccgcgcgggaaactctcagcgcagagctctcggactatcgcgcacgaggcagctacatggggtttagccgcatgggcgcagcggtcggtggcgcaattggctatagcggcggtggctggctgcatgacctgggcagggcgcaagatactcccgccctgccatggctgattctcggagtgattggctttatcaccctgctggtcatctatctgcaattccgccgcaaccctacccatagtatcgtccgggcggaaaattcctga

SEQ ID NO: 245233 - DNA, 1050 bp, Klebsiella pneumoniae
atgaacaacatgaaactggcgcaattgcgcgaaagatttggcaatcatattgaagaaggaactatctacaatcccgacttcgccaacgcggcgaaagttcccgctgccagtcgcgctgaggggcacagcaaatggccgctcgccgatcctgccaccttcctcaactgtgcttacgacgcagaggcttacggtaacaagttcgcggatctcgacgtggcattgatcggcgtgccaatggatctgggggcaggcgatcgccccggttgtcgattcgggccacaagccgtgcgatcggtgagccgcgtcgggccctatgatcgtctgttcaacatcgcccctgccggtgaattgcgcgtcaaagacgtcggtgatgtcgcctttaccaacagccgtagtcttgaacagtgtcatgccgacatcgaagcctatttcctgcggattgctgaatcaggtgtcacaccgctgtcagtaggcggcgaccattccatgacctactctattctgcgcgctttaggcaaggatcgcccgctggctctggtgcatttcgatgcacatagcgatacttctggctcatacggcggcaccaagtacggccacggcagtccgttccgccaggcggtgctggatggagtacttaacccggaaaaatgcgtgcagatcggcattcgcggcggcggcgcgtaccacagtgagtttgctcttgaatcgggcatgaccgttatcttcatcgaagacatcattgagcgtggaatcgactacgccattgaaaaaatacacgacgtgatcggcgacagcgaagtgtacatcacctttgacatcgactcggtagaccccggctatgcccccggcaccggcaccccggaagtggggggtatgacgccgcgtgaagtatttcaggtgttgcatgccatggccggtatgaacgtgattggcggtgacgtggtagaagtggcgccgcagtacgacgccacctccaataccgcgcaaattacagctcaggtgcaatttttgcaactttgtttgatagcgctggcgaagcgacataaatag

SEQ ID NO: 245234 - DNA, 708 bp, Klebsiella pneumoniae
atggaaaaactggttatcgacaatttcagcaaaagctacggcagcaatcaggtacttcgcggagtttcgctgtgcgcccatgcaggggatgtcgtcagcctcatcggcgccagcggctcgggaaaaagcaccttgctgcgttgcatcaactttctggaacatcccgacgacggcgcattcttctttgatggtcgcttgatcccgatggtgcgcgacaacaaaggcggcatgcgtatcgccgacaacgacacgctgactcatattcgtacccggttgtgcatggtgttccagcacttcaatttgtggagccacctcaatgcactggaaaacataatgttggcaccgctcagcgtgttgaaacaaagcaaagccgaagcgagggagcgagcgcagcactatatcgataaggttggtttgccacagcacgtagcgactgcatacccggcacacatgtcgggtgggcagcaacaacgcgttgcaatcgcccgcgcgctggcgatggaaccggaagtgatgttgttcgacgagccgacttccgcacttgacccagagctggtgggagaggtgctgaaagtcatgcaggcactggcggacgaggggcgcaccatgatcgtggttacgcatgaaatgggatttgcccgccacgtttccagccaggtgttatttctgcatcagggtcttattgaagaacaaggcactcccggctag

SEQ ID NO: 245235 - DNA, 714 bp, Klebsiella pneumoniae
atgaaagagatcctgcaagagtatggaatggcctatctgtggtatgacggctaccagttttccggcctgctggtcactctctggctgctgatactgtcgctgtcgatcggatttgttctctccctgccactggcggtggcacgcgcgtccacggtgcgctggttgtcacgcacggtatggtgcttcacctacgtgatgcgtggcacaccgctgtatatccagttgctgattatctacaccggtgtgtacagcctggattttgtccgtgaactaccgccgctgaatgacttcttccgtaacggccttaattgcgcggtgcttacgctcggcctgaacaccaccgcgttcaccaccgaagtgttcgctggagctattaagggaataaattacggtgaagtcgaggctgcacgcgcctacggtctgagcggctatacgctgtaccgaaaggttattcttcccgctgctctgcgccgggcgctgccgctctacagcaatgaagtaatcctcatgctgcacgctacctccatcgcctttaccgcgacagtatcggacttgctcaaagttgcaggagatgtcaacgccgccacctatcagtccttccaggcttacggcatcgctgccgtgatttatctggccaccacctgcatttttatcgccctgttccgacagagtgaaaaacgctggctggcttttacccggccacgcggccagtaa

SEQ ID NO: 245236 - DNA, 693 bp, Klebsiella pneumoniae
atgtttattccacagggatacgcccatatgctgctcgacggcatcctgattacagtgcggctgtcgcttggggcactggtggtatcgatgctacttggtctacttatggcattggccaggatctccgcaagccggacactgaacgctatcgccaccctctataccactgtcattcgtggtattcccgatctggcgctgatgttgttggtatattacagcttacaaatcgggcttaaccaggtgactgattctctgggctggcagcagctcgacatcgatccgttcagcgcaggggtgctcacattgggcgtgatttatggtgcctacttcactgaaaccttccgtggcgccttcatcgcggtaccctgcggacaattagaggcaggtcgcgcattcggccttagcggttggcaatgcttctacctccttatgttcccgcagatgatgcgcttcgccctgcctggcctcagcaataactggttgatactggtaaaagctactgctctggtgtcgctcattggcctgtcggacgtcaccaaagcggcgcagaacgccggaaaaggctcaggccagttgttcttctatcttgtactggcagcgctgttctacctcctggtgaccaccgtttccagcctggtactgtggtggctgagcaagcgctacaacgctggcgtgcgcgaggcagaactatga

SEQ ID NO: 245237 - DNA, 801 bp, Klebsiella pneumoniae
atgaatgcattgctacacaaaaaaatcgctatacggttattgatactattattttccacgtcacctttattatctcatgcaacctcaagcgatacgctgagatttggtactgcattgggttacgcgccgttcgaatatcgtggcagcgacggaaaaatgaccggttttgaaatcgatttaggcaatgcaatttgtacccaactgaaaaaacagtgcaaatgggttgaaactgaaatttccaccatggtaccagcgttaaaagcccgcaaatacgacgctattcttgcctccatcggcgttaccgaagcgcgcaaaaaactactgttatttaccgataaagtccatggcggtggaacccgcctgattgcaaaagaaaacagtgggttatctccagatggagcacaactgcgaggtaaacgtatcggtgtggaacagggttcaagtgtggaaaacttcgccaggcagcgctgggctccccaaggggttgccgtcgtctcctacggcaaccaggatctggtctacaacgatctaatcgccgggcgcctggatggcatgctgaccagcgaagtgcaaggccaactcgggttccttgacactgataaaggcaaaggctttgccttctccggtcaaagaattcaggacccactgatcggtaccggcgtcagcgccatcgcggtagacaaaagtaatactcaactggcaagtgaactcaacagtgctatcgccgccctgcgcgccaacggtacctaccagaaaatcgcttccaaatacttccccccctcaatcgacatctatcagtaa

SEQ ID NO: 245238 - DNA, 1395 bp, Klebsiella pneumoniae
atggtattcgacccctcgactgctgagccttttgcatgcgtatctacggcttctgcggaagatattgatgacgcagtatctgctgctcgtgctgcgtttcctggatggagtaatacctcatcgcaggatcgcgccaaactactcaggggctttgctcagcagatggaatgccgccgcgcagagttactggagctgcagagccgcaataatggaaaacctcggcatgaggccgaagtcgacctaaatgatgcaatagccacatttttgtattacgcagaccaggctgatcgactcgatgccctgcagggaagcaacgtcgaattaccttccccaggatattctgcccgtttgcgtcatgatccattaggggttgttgcactgatcgttccctggaactttccattagtgaccagcgcatggaaaattgcaccagccctggctgcgggttgtactgttgtcctgaaagcctctgaaatcaccccacttgcagagcttgaatatgggttgattgcagatgctctgggtctacctcccggcgtattaaatattctgagcggtgagagtgaaagtgggcgtatattgagtcagcatcccaatatagacaagctttcctttacggggagtaccgcggttggaagtatggtcatgatggccgcggcgaaacggtgtctaccgataacgctggagctgggaggaaaatcccccatcattgtatttgacgactgtgatttggaccgggcggttgaatgggtcatgtctggcattacctggaatgcgggacaaatgtgctccgccacatctcgcctgttggttcaggagaatattgcggaagcgctttactcccggttagccactgccatgcaggaaataaggattggtgctccccgagagccgggagtcactatggggccgctgacgagtgaagcccaatggcaaaaagttcagtcgtactttgccgtagctcgtgatgaacagctctcatgtccggcaggagggcagtcgctatcttctgtagggtggtttgttaccccgaccttatatactgacgtaccgttatccagcaggctttggcaggaagagatatttggaccggtactgtgcggtcaccgctttacagatgaggccgaagctattcggctggccaataattccgattttggattagttgcgacaattgtcactgcagatagcatgcgcgcccagcgagttgctaacgctctggcggtcggccatgtctggattaattctgtacagactgtgtttgttgaaacatcctggggtggaattaagggaagcggtattggtcgggagcttggaccatggggactggcctcgtaccaatccgttaagcatgttgttgaggcggtaaacacagcgttgacggttaatctataa

SEQ ID NO: 245239 - DNA, 1479 bp, Klebsiella pneumoniae
atgacgctgtcaaaaagcaagattgaaactttcgggattgagcaaattccggatgagggtcgtgatgctacaccactggatctattccgtctgacttttggtggggccaatacttttgccaccgctgtgctggggagtttcccggtgctttttggtctttctttccaggcgggtttactggctattcttttcggggttgttatcggagggataatactggcgccaatggggctttttggagccattaatggaaccaataattcagtctcatctggtgcgcattttggcgttcatggaaggattgtcggctcatttttatcgttgctcaccgcagtcgcttttttctctctttccgtgtggagttcgggtgatgcgcttattggcggaacgcaccatttattcggactttcggaaaatgatggtgttttaggtattgcttacggccttttcgctgttctggttttggttgtctgcatctatggctttcgtttcatgctgtggataaataaaatcgctgtttttgcatccagtaccatgtttctgctggggatttttgccttttacggcgtatttgacccggattatcgcggaagtttacaactgggacagacgggcttctggggagcctttgttggctcaacgctgttgaccatgagcaacccgatctcctttggcgctttcctcggagactggtcgcgttatattccaaaagaaacctcacgctttcgtatcatgtgggctgtatttgccgctcaagtggcgacgctagtaccgtttatctttggcttatgcaccgcaacaatcgtcgcggcccatgcatctcaatacatcgccagcaacaactacgtggggggattgttggcggtaacaccgggctggttctttctcccggtatgcgtaattgccatcgtcggcggtttatctacgggaaccacggccctttacggtactggcctggatatgtccagtatatttcctcgcctgcttagtcgcgtacaggcaacgctcctgattggaattatcgcgattgcttttatctttatcgggcgttttgctttcaacctagtgcaaagtgtatcgacttttgccgtactaattgtgacatgcacatcgccgtggatggtcattatgattattggaatgattgcatgtcaaggagcctaccacagtgatgatctccacgtgttttcccgcggtcagcgaggagggcgatactggtttcaccatggctggaactggcgggggctgggtgcctggatccccagcgcaatagtgggcctctgcctggttaacattcctggacagtttgttggcccactaggagagctggcaggtggtattgatgtcagccttccggtgaccctggggttggcagccctgctctacctcgtgttgttgcgtatattccctgagcaatctgttttgactgactcatcttctaagatatacacggcaaaaacacaaggcggtgttcaatga

SEQ ID NO: 245240 - DNA, 384 bp, Klebsiella pneumoniae
atgaatgatgtagcccaggtacagttagctgcgcatcggttagtagatgctttttctcgcaatgatacatcggcttattttgcatcatttacggcagatgccacctttgttttttacaaccaggaacaaccattactctcccgccatgcctggtttacacaatggacagactggcagaaagaaggatttgacatcgttgagtgcgtttcaagccatgcccacgtgcagatcgagggcgatatggccgtattttttcatgatgttgacacgcttgttcagagtggcggtcaacagcgccgactcgcggaacgggaaaccattatttttcgccgaacccagcaaggctggttagcctgccatgagcatttatccgcacgcctctga

SEQ ID NO: 245241 - DNA, 123 bp, Klebsiella pneumoniae
atggcaaatcagatttacccggcatggggaatgtggctgaaggatagggaaagtgtgctgcaatgggtcaacctgcactccaattgggcggcattgatttccggggagtcaaatcatgaatga

SEQ ID NO: 245242 - DNA, 297 bp, Klebsiella pneumoniae
gtgagaactgttaagctgacgccaaaggccggggacgatctggaggctatctggcattatggctggcagcattttggcgaagcgcaggccgataaatatattgaacatttgtcagcgatttttgagctcctgggcgataaccacattgggacccaccgcccggaactgggtgaggatatctatgcactcccttttgagcggcatgtgatttatttcctgcagacagaaacgactgttattgtcattcgtattctgagccagcatcaggatgccgggaggcacctgcactggcagtga

SEQ ID NO: 245243 - DNA, 267 bp, Klebsiella pneumoniae
atggcacgaactatgactgtcgatctcggcgacgagctgcgggagtttatcgaatccctgatcgcatctggtgattaccgcacgcagagtgaagtgatccgtgaatcccttcgcctcctgcgggagaagcaggcagagtcccgtctgcagacgttacgtgacctgctggcggaagggctgagcagcggtgagccgcaggtatgggaaaaggatgctttcctacagaaagttaaatacggcataaggaaacccggtgagaactgttaa

SEQ ID NO: 245244 - DNA, 261 bp, Klebsiella pneumoniae
atggagcaggaaatgaatttttcactcagctatgagcaactgacccagatagcggaagaacgtatccgtgaatgcgagctggacagccacggcgctaaatacatcagcgaatcgggtaaggccaccgccattctgggattcaggtatgaactggccatcaatggtgcgccactgaacaattacgaacaaaccaaagcgatcattgacgccgatcagcagcgcctcagaaaactcatctgcccggagacggataagcaatga

SEQ ID NO: 245245 - DNA, 450 bp, Klebsiella pneumoniae
atgactctgagtcgcaaaccgtcgccgctgcagcggtgggtgctggagcagggcggggacgccccggtgtacgggccgaacctgcgcgcctcctgccggcgcatggaagctgcgggctggctgcgcaccctgagcgccccgtttctcgctgacgaacaggcgcgcgttctggcggagcagtgcgcgaaggcaatccgggttctgcctcgggtcccgcctatccaagcagatgaggctgacgaccggccggtggagctggatggtcgatggcacctggcgttgcggggtgactacgtgatccgtcttgacggcaccacctgcctgcagctgtggaatgcggccgggcaggtgacacgcagaccgcgatggccgatctgctggcccgagcagggtttaccgccggccaggtccaggagctacagtggcaccgcatccgctggccacaaatga

SEQ ID NO: 245246 - DNA, 249 bp, Klebsiella pneumoniae
atgaaagtcactgaaacccgactggacacccttatcgataatctgaacaacctgatttgtgaagatgatctgctcacccgccatgagcgtaaaaccctggtgcgggccgtggcggccatcggcgccatgaaagcacgcgtcagcatgaaaaagcccacggtacctagatacggtattcctcatccatgttcgacggtaaatcttctggtgcaaagaaagcgagttcctgaccttcacccgggtcattga

SEQ ID NO: 245247 - DNA, 420 bp, Klebsiella pneumoniae
atgaattatgtacaacagatgcgaagtctgattggtcatcgcctgcttttactggccggatcaaatgtcattattaccgatgcctgtcatcagattcttctgcaactacgcagggacggcacctgggggcttcctggagggcttctggagccgggagagtcactggaacagaccgcggtacgcgaagtcaaggaagaaaccaatctggatgtccgtaatctgcttctgcttggtattttctcgggaccggaatacacctttaaactccctaataaggatgaaatcaatgtgatcacatccctttactgggccagtgactggtctggagtgatggtcaatgacccgggtgaaggtcaggaactcgctttctttgcaccagaagatttaccgtcgaacatggatgaggaataccgtatctag

SEQ ID NO: 245248 - DNA, 840 bp, Klebsiella pneumoniae
atgcagccgctggggccgaatatcgccgataaaggctccgcgttttaccatttcagcgtcaatccgttcgactccgccgatggcacccgccattatcgggtatggacggccgtgccgaataaagccgcaccggcatcgggctacccgattttatatatgctcgacggcaacgcagttatggaccgcctgaatgacgaactgctcaaacagctggcagaaaaatcaccgccggtgatcgtggctgtcgggtatcagactaacctccccttcgatctcaacggcagggcctacgactatacgccggcagcagaaagcggcaaaactgatacccgcaacgggcgttttagccgtaagagtagtggcagcaacgacttccgccagttactggaaacgcgcattgcgccaaaagtggaacagggattgaatatcgatcggcagcgccgcggcctgtgggggcactcctacggcaacctgttcgtgctggattcctggcggtcctcttcctacttccggacgtactacagcgccagcccgtcgttgggcagaggcaaagatgctctgctgagccgcatcacggcggttgagccgtcgcaatactgtgccaagcgcctggcgataatggaaggttcggcgacgccgggcgataaccgggaaacgcatgctgccggggtgctgacgaaaattcatgccaccctcgccacgctggaagataaaggtgtcaatgccgccttttgggatttcccgaacctgggacacgggccgatgttcaacgcctccttccgcggagcgctgttagatatcagtggtgaaaacgcaggtaacacagcaggtcgtcattaa

SEQ ID NO: 245249 - DNA, 1230 bp, Klebsiella pneumoniae
atgctgaacatgcaacaacatccctctgctatcgccaggctgcgcagccagctggcatcaggctacattactaacctttctgacttctggcgcgacgctgagtcgctgaatgtaccgctggtgacgccagtcgaaggggcgaaagacgagcgtgaagtgacctttctgtggcgcgcccggcaccctctgcagggcgtttatctgcgtctgaatcgggtgacggataaagagcacgtggcaaaagggatgatgaccgcccttcctgcgacggatatctggactctgacgctgcgtttacccgcaagctactgcggctcctattcgctggtggaaatcccccccggcaccccggccgagacgattgcacagtccggaggccgctttgccaccctcgccgggcacgccgatccgctaaacaaaacgccggggatcaacgttcggggaagcgcacaggaatcggtgctggcgcttgataaagcccccgcccagtccgaatggcgcggcggctccccttccgggcaattgcttacctccgcacgcattatcgccgggcaatcgcgccgggttcggctctatctgccggacgttgatgtttcgcagcccctcggcctggtggtactgcccgatggtgaaacctggttcgatcaccttggcgtatgcgcggcaattgacgccgccataaataacggacgcatcgtgcccgtggctgtactgggcatcgacaacatcaatgaacacgagcgcactgcgatactcggcgggcgcagcgagctgataaaggaaatcgccgggcatctgctgccgacgattcgcgccgaacaaccgcagcggcagtgggcagaccgttcgcgcaccgtgctggccgggcagagcctcggcggggtcagctcgctaatggccgctcgtcacgcaccggaaacgttcggcctggcgctcagccactccccttcaatgtggtggacgccagaaggtgccagccggccaaacttgttcagcgaaaccgatacgtcatgggtaagcgagtatctgctttctgctccgccgcagggcgtgcgcatccgcctgtgcgtgggatcgctggaaggttcgacggtgccgctcgttcagcagcttcatcagcggctgcttaccgctggcgtcgacagccattgcgcaatttataccggtggtcacgattacgcatggtggcgcggcgcattgattgacgggcttggtttactgcagggttga

SEQ ID NO: 245250 - DNA, 216 bp, Klebsiella pneumoniae
gtgattcacacgcagctacggaacacgttctggctgcgttccgtgctttgttggcaaacctggctcgaatacgaaaaacactgtattcgctacctgcgtctcggccacgacggtgataatgattacctccagcgccatattcctcagctgaatggtctgatcaacagtaagacctcaaaaagtttttgttgtgatatcccggcagttgggggctga

SEQ ID NO: 245251 - DNA, 135 bp, Klebsiella pneumoniae
atgctcaccatggatttaaggcatcgcaaactcatgagcggactctgtttcttaagcttccttgactggttactggagtgggaaagtagctggtttctccataacatattgattattatattttttgtgtcataa

SEQ ID NO: 245252 - DNA, 258 bp, Klebsiella pneumoniae
atgctcatcatcggtaaacaacccggcgcgttcaacaaaggcattcagcgcctgtattcccttatcaaattcttcacgctgagtgagccactgccccaaaacctctttaacacagtgctggcacaaatccagccgcaaccggccgccatcgccaaaaacggagccataaccagctctgtggtcaatagtcaggaactcctgaaattccagatcatccttttctgcccggcgacggcatcgatcgcaagtttttgctga

SEQ ID NO: 245253 - DNA, 414 bp, Klebsiella pneumoniae
atgagaagtgagtacatcaccatccatgaattttataaattactcagagaatcctatatcagccgtttccctcaaagatttccaattaattttgatatgactgcgaattacaaaacaatgctcataggatatttcaacaatcgattcagagatgcaaaaataaataacaacaatggaagatatgaattaattggtgacattatagacgtgtacaaaaaaaacaatccaccggaaggctcccttgcctatctgatttctaaattatcggataaagaagagcttagtaagttcattaacaatgcaactaaagatttagaagatttggataactggctatctagagaaggttttgtaaaagaaggtgttgcatcagaaaagttacttaaacaaaaagaaattgaaatattactataa

SEQ ID NO: 245254 - DNA, 345 bp, Klebsiella pneumoniae
atggctattgaccttaaactctataagaaaatacattatcaaataatgtgtgatatttctcgtgtctggtattaccgaaagttagtgaatgcaagtctcttgcacgaagaaggttcatctataaatgaaatagcagaaatatttaatgtgaaagtatcaactgcaaaaaagtatatagaaaaacatgatgagctaatggaatcagatgattcagaaactcaatataaattatacattgcgttagcaaccccaaacaaagaatatgatcatgagacatttgacgaaataatgaaatatgtatatacgttcaaaatacatgaggaagactggttttttaaattttga

SEQ ID NO: 245255 - DNA, 276 bp, Klebsiella pneumoniae
atgtaccgccagcatccgaaatcagatatcccggagcgctcctgctgctacacccgccgggtcacaaaccaggccacttttggttatttttgcgatacctatgtgctcaaacagattcatttatgcctccgcaagtatgataccagctctgacgtaacggtatctgttacgccagagacgagccagagtaggctgagtgggcgcaataatgtcctgctgtcacgagtaaaagctccctcggtgcagatactgatctccttccccgtcaattggtga

SEQ ID NO: 245256 - DNA, 591 bp, Klebsiella pneumoniae
atgccttacctgttactaacaccaccggccctgatttggcgaaggaatgatgtcttcagccagcttcttgttcagggtgcggatccggttcttatgacagaagcgagttgggcttcaaatgtggtaatgttgtctcaacggcatatctgcaatgttaagtcgccgttgccccaccaacttctgatttcctcgctaaaggtacaggcccactctgttgattcacagccgatttttgctccaggcaaaacaatttatatagctgctatctccctcatagttctcattatcaatcatctgatctcccttatgcggctatcgctgcgttacaaccgggaaatgcactcctgtactacgcgtgaattgctacacctctctcatcgcaacctgagtcggggcacattgctaaaccgatttagctttcaagagatatcgataatgaaatcggcaatggttctggcagtgtattgctctcttttgcggaatattctgcttaccggttcgcaacgctgtcatttactgagctggctttttattttaaatggaatcggtgcttgttcattcgcaaaaactcagcggcctgttgataaataa

SEQ ID NO: 245257 - DNA, 1140 bp, Klebsiella pneumoniae
atgtacaggatatacttatatcttattctcgccgcatcggtttccgcactggcgacagatatgatcgttccagcgctgcccttgttacaaaaagcgtttaatactgattattcagctatacagttaaccattagtggttttctggtgatatacgcggccagtcagttactgtcaggatttctcggtgaaaagctgggtaaattacgaatactgacggccagctttttgctcttcctggcgggaagtctcctctgctttatgtccgacagcttagagatgttgttagccggcagggcattacaggctctgggtgccggcgccgggccggttctgtccaaagccatcgccaaagagacgttttccccgttaacactcaagcgcgcgctttccgatatttcttccgccagtgcagttgttcctctcattgcgcccctggctggcgccgcaatcctcggctatctgagctggaacacgatattccttgtcatggccctgtttagcgtcgtcacccttttgctctctccgcgtcgcctcgtgtatcatgacgtggccacagtatcctcttcttccggttttatcacccctgcatttattcagggaacgctgctggtttcgctgatcctgagttcgctgttttgctatatctcactgtcgccggccatctttatgcagcagcttgggctaagcaccatacactactcgctgctgttctctgcatccgtattattttttattattggtaatcagttcgcaaaattcgagcgaataattaatccgtggtttttgttttgtattaatgcactgtcggtctttccctttattatcggtagtcactcgctgatattgtgcatcgccggatcgatgattttcaacctcacccttggcgcctattacccgagcgcgaacttcatcgccctgcaaatcaaagggaaaaaaacaggtattgcggcgtccgtcaccggatttattcaaacagtgagtgccggtgccatcagctatttcgccgtaaaactgacggataccggtatgggctttgacagaaccctcggcatgagcacgttaacactggcaattttatctcttctggtagtcactacaatgaaggtaacacaatggaaaactggcaaaaaaggaaaatag

SEQ ID NO: 245258 - DNA, 1230 bp, Klebsiella pneumoniae
atggaaaactggcaaaaaaggaaaatagacaggtcattaaaatatcagaccagggtattttcagaacacattaacgaactggtcgcagtaaaaagagaaggtaaggtcattaccctcgacgatggcagaaaaatggtggaatttgtctcttgctcttaccttgggctggagacccacccggcgctgaaaaaagcagttgtcgatgccattgaacgttttggtgtgcaggtttctgtcgccagaacgcgggttaaagtcgatctctttccgcagctggaagcgcgtctgaacgacatcatgcacggggctcataccctcacgttcaacgcagtgactccttgccacatcgcggtgctgccgctgctggcatccgggacgctgccgcattttacgttcagtaaaaaaccgtactttattatggagaagaccgcgcacgcgacgttgcagatcaaccgcggactcttacagcagtttggcgaagtcgtcagaattgatttccaggacaaggcccggattgaagaggcttttcgctatgcggccagccagggattgacaccgatctcggtatcagacagcgtaggctcaatgggtggtgtcgcccctgttgcacatatcgtccgcctggcgcatcagtatgacggcttcgcctatattgacgatgcacacggcacctctatctacggagattacggttcgggatatgtcatgtcatgcctcaaccatcagcttgacgagcgtattattatcgccgggtcgctgtccaaagcttttggctcacacggcggatttatcgcctgtcgggaagctgagaccatcaactttatcaaaacctacggtacaacctacgcctttggtggacctccgtcattaccggggattgccgcctgcgtcgccgcagccgatctccacctggacggcaccgtcacagcccgtcaggagaagctacagaacgtcattcgttattttgacaaagtgttcggcgggaccgagatagttaaccggggcacaacaatgccgattcgggggatcctgataggtaacgaagacctcgccattacgatgtgcaaaaaactgcacgatcgcggcttcgccacgacagtggcgatgtatccaaccgttgaggaaggacacgccattctgcgttgcgcattgtctgcgcttcatgagagcggccaaatcgacgacttccataaaaacttcagtgaatcactggctgaagccacaaaataa

SEQ ID NO: 245259 - DNA, 879 bp, Klebsiella pneumoniae
atggtggcgaccattatcggtggaggcatgttcgcgttgccggttgctttcgtcaacgtgtggtttataaagggccttctggtcctgtcggtaacaggcatattgatgctgattacagggttgatcctcgtcgacattacgatgcgctttcctcctggcgccagttatcataccttcacccatgccctgctcggacccgctgccagcgtaatcatcggcgtggctttctgtttcgtactttatttactgacctacgcgtacatatcaggcgcagcatcgatagtgtgggatctccttcctcccgatattgctggccgcagctggctgccgatcattttgctgtcgctgacgacctcgctgattctgtgggccggcggcaaattgcccggttttctcctctccggccttatcgccgccaaattcaccctttttctcctgctgttcgccggtgccgcaggaggcgtaaaagcactcagattactcgacttcgccggcagcacgccgctccagtattaccttccgatcgtaccggtctgcgttatcgcttttggatttcatggcagcgtcccctctctgacaagaatgtaccggggggataatcatcgtgcggtcctccgctctctctattacggtttcgccgtttcattaactgtctacgccttctggctgacgctcacgatgggcgcgctcacgcctcaggctatccggcatgtcagcgatgaaggcgggaatatgggcgcctttatcacggccctcaatatccacaggaccgcctcagctaccagtctgatactggtcgcctttgggtgtttcgcattaacccaaactatgtggagatcaacgccgaacgtgaagaagcccgcgaagattcagtgctga

SEQ ID NO: 245260 - DNA, 339 bp, Klebsiella pneumoniae
gtggagatcaacgccgaacgtgaagaagcccgcgaagattcagtgctgaattattataaaaaaatgattcagctgcgccatcatatcccggctctggtatatggcgcctatcaggaccttaatccacaggacaataccgtttatgcctatacgcgaacgctgggtaacgagcgttatctggtcgtggtgaactttaaggagtacccggttcgctatactctcccggctaatgatgcgctcggagaagtggtcattgaaactcagcaccaggcgaccgcgccacagggtacatccctgtcattgagcccctggcaggcaggtgtatataaactgcagtaa

SEQ ID NO: 245261 - DNA, 267 bp, Klebsiella pneumoniae
atggccagcacagagaagatatttaccctttcctatgacgaactgcttgagcacaccaaaaaagtggtcaccgatttcaggcatctcagcacgccgccggacatcctggatatctggagcaacaatggagtcatcgtgctctggcattcacttgtcgaggctatgggggtacccgggaaggactatctcagtgacttaagacaactcaaaagtctgggcggtctgaacttctgcgatcaggactcaactcacgacacagactgttga

SEQ ID NO: 245262 - DNA, 1020 bp, Klebsiella pneumoniae
atgaaaaccgtatcagctgtcctgacttctgctcttttcgcatccgccaccgcagtggcttccgaacaacctgtcaaccttcctgctcctacggccggagtgcaggcatttctcaacgtgctgaactccggtaacggcaaacccattgaacagctgaccccgcaggaggcccgtcagatactgatcggggcacagaagggtgttaagctgccatctgcgcaggtttcagaaaaaaacatcacagtgaacgggcaatccataaagctgaaaatcgttaaaccggacaatgctaccggcacacttcctgttttcatgttcttccatggggggggctgggtgctgggtgatttcccgactcatgaacgccttatccgggatctggttcgctcatccggcgctgcagctgtatatgtggactacactccgtcaccggaggctcacttccctgtcgccattcaccaggcgtatgaggcaaccaggtgggtggctgaacacggtcaggaaattggtgtggatggcagccgtcttggcctggtcggtaacagcgtcggcgggaatatggtggcttctgtggcgctgcaggccaaacagtttaacggaccgaaaattcgttataacgtgatgctgtggccggtaaccgacgcgaactttaacagtgcatcctataaccagtacgaaaatggctatttcctgacgaaaaacatgatgaaatggttctgggataactacaccacaagcgcgtcagaccgtaataatattcttgcctcgccattgcgtgccaccgcggaacaactgaaagggttcccgcagaccttaatccagacggcggaacttgatgtgctgcgcgatgaaggtgaagcgttcggtcgcaagctggatgcagctggcgtaccagtgaccgtgacacgctataacggtatgatccatgactatgggttgctgaacccgttaagtcaggaacccaccgtcaaaactgcgctggagcaggcgggtgcggaacttcacaaacacttgaattag

SEQ ID NO: 245263 - DNA, 579 bp, Klebsiella pneumoniae
atgcgaccaggcccgggtacgtctcactggcgtacacgcaacggctacaggaagcagagttactggcatcaacggacagcgcagtcgactcatacgacaacgcaatggcagagactgtacaaagcggaggtgatacaccgacagagccggaaaacccggcaggaagtggcgctggcgacgtttgcgtgggtggactggtacaacaaccgccggttgctcgagcgactcggtctcctcccaccggctgaagcagaaaaagcgtattacgcttccctcggggaaaaggatctggcagccttagtcccggacttaaatctctcccatgaatccggtacggttcagaagtgctccattaaaggccttcagttccagataccgaaacagttcccccagatgctcgtgccgggttgtatcacggccggaattatatcgcgtcccttaaagctctcgtcgacgcaaaataccggttattccgcacatgcacattcatcaccttccacaaccgttctgtcggcttcaggttcgggctgtacggtggtagataacagaggtgagtttaccgccgctgagataatctga

SEQ ID NO: 245264 - DNA, 540 bp, Klebsiella pneumoniae
atgcttacagccgaacgaaaccgattacatccctcgcatcctctgagccatgcaagcattagatcaattatttcggccatgaagggcgagttggtgcgtattgaaggtgaaatggcgattcacatcaagaagcatttcagtgaattatccgagcttctgaacgcagttaaaggcgttggaactgcgacagtcgccccgtgctactggcagaagttccggaacttggctcactgtcacgacgagaaattagcgcccttattgggggggggggctccagtaaacagggattccggtacgatgcgtggtcgccgaacagtattcggagggcgagcttcagtccgtacagcgctctatatgtcagccctggttgggacaaggcacaacccgataattaaagagttctatacacgcctggttgccgcaggaaaacccaaaaaagttgcactgacggcctgcataagaaaattgttgaccatactgaacccaatgctgaaaaagaatgaagcatgggatccaatgtatcaccaacatgcttcgtaa

SEQ ID NO: 245265 - DNA, 207 bp, Klebsiella pneumoniae
atgggcacacctcgttttttccccctgaatttaaggaagaagctttccgccaaatcaccgagcggggctattccatcgcttaagtatctgaacgacccggcgtttcggcgcacagtctttataaatggctccgcgctgttaagcctgacaacaatgggcaacaggcacaggacttactggatgccagaacagaaattctcaggctga

SEQ ID NO: 245266 - DNA, 2220 bp, Klebsiella pneumoniae
atgcatttcaaagagatagcagggatttactccatcgccgtaccgggggcgtcaggaattaccaggacgttttgttattcattgctgacgctatgtattgccaatgccgtcagtatccagagcgctgtcgcggcagagagttccgctgcagccagtgacaccttcaaagaggagtcgctggtagtcaccgctgataccggcggtgacagtacatccaattccgcacaatcttataccgttccggcaacgcgcgccggaaccaaactgaatctgacccaacgtgatattccgcagtcggtcagcgtgcttacgcagcagcgcatcagggatcagaaccttcaaaacgtgggggatgcgctgacgaacgttacaggcatttcggcctcacagaatgattccgagcgcgtggacttctattcacgtggtttctacatcaacaactacacctatgatgacatcccttcaacgcaaaccggcgcgtggaactttggtgaaaccgacggtgactccgcaatctatgagcgcattgatgtcgtccgtggttccacgggattaatgaccggtacaggtaatccgggtgccgccataaatatgatccgcaagaaggctgacagcaaaatgtttgccggcaatctctctgccagctacggcagttgggacaatcagcgctatgttgccgacctgtccggaccgctaaatgactccggaacgctacgcggccgcgtgattacgggatatcaggatcaggacagctgggttgaccgttaccataaacgtaagaagttcctgtatgccaccgtggcggcagacctcaccgataacaccacgctggatctggggtacgactatcagtcgcgtaacaccgacggtcctacctggggcggcctgcctacctggtacagcaatgggagcaaaatccagtacgatcagggcgataatccttctgcggactggacccattacaacattctttcccgtaaggtcttcgcgaacctgacaacgaatttcgataacggctggcaggcgcgggttaacggtacgcatactgagtccgactttgacagtaagctactttatgtaacggggtatccggaccagtccactggcatactgaacagcagcggctacggatatgcaggatggtacaaggggcttcgcacccagacggcggtggatgcttatgcaaccgggccgtttgagatgtttggtcgtcagcaccagttggttgcgggtgtggattacagccgccagcgcaaccgctacctgtattcaacttccattctctcccctgcggaaataggcaactggaataactggaacggcgatgttacggagcctgactggccggcgtgggcgctctcctctgaggataccatccggcagaaagcgggctacgccgcggcacgattctcgctgatcgacccgctgtctctgatcttaggtgcacgctacacccagtacagcgcacacggtacgtcggcggatatggagaagaacaacattaccccttacggcggtctggtttatgacatcaacgaaaactattccgcttttgccagttacacctctatcttccagccgcagacttatcgtgaccagcagggaaattacctgaagccggttaccggtaaggattatgaggcgggtattaaaggcgactgggatgacaatcgtatcacggcgagcctgtcagtattccgtattgagcaggataacctgggccagattcagagcgacatttatgtaaataacagcagcgaaaacgcatataaggcatccaaaggcgttgtcagccgtggcgtggactttgaaattaacggtgcggtcactgacaacctgaagttaacatttggggccacacgttatgttgcaaaggacgcggatggcgctcgcaccaacccttatatgccgcaaacaagcctgaaactgttcaccagctacaatctgccaatgctacctgaactgaccataggcggaggcgttaactggcagaatcgcacctataaggaagcgaccaatccttcaggtgtaaccgaacgtgtttatcagggaagctatccgttggcgaacctttttgcgcgctatcaggtcactcgggaactgtccgtacagggtaacatcaagaacctgtttgatcgtgaatacaacaccaacccgtcgggcggtgtggcattcaacgagccaagaaactattcagtgagcgttaattacagcttctga

SEQ ID NO: 245267 - DNA, 1575 bp, Klebsiella pneumoniae
atggacaccccgtaccctgatgaaaacgcccggctcagagcgcagctgcaggagcagcagaccaccattcgtaaaatggcggagtataaccgtatgctctcgcagcgggtggcggcgtacgctggcgaaattaaccgcctgaaagcgctggttgccaaactgcagcgcatgcagtttggcaaaagctctgaaaagctgcgtgagaaaacggcgtgccaggtgcgtgaagctgaggagcgcatcggcgccctgcaggaggagatggcagaggtgctgggtgagcagcatgacccggcactgccgcagccgcttcgccagtcttccgcccgcaaaccgctgccggccttgcttcctcgcgaaacccgcattctgccgccggcggaaataacctgtccggcgtgcggtggggacctcagcccgctgggctgcgacgtgtcggagcagctggagctcatcagcagcgcctttaaggtcatcgaaacgcagcggccaaagctggcctgctgtcggtgcgaccacatcgttcaatcccccatgccgtcaaagcccatcgagcgcagctacgcgggtcccggcctgctggcccgaatcgtcacggcgaagttcgcagaacacacaccgcactaccggcagtcagaaatctaccgtcgtcagggcgtggagctgagccgggccacgctgggccgctggtccggctcagtgagcgaactgctggagccgctgtacgacctgctgaaacagtacgtgttgatgccgggcaaagtgcacaccgacgatatcccggtaccggttcaggagccgggcagcggcaaaacgcgcactgcccggctgtgggtctacgtgcgggatgaccgcaacgcggggtcacagcttccgccggcggtgtggttcgcgtactccccggaccgtaaaggaatgcatccgcagcaacaccttgccgggtatagcggtatcctgcaggcgaatgcttacggtggttataacgcgctgtacgaggatggtcgcatcaccgaagcggcctgcatggcgcatgcacggcgaaaaattcacgacgtgcacgtccgtacaccaacggatatcaccaccgaagcgctgaagcgcatcagtgagctgtatgccattgaggcagaaatacgcggcagccctgcagatgaacggctggcggcccggaaagcgcagactgttccgctgatgcagtcgctgtacgactggatacaggcgcagatgaaggtgctgtcgcgccactcggatacggcgaaggcgttcgcgtatctgcttaagcagtgggatgcgctgaacctgtactgccgcaacggctgggcagaaatcgataacaatattgcggaaaacgcgctgcgtggcgttgccctgggccggaagaactggctgttcgccggttcggatgcaggaggcgaacgaaccgccgttttgtactcgcttattggcacctgtcagctgaacggcgtggacccggaagtatggttgcgttatgtcctgggtcatatccaggaatggccagtgaaccggttgcacggcctgctgccgtggaaaaccgatctcacatctgttgtatga

SEQ ID NO: 245268 - DNA, 348 bp, Klebsiella pneumoniae
atgattaactttccggctggctcacgtatctggctggtcgctggcgtgacagatatgcgctgcagcttcaacgggctggcggcgaaggtacagaacacgctgcgaacggaccccttcagcgggcacctgtttatctttcgcgggcggcggggcgacatgataaaggtgctgtgggcggaccgggacggcctgtgcctgttcaccaaacgcctggagcgcgggcacttcgtctggccggtgacccgcgacggcaaagtccacctgacgccagcccaactgagcatgctgctggagggcataaactggaaacatccgcagcggacggaacgccctggcctgcggatataa

SEQ ID NO: 245269 - DNA, 636 bp, Klebsiella pneumoniae
atggacacttttgcgaacatggacactatcgtggacagaaacacgccttacaccagaagaccctggatcaccaccgcactcagcctgcggtttaacgacgccctgacttaccgtgaaatctctgagcaactgaacatcagtacttctgctacgcataaaatgttcaagcgttttcgtcgcacgggtattaactggccattgccggaggaatacacgcctgaacgcctggaggaggagctttacgccttcaatcttgaaacaaacctgcctgtcaaaaaacgccggccggactggccactggagttcaaaatccgcatggaggagctgagcctgcagccgggtgcctgcgtggcagagctggcacgggaacatggcgttaacgataacctggtatttaactggcgtaatctgcatcgtcagggattactggaccctgccagcagagccactctcattccggtcaccgtggaaccgctttcaccgccacccagacacaacggggccgtatcagcagaccagccaccggtcatcagctgcaagctgacgctaccgggcgggagcctgagcctgaccgggccactgacgccggagctgctgcgtgcactggtcagcgaactcagggatggtgaggcatga

SEQ ID NO: 245270 - DNA, 1041 bp, Klebsiella pneumoniae
atggaacttgtcagtgaagagcttttgaaaagacgcgtgtcatggggaagcgtcattgccggagtcgttaccgtactggctgtgtccctgcttcttactaccctgggaacaagtctcggactcgctatgttgtccccaaaatctgacgccatcatcaatggcgcggataaaacagtattgatatggtcagttatttccatcgttctcagtctggcctgtggcggatttgtcgcgggcaggctggctggcgcagatggaactatacacggatttttatcatgggccacatctcttcttgttgcttcagtgctgggggcagtcgctgcaggagggattcttaatatgaccggaaatgctatcggttcagtggcatctgcaacaggctctgttgtcagcggactgggaactgctgccgggaaaacggctggcggtgcggtcagccttggagaaaatatagccgacaggctgggtctggatactcaactaacccctcaacagaccgacaggcagattctggatgcactcagaaaaagcaacatcaaagagctgcagcctgagtatcttcagtcacaacttgaagcagccggaaaagacgtgggcactgctgtcaaaaatcttgtcgctaatcccgcaaacagtgatgccatcctggataacctgaaccagaagctgaaaacacgggcgcaaaccgtaagcaagggaatagatcctggtgaggtgaaaaaagcgctggctgataacactcagttaacaccacaagaggcagatgctgctgtagacaactttataaagagcagagacaaaattgtaggagagtttaatcaacgtatgtctcagctggagaatgcccttaatgaggttaaagctcaatatgctgatctcaagaaacaggcaaaagagaaggctgacgaagctgcgaaagctggggccaaaatagcattctggtcatttatcggactattaatcggtgctttagtcagcgctctagctggtttgtggggagtaaatacacatcctgcttatcgtaaaattcgggcataa

SEQ ID NO: 245271 - DNA, 249 bp, Klebsiella pneumoniae
gtgtcagaaaaagcagaagaccagattaaggagattgccggcgccgcacagcagaaatacggtgagctgaccgatgattacggtcatcaggcaaaaggtgccgcccggaaatttgccgctcagggcggtcaggcgtttcaggatgcggctgatgtcgtccgcgagcaggtgggtgataatccggtgaaggctgttgcgattgccgccggattcggactgttaatcgggctgctcatcgggcgccgctga

SEQ ID NO: 245272 - DNA, 198 bp, Klebsiella pneumoniae
atgcagccggtggatgcgctctgggaaacgctttaccggctcagggctcccgtcatgctgtgcagtggtttactgctgatgagggggctgagaagaaaacccggacggctgctgctgtatatccgcagggctgcgggcgtctggggtaccgtgcggtttatccgcaggcagttcacctccggaaaacgggtgagatga

SEQ ID NO: 245273 - DNA, 405 bp, Klebsiella pneumoniae
atggaaaaacgactcacatcttcagcacgaccttcaggaaagttaacggacatagtgtcccggctcctcactttgaccacggtggtcgtcgggacccggcttcagctggcggtgactgaactcgaagaggagaaggcgcaccttctgcagctgatactgctgaccggcctgacgctgctgttcaccgccttcggcatcatgagcctgctgatgtatatcctgctgtttgccgcgcccggagaccagcagacgctgctgctgtatgtgaccggtgcgctgattgcgctggccgtcatactgggcatcgttatccgggtcagggtcgggcgctccacgctgctcagggaaacgcgcagccagctccgggaagatgtttcagccctgacgggaacccgcgatgagtag

SEQ ID NO: 245274 - DNA, 216 bp, Klebsiella pneumoniae
atgacaactcacctttcccgtgaacccacgacactgccggtctgcagcgccggaaaaatagccctactgacgaatatgcttaacgtcagcgtggactgcatcaaggtcatcaacaccgaagggtgtctggttctcatgaaccgcgccggatgcgaggcgctgggggttttaaacctgacgttaaccgactttgcacgcttgctgacactggtgtaa

SEQ ID NO: 245275 - DNA, 837 bp, Klebsiella pneumoniae
atgagaatcaaagcgctggaagccttctgtaaactggttgagctgggtgggattgcccccgccgcagaagcgatgtactgcgtcccctcgaacatcaccaaaatggttaaagatttggagcgcgatcttagcgaacctttattcaaccgtatccgggggcggctcattatcaccccctttggccgccagtactatcatgacgtcctgcaactggtaacgctgaacaccagcctcacgtcaaaatacagacaaaaagagggtatttatacgttaaccattggtgccatcgacgttgctgccgatcactggttgccggagcgtatggctgcatttacagagaaaaatcccgatattcgattacatctaatcagaggatactcgcacgagcttgaagcggctttgtacaatcatgatgtcgatgttattttttccgacggccctattgttactacggaaatagtcagtactcctgcatttaccgaacatctggttcttactggcgatccccgcgataccgctatggacccacttccactttatagttttggcgagaaatgcttttatcagaaggtcacaaaaaactggttaacaactcaacctattaataagtttcaacttaccgatatggaaagctatccggctatggctgcccttatcaggcgaggaactggtgtcgcatttattcctgagtgtatgctcgaaagcctgaactgtacgtcacttgttacagccggtataaaaattccctgtcaagtttatggagcctggtcaaaagacaatcagcacacggctattaaactattaattaatgcgatatgccaaacatcagaattataa

SEQ ID NO: 245276 - DNA, 291 bp, Klebsiella pneumoniae
atgattactctgaatgttttctttaacgttgatgccgctaagcgcgatgactttttgacagtgctaaataatatggtaaccgagtcgaataaagaggttggatgccatttttatcagctctggcagaacccaaatgcgaaggaccattatgcgctgattgaacactgggaagataaagattcacttgccagacatcagaaaacggcacactggattgcctttaatgacgtggtaaactcttttttaacctcaccttatgatgagcatcattaccacgaaattgcacgttaa

SEQ ID NO: 245277 - DNA, 486 bp, Klebsiella pneumoniae
atgacaaatgttaataactttccggcttctggatatgtgttcaatcatacaatgctgcgggtgaaagacttgacgctttctatagcattctatgaagatattctaggatttacgccgatctacagagaagattttgatgctgatggtttcacgattgtctacatggcccacgttgatccttcacacattcctgagcatcacgaagagcgcaggctctgggcgctctcacagtcaggggtgctggaacttacttacaatcatggttctgagaaagacccggacttacactatcataatggcaataatgaaccgcgcggctatggccatatttgcattacggtccctgatttacaggacgcctgcttaagaatgcaatctgccggagtacgttttaaaaaacgcccggatgaaggaaggatgcgctatgttgcatttatcttagaccccgatgattactggattgagattctgcaatataaagcgtag

SEQ ID NO: 245278 - DNA, 339 bp, Klebsiella pneumoniae
atgagtgaaattacatttgaagagtttctgaaagttgagttgcgtgtaggtcgaattatcagggcggatacgttccccagggcccgtaatccatcctatatcctccacatcgattttggtgaagatataggcgtcagaaagagcagcgctcaaataaccaggcattacactctcgatgaacttgaggggaaaatggttgttgccgttataaatttccccaagaagcaaataggtcccatcatgtcagagtgtttggttacagggttccatgatgaaaatggtgatgtggttctttgcgtccctgacgacagtgttcctttaggaactaagcttctttga

SEQ ID NO: 245279 - DNA, 168 bp, Klebsiella pneumoniae
atggaaaatcatataattcacgcggcgatagatgcgctaaacagctcagaagcccacatctgttacgcatcatggtttgcgtcacctaatttttcatcaatgctgttgtttttcatcgctgcgctggcggcaaccattcatcttatgccgctgggcagaaagagttga

SEQ ID NO: 245280 - DNA, 423 bp, Klebsiella pneumoniae
atgaaacaaaacagcatcctgaaagaaaagctgtgcttttctctgtactcggttacaaacgcgctgatccgtcagtatcggccattactgaacgaatttgacctgacctacccacagtttgttgtgctcatggcactctatgagcaggacggtattccgctacggacgctgggtcagaagacattatttgactcgggaacgctgacgccgctggtgcaaaaacttgaggggaaagggtttctgaaaagggtggccgtcgtcggtgatgaaaggatgaaaaatgtcgtacttactgaaaaggcacatgagatgaaagaggctctactggaactgcctgataaaatgagatgtaccatgcagatgaaagatgaggagttagatctgcttcgccagctgtcagctaatctgctgaaggatctgtaa

SEQ ID NO: 245281 - DNA, 204 bp, Klebsiella pneumoniae
atgtacaggctctccgactacgccttgtctcttactctattcagctccaagcagggcttcgcgtatgtagcgtttataatcgatgagttcgccggcgtcatcgtgggctggtgggtatcagcgtcgatggaaacgatattcgtgatggatgcgctggatcaggcgctgtgggctcgtcgaccgtctggcaccatccatcactaa

SEQ ID NO: 245282 - DNA, 1209 bp, Klebsiella pneumoniae
atggacgaaaaacagttgcaggctctggctaacgaactggctaaaaatctcaaaacccctgacgatctcagccagttcgatcgcctgctgaaaaaaattagcgtcgaggccgctctcaacgccgaaatgacccaccatctcggatacgagaaaaatcagcccaaattgggccccaacgcccgcaacggatactcaaccaaaacggtcaccaccgggaatgggccgctggaactgcgtactccgcgcgatcgtgatgccacattcgaaccgcaattggtcaagaaaaatcagacccgtataaccagcatggataaccagatcctgtcgttatacgccaaaggcatgacgacccgcgaaatcgtcgcgacgtttaaggagttgtacgacgcggatgtgtcgccagcgctgatttcaaaggtgacggacgcggtgatggaacagggtgttgaatggcagaatcggccgctggatagtctttatcccattgtttatcttgactgtattgtcattaaggttcggcaggacagccgcgtcatcaacaaatccgtgttcctggctctgggcatcaataccgagggtcagaaagagctgctggggatgtggctcgcggaaaatgaaggggcgaagttctggctaaacgtgctgacagagctgaaaaaccgtggcctgaacgacatcctcatcgcttgcgttgacggactgaaaggcttccctgacgccatcaatgccgtctaccccgaaacgcgtatccagttatgcatcgtacacatggtacgcaacagcctgcggttcgtgtcttggaaggactacaaggccgtcacccgtgacctgaaggcggtttacggggcagtgacggaagaagcggcgttgcaggcgctggaaacgttcgccacgggctgggatgaccgctacccgcaaatcagtcggagctggcgggcaaactgggtgaatttgtcaacgatcttcgcgtacccggatgacatccgtaaggtgatttacacgaccaatgccatcgaatcgctgaacagtgtgatccgacatgccatcaagaaacgcaaggtgtttccgacagatgagtcggtgagaaaagtcgtgtggctggcgatacagtcagcatcaaaaaaatggacgatgccgttacaaaactggcgactggcgatgagtcgctttatgctcgaattcggtgactgcctggacggtcacttctga

SEQ ID NO: 245283 - DNA, 1020 bp, Klebsiella pneumoniae
atgaaaaccgtatcagctgtcctgacttcagctcttttcgcatccgccaccgctgtggcttccgaacaaccggtcaaccttcctgctcctacggccggagtgcaggcatttctcaatgtgctgaactccggtaacggcaagcccatggaacaactgacccctcaggaggcccgtcagatactgatcggggcacagaagggcgttacgctgccatcagcgcaggtttcagaaaaaaacatcacagtgaacgggcaatccataacactgaaaatcgtcaaaccggacaacgctaccggcacacttcctgtgttcatgttcttccatggtggtggctgggtgctgggagatttcccgactcatgaacgtcttatccgggatctggttcgctcctccggcgctgctgcagtatatgtggactatactccgtcaccggaggcccgcttccctgtcgcgattaaccaggcgtatgaagcaactaaatgggtggctgaacacggtcaggaaattggcgtggatggcagccgtctggccctggtcggtaacagcgtcggcgggaatatggtggcctctgtggcgctgcaggccagacagtttaacggaccgaagattcgttataacgtgatgctgtggccggtaaccgacgcgaattttaacaacgcatcctataaccagtacgaaaatggctatttcctgacgaaaaacatgatgaaatggttctgggataactacaccacaagcgcgtcagaccgtaataatattctggcctcgccattgcgagccaccacggaacagctgaaagggttcccgcagaccttgatccagacggcggaacttgatgttctgcgcgacgaaggtgaagcgttcggtcgcaaactggatgcagctggcgtaccagtgaccgtgacacgctataacggtatgatccatgactatgggctgctgaacccgttaagtcaggagcccaccgtcaaaactgcgctggagcaggcgggtgcagaactgcataaacatctgaattaa

SEQ ID NO: 245284 - DNA, 423 bp, Klebsiella pneumoniae
atgaaacaaaacagcattctggaagaaaagctgtgcttttctctgtactcggttacaaacgcgctgatccgccagtaccggccattactgaaagaatttgacctgacctacccacagtttgtcgtgctcatggcactgtatgagcaggacgatatcccgctacgggcgcttggtcagaagacattatttgactcgggaacgctgacgccgcttgtgcaaaaacttgaggggaaggggtttctgaaaaggatggccgtcgtcggtgatgaaaggatgaaaaatgtcgtacttactgaaaaggcgcatgagatgaaagaggctctgctggaactgccgggtaaaatgagatgtaccatgcagatgaaagatgaggagttagatctgcttcgccagctgtcagctaatctgctgaaagatctgtaa

SEQ ID NO: 245285 - DNA, 1473 bp, Klebsiella pneumoniae
atggaacgcccgaatctgactgaagctgcaaagaactggatcaacggtagctggaacaccggaggcacgatcagacatgcggtcagcccttcaaccggccagctgctgggaagttacctggacgccggctctgacgaagcacgctatgcgatcgaagccgcccgcactgctttcgacaccacaaactggtccaaggaacgctccctgcgctcgcgcgccctgtttgagctggccgatgaggtcgcaaaacgggtggacgagatagcaattcagctcgcccgtgaaggaggtaagctgctggcgcagactcagtgggaactggtattaacggtggagtggctgcgttatggtgccgccaccgctctgttacagaccggtgggcgcgcccttgaagccgctccggggatgcactttcattccgatcccgaacctcttggcgttgtgggagtgatctcgccatggaactcacccatcatcctgtccgtgcgcgctctcgctcccgcgctggctgccggatgcacggtggtactgaagctgccacatcaaaccgcgcttaccaatgccctgttttccggggcaatagcagcggccaaatcgctgccgccgggtgtactgaatgtgatcaccgaaaccgggagtacgggtgcctccatgctggtcgactcccctctggtgaacatgatcagctataccggcagcaccaaggtcggccgtctcattgccgccaacggtgccagaacgctcaagcgtctgaatctcgaactgggcggcaaggcaccactggttgtattcgatgatgccagacttgatgtggtggtaccgcagatcgtcatggcactggtcgcgatgaacggccagttctgctgcaccggttcgcgtgtactggtccagcgtggcattgccgaccgattgcgcgctgcgctgatcgaggcttatcagaacgtccggctcggtgaaagcgaggatccgcaggcgcagcttggtccactgatcgacaaagccagtgtccggcgcgttgatgctgtggtcgatgaagcaggatcctatgcaaacattctggtgcgcggcggcccggtcgacgaaggccccctggccgcaggcgcgttctaccgccccaccctgatcgaagtacaggacctggacgcccgtgtcatccagtccgaggtcttcgggccggtccagactttcgaaatttttgaagacgaagccgatgcaatcatgcgcgcaaacgctacggaatttggtcttgccgcttcggtgttctcgggcgatacggcgcgctgccggcgagtcggcaaggctattcaagccgggcatatctggctaaactgctggggcgtcatgtcggagcactttgaacagagcggcttcaagcaaagtggtatcggcgtcctctgtgggccacgtgcgattgagcagttccaggaaatcaaggtctatgcgagtgttgaggcaacgccgaaatcgctctga

SEQ ID NO: 245286 - DNA, 633 bp, Klebsiella pneumoniae
gtgaaaatgaaaactgatgcagacaagcccctgcgcgggcgtcccgtgaatgagcatgcgcgtgaagaacgcatgacccagatcctcgacggggcccgaaactgctttatacaacgcgggtttcacgcctcatccatttccgagatcggtgcagctgcaggggtcagcgttgcgaacatctaccagtactacccgagtaaggaagcccttatcactgcgcttatcgaactcgacctgcagcggcatcacaatctgattagccgtttctggagtacggatttcagtcgcaaggcgattgaagaactgctggcagagatcttcctcacatccgagggacacgcggtggcggttttacgtgctgagatcgccagtgaaggtgcgcgtaacacacatgtcgccgaactacttcgtgagtcagaatctggcctgattaacagtgttcaccgcaagatacgcacggctcagaacagcggtcagatatctgctgagctcaatccggacgacgtcacagagcgcctttccctcgtttttgagggactgatgcgtctgtacctgttctccccggacaatggacagaaactcattgagcaatattaccgccagtttgccgatacgcttcaactgaaatcctga

SEQ ID NO: 245287 - DNA, 558 bp, Klebsiella pneumoniae
atgctagcagaattattatcacttatctcaaaaaattcgtgggctgcgggaatgctcagcatgcttattatagctctgtcaggtatgttatcctatcttttaaaagaacggggacgtaggcggatgaaacgttatgaactcacgatagaacattacaacgactacagttgcctgatgttcaccgcaatggatgccttatgtgcagataaagggtttgaaaaatacaagacacggagcattaaaccggcttttcccgagctggtgctggaagaatttacccgcgacactctcaacgaacttttgtgcgcttcagggcgagcaactctggttgctgattccctgacgcgtgaacggtttgcagcctgtacaaactgtatcatcaataaagttaatggaaaacagcagtcgtctgttgattgccatgacaaaatacttgaagcacttagagcaatgaaccagcatttgcgtcgttttgaatattggtggttgatccgatggggatttgcagtcatagcatggtttaggtcactgagagtaagggaaaaatgtataaactga

SEQ ID NO: 245288 - DNA, 255 bp, Klebsiella pneumoniae
atgagttatgccgattcatttggaaataaatttcagttcgatgcaaccataaaaaacatttatattaactgtaaaaaacgccagtacgcgctatacagcactgagttttatagggataacaatctgttatttaagcgaaatgataaaatcatggccgataatctaagctctcatatgggttttgatacgttatggaggccattgggctttggtgatttctatagtaaatcatttgaatattactgtaacaaataa

SEQ ID NO: 245289 - DNA, 249 bp, Klebsiella pneumoniae
atgaacgatcagaacctaaaagattacctttcagaaaactggaaaagaccatttaagaccctttcattttgggttatctccattgctgccgttatattaaaagaccaattatataattatgacctctcagtcgacagcatttttcatagaactaatctgctggactggcttttgggatttataattatacttacgtatatttttgccgaaaaaatagatgtcaagatcaaggcaatgatgtcaagttaa

SEQ ID NO: 245290 - DNA, 642 bp, Klebsiella pneumoniae
atgaagttgtctcatatcactggtacgatatcaatctctttgacggccccttatacgtacacatttatgactgaaattcgcattggctatgcccgatgttcaactaaccaccaagatttggccgcacaacaggaagctctgatcagcctgggcgtctccccggatcggatttacaccgacaaagggctgacaggggcaaaccggcagagaccagggctggatcaggcgctggccgctgtgcgccgtggtgacaccctggttgtaccgaaacttgaccgtctggcgcgctcggtacctgatgcgcgtgaaattgcggatgcattacagaccaggggcgtgaagctggcgctgggagccagtctctacgacccagaagacccggtggggaaaatgttttttaacgtgctggcgacgtttgctgagttcgagggcgatctgatacgtcttcgtacccgggaaggtatggctattgcgcgggcgaaagggaaactaagggggaaacagccaaagctttcagacaagcagcaaaaagagctttgtagaatgcatggatgtggtgagtattcaatcagtgatttggctgaattattttcagtctcccgacctactgtttatcgaacacttgcgcgaggacaaaaatga

SEQ ID NO: 245291 - DNA, 711 bp, Klebsiella pneumoniae
atgactgtttctataggtgtacttgcaggtatggggcctcgctcgaccgcacccttcgttgatatgctggtgacagactgccagatcgtctatggcgcaaaatatgatctggattttcccaaaatgcatattatttcattgccaacacctttttggcccggtaagaaaattaatgatgatgcgatgatcgccgccctgcagcagggtattgccgaacttgtcaaagctaaagtgagccttataactgttccctgtaaccttgcgcattgttatttcaacgaaatgaaaggtgcaagctgcggcattccacttttgcatattgcagacagtgccctcgagtcgctaccgaaagaagtaaccaaaatcgcggtactggctacagaacccacgcttgaagcaggtttctatcaggcacgaataatagcctctggcaaaaagattatagatacacagcggcttcgtgaaatgaccacattactaattggacgagttaaaacaaaaggctttcacgatcccgatgtacaggcagagtggcagagtttgttggcagaagtagaagctcatcaggcagaggcgcttcttattgcatgtaccgatctgagtcctctgataaatggaaatccttacagctttgtcatcgtcgatacggcagcaagtctttccagggcaacgattcagaacttcaggcaattgtgcggatacggggtttga

SEQ ID NO: 245292 - DNA, 735 bp, Klebsiella pneumoniae
atgaaaattaaagacgacaatgaggcagtgcgctcagaacagaagcggatgcagtggacccccctgcgggccagaacactggtggatgacgcagtggatgctattgtggcagcggccgcgcgcggcatgttgctgccgggcgaccgtatcgtggaaactgacatagcaagtaagctcaatatcagccgtatccctgtcagggaagcactccgcctgctggaaagccaggggatcgtagtcagtgagccctttaaaggcatacgcctggcgccggtttccaaagagcgtctggagaacatcttcgaggtacgtgtcacactagagctactggccgttaaacgcattgtcacatcaggcttgcataaagaggcgctctttctcgatactcttcggcagtgcattgatgaaatgcagatcatgtcgatgcgcaaagacgcttacggtgtcgccaatgccgatgtcgcgttccatcgtgaattatgtcgtctgagtggtaatgacgtgcttctccacttatgggaaggggtggcacgtcaattgacgatcgttgtaggtctctccacccttgaaaaatcaatgcatatcatcgttgatgaacataatgagttatcgcgtgtgctggcatcgggagatctacccaaaatcgaaaagtgtatgatcaatcatattatcaagcagaataaaaacattgatttttcggcgctagcagaacgcaaaaccaccaaaaaagcctga

SEQ ID NO: 245293 - DNA, 801 bp, Klebsiella pneumoniae
atgaaaaataatgaaactgatcatgccggaattatattggtgacgggcgctggctcggggatcggtagagcgattgtcctgaatcaggcaaaacagaataaagccgttgtcattgcggacatcaatctacaggcagcccagatggttcgacaggaagccttggctgctggtgctttggatgctctggcagtcgagtgtgacgtgggaaatgaggcgagtatcatggcggcatttcggcgttgtaaggcgcaccttggggatattccaaccggcattgttgccaatgccggtattgagatagtcaaacgggcacatgaaacaacgcttgaggaatgggaacgggtgattcggacaaacctgaccggcacgtttttaacctgccgtgaagctatccgacatctgcttgagcagaataagccaggtgctattatctgcatcagttcgccttcggcctttgtcgggtttgcagctggaagcaatagtgcttatggcagcagcaaagggggcatatccgcactcgtccgagccctgtcgattgactatgcagacgacatgataagggtaaatggcgtcgtccctggggccacggctacgagtctgctaaatgtcacactgagtcaccccagcaacaaggcgttttctgaacgtgtgaaagaacagatcccactacggcgactggctacacccgaggaagtcggcaataccgtcagttggttgctcagcgagcaggcaagctatgtgaccggtacacatatctttgtggatggaggcttgaccgccagaggggcgaacgacttttaa

SEQ ID NO: 245294 - DNA, 1449 bp, Klebsiella pneumoniae
atgaacataaatactctgtcaaataatccatcgaagattcccatcaaggttacgctaatctcttgcggggcggccattggtggttttctgttcggttttgatactgctgtcatcaatggggcgatcgatcccatcagagaagtcttcgggctatctagttttggtgtcggtgtcgttgttgcaatcacgctctttggcgcggcattcggcgcattggctaccggctggctggcagaccgctggggccgaacccgcgtcatgtcactggtgtcccttctctttattgtttcgtcgataggatgcggcatttccaccggttattacgaacttacgatctggcggtttatcgtgggattctgcgtcggtattaccacggtgattggcccgctgtatatttcagaaatcgcacccgctgccatcaggggcaaactctcatccctgcaacagatggcgattgttctggggatctttgcggccctcctgagcaataccttcattgcccgtgtgctcaatggtgccaatgccgatctgtggatgggtctgccagcctggcgatggatgttcctcgtaggactcattccttcggcactatacggcatattctcgctgaccattcctgattcgccgcgctatctggtgtccagaggaaacattgcagaggccaaacgcatactgatgaccgcacaaagcatttcggctcaggcagcacaggaacaggcagaaaaaatccataccaccttgcaactgacgcaccgtccccagtttcgggatattctcgataagaaagcggggctgttgccgattgtctgggtggggattgctcttgccttgcttcaggctctggtcggtattgatgtgattttctattactcgacctctttgtggaaatcggttggctttgatgaatcgacctctttcgagctctctgttctgagctccttcgtcaatatcctagcaacggttgtcgccattgcgctgatagacaaggtcggtagaagaaaactgctgctgttcggctctgccggaatgttcttcagcctgctaaccgtctcacttggattctcaatggcgcagcaggttgcagaggattccattgtcctacctgaaccctggggcatgatcacgctggctgcggccaatctctttgtcattttctttgccgtctcgtggggtccggtcgtgtgggtgctgttaggcgagatgtttcccaacaagatccgcgccatcgccgtttccgtatgcgccagtgccaactgggctggaggggtggtactgaatctgacattcccgacactcagggacttttcactgcccatcagttatggcatctacgctgtgttcgcgctactgtcgtggatactggtcaaacgctatgtacgcgaaacccggcatgttgaactggaagatatgccggaagatatcaaagcggggcagcatcatgaaaaataa

SEQ ID NO: 245295 - DNA, 390 bp, Klebsiella pneumoniae
atgctcaacaaaaaagatgtctctgtcggttctacaacgtgggtgattgctgacggatatattccgccctacagcaacggcccttcccccgaaatggtcagccacgacagtatctgcatgctcaatgcgggggattgcacagcgctggtcagtatctatgtctactttacagaccgtgagcctgctggcccatttagcatagagatccctgccagaagggcatttcatcagcgcattaacgatctggatggaccggaaaagatcccagctggcacagattacagtttgttgatcaggagcgatagcaggattgtggtgcagcatacgcgcctagactcacggcaatcagagaacgcgctgatgacgaccattgcctacccggtagcgtag

SEQ ID NO: 245296 - DNA, 960 bp, Klebsiella pneumoniae
atgttacacaacgagccaagtaacatagctagctgcattattgatacatcagcagttcggctctcttcttacagaatattctttcgcgttgatgatgagtcggcatttgccatatacaaatggaatgaagaggtttcatctcggttgatgaagcttgttggtgtcatcgaggtaactcttagaaaccgcatacactcagcaatgagccaagccgtacaaacattagccagagggaatcttcaaaataacgattggttcaaccatttatcgttaggtggaggtacccaaagcaaattaaataaagtccttctaaccaaaggaaatcgaccaaagaacccacaaccatcgccaaacttcgttgtatccaaaatgacgtatggcttttggccaaacatattaaaaacagataaaaaaacagacaacaaaagacttgaatgggagactcttttccctctgattttcccgggccttcctcctgcaaccgctggttactggaagacgttaaagcatcgcgaatctgtgatagctagatgcttctcagttggcgaactccggaatcggatcgctcacttcgagcctgtatggaaatttggtagtgaaattgaggaaagtatcccgaaacataactatgtcccgaaggtcgtgaacccagcacctcaaaataaacatgaggctgtagctagattgaacatggagttttccagagcaatgcagttgctaaactggctatcccctcacgcctaccaagattatctaaaatcagagagcaaaagatctctcgattggctaataacagagagcgccattgatgcattcattaaacacaaagaaatagggaagatatctttcaacaagacattaaaagcaaggcatatcaaaaggttatcatcaaaaataaaaggatgctcacttatcacgatgaaaaaagagccaattggtatgatcttcctatacccataa

SEQ ID NO: 245297 - DNA, 171 bp, Klebsiella pneumoniae; identical to SEQ ID NO: 138617

SEQ ID NO: 245298 - DNA, 888 bp, Klebsiella pneumoniae
atgccgcgacagcttctccgtcgtgcgcgccgcatcctgcgccgagtacagccggagatgacttccgctctgcgccagctggttgagggtggcgttatccagctcacgctgcgtcaccgacgcaaagaccattgccgtctcgctaaccgacctgccgggactttccacccagccgtggccgactttaataccgtcaaacacgcccgcacccacggccagggtctgcgtggttttctgccccggccgctgtaccgtcagctgcccgtcctccactttcatcactgtgacgctctccccgcccttaaggcgtgtgtccggtatcttcccgagcaccgccagacgttccccctctgccaccggcagtgtatctgcccggaacagcgtccactggctgtcgaccgcggaaaccttcagatcaagacggtccccttcccggtctttcagggtcagcatattgctgctcgcggtcacccggtcaatgacaaagcgatcgtgcgtccggttctccggatcccagcgttccatcaccatcccctcccggtaataatcccgcacgccccggcttttactgtccagccacaccggcgtcagggctgtaatggtcgtgtctttctcacccagcaccccctcctgtctgagggagtcacggataaggccgttgagtacgctctgttcacgcgtcccgctgatttgggccacgctttcctgcccttcacgtacgctgacggcaaactcctgtgccagccggctgtagcgtgctcctttatccggttcactgatgatgtcggctgtggtctgttggcccccctgccagcgatacgtattcacgccgctgtccttcagcaccgtcagcgcactgccggtcccgctgcgcttcccgctgtctga

SEQ ID NO: 245299 - DNA, 219 bp, Klebsiella pneumoniae
atggtccttttccatttcagtattctcatttttcacctctgcgccttgccgttgtatgttttcgcgggtttcctgctgctgttgtttattctctgtaatcatcccaccaactttctgatccacattatccttaatacccgcatcttgcgtcatagcatcgatacgaccagaattttgtcggtagtcggccattaccgatccattgtcaccaccacctga

SEQ ID NO: 245300 - DNA, 1503 bp, Klebsiella pneumoniae
atgggtactttatcagcaggggttgattcaaaatctacgttacaacttctacgacttgggcaatccgtagcggagtttgatgattcattagaaaaatatttcattgaaaatcaagcttatcactctttaattaatgatagagctgattttattgctggagacaaggggacaggcaagactgcagtttatcgaatattgcaaaaaagatattccataacgccagagttgaaaaatgtagaggtaatcgcaggctttaatcctataggcaatccagtctttcagcgtcttgtgcaacaggatgttaatattcttactgaagggcaatatgtaagcgtttggaagacttatgttttatcgttaataggtaattggcttatcgatatagttggtggggattattccgaaaacttaaatcaattgcaaaaactttttaacgaaacaaacttattaagcaaaaacaacaagcctgaaacaatttttagtaggatagttaactctttaaagaaaacctttaggccggatacttctgaaacaacatttacgatatctgagactggtttgcctatagtatctcaaaaatttactttcggggatgtcgggaaaagtgaaagcgctaaaataagagagataactcatgaagaagcgtttgatttattaaatgattgcttgaacgacgttggttattcggtctgggttgctcttgatcgtttagatgaagcatttcaggggtatcctagtattgaggtacctgccttaagagctctattaaggacatatctggatttattagctttcgataagttaagattgaaaatatttgtgcgcaaggatctctttaggaagataattggaaacgggtttgttaatctgacgcatataaatgctcgaaaggtcgagattgtttgggatgaagcagatttattaaatcttctatctcgtaggattagagacagttctgatttcattgaaacaatggaggctgaggcagattctgatgaaactttgttttataagattttccctgaaaaggttgatgccgcagatcgaaaaccaaccacttttaattggataatgtctcgtataagagatggtaatgatattagagctcctaggaatctaattgacttagtggggatggccacggaagaacaaattcgtgctgattctcgggtgccaagggtaataaagtcaggtgaacgattgataatttctgaggcacttagaaatgcgttgtctagattaagtgaacaacgagttcaggatacattacttgctgaggttgggcctgagatatcagcatatataattaaatttactgcggaaaaagcagagcataaccttgaaacactgtcgggaattttagagttggaaggtgaacaattgcaatatgctattaaacagctcatggagacaggtttcttggaggaaataaaggaaacttggaaagtaccaatgctctatcgtgatggtttaggtataacacaaggcaaagcattcgcttaa

SEQ ID NO: 245301 - DNA, 615 bp, Klebsiella pneumoniae
atgcgtgatctgatccttcaactcagcaaaagttcgatttattcaacaaagccgcgtctggcccgtgacggctggctgaccattcagcatggtaagcccactaaagtgaataacttttgggaaacctccggcctgaatatcctcgaaacgctggcgcgcctcgatcacgacagcgtaccgcagctgattgataatctgctctccgtgcgcaccaacatttccacgatttttatccgcaccgcgtttcgccagcatccggataaagcgctggcggtcctggacagcgcccgggaggtggaggatcacgccgacgccttcgccgagcttgattataatattttccgtggtctggcgtttgcctccggcaacccgatctacggtctgatcctcaacggcatgaaggggttgtatacccgcatcggccgccactatttctccagcccggaagcgcgcagcctggcgctcggtttctatcatcagctggcgaaagtgtgtgaggctggcctgcatgaccaggtttacgagctggttcgtcgctacggccatgacagcggcgagatctggcaccggatgcagaaatcgctgcccggtgatttagccatgaatatgcgttaa

SEQ ID NO: 245302 - DNA, 198 bp, Klebsiella pneumoniae
atggtcattaaggcgcagagccctgcgggtttcgcggaagagtacatcattgagagtatctggaataaccgcttccctcccggatcgattctccccgctgaacgcgagctttctgagctgatcggtgtcacccgcacaaccctgcgcgaagtattgcagcgtctggcggctttgttgaataaatcagatttcgggtaa

SEQ ID NO: 245303 - DNA, 660 bp, Klebsiella pneumoniae
atgctggccgatattaaatattgggaaagcgatgcccagaataaacattacgcgattgcccactttaatgtttggaatgcggaaatgttaatgggggtcattgatgcggcagaagagtctaaatcgccggtaattatctctttcggtaccggttttgtgggtaatacctcgtttgaagatttttcgcatatgatggtatcgatggctaaaaaagcctcggtgccggttattacccattgggatcacgggcgtagcatggagattatccacaacgcctgggtccatggtatgaattcgctgatgcgcgatgcctccgcctttgatttcgaagaaaatattcgcctgactaaagaggcggtggacttcttccaccctctgggcattccggttgaagcggagttaggccacgtggggaatgaaacggtttatgaagaagcgttggcgggctaccactatactgacccgagccaggcggcggagttcgtcgaacgtaccggctgcgactctttggcggtggcaattggtaaccagcatggggtttatacctcagaacccaaactgaattttgaggtggttaaacgcgtacgcgaggcggtatccgttccgctggtgctgcacggcgcgtccggtattagcgatgcggatggctttgttgaataa

SEQ ID NO: 245304 - DNA, 234 bp, Klebsiella pneumoniae
atgccacatcataaccatatttatgttttcgctgttctcctgttccatcgacagggaagcgatctgtctccgaaagacaattactcaaaaataatgtcgaagttctatctaatatttgaaatcctgagtataacccatcccctgtccgactattattatatgagtgtaaattattccccattacaccatgtattatgtacccagggccagcattattatctgccctgcaattag

SEQ ID NO: 245305 - DNA, 2010 bp, Klebsiella pneumoniae; identical to SEQ ID NO: 220524

SEQ ID NO: 245306 - DNA, 171 bp, Klebsiella pneumoniae; identical to SEQ ID NO: 232413

SEQ ID NO: 245307 - DNA, 1284 bp, Klebsiella pneumoniae
gtgagtcaccagggcgagtatgcgctgaaaaacgtcaacgggctgggttttaccgagcggatcacgctcagttctccggggctggtggaagttcgctgtcgtcggcgcaatgagcagggctcaaacaacgccagggattcgatgtactggcaggcactgcgtgggcgactgctgacacgtccttcatcctatcccgatgtgtcgctgatggcggtgaccgttgagacgggcgggaagctggcggcgcagtcagaccgccgcgtaaacgttgtggccacgcgggcctatgactcaggaacggccagaactatttcgggggcgctgctgcatgtcggtaactcgctggggctggagatggacgtcgataccatcaacgcgctggagtccgcgtactggacgccacggggcgaaaatttcgatttcgccaccggcgacagtatctcggcgctggaaatgctgcagatgatagccagtgccggaaaatccagcttcctgttaagcgatggccttgcgacggtcaaccgcgaggggattaagccctggacggggatcataacgccgcatgagatggtggaggagctgcagagcggatttaccgtgccgtccgacgatgattttgatggtgtcgacgtgacgtacatcaacggcgtcacctgggcagaggagactgttaaatgtcggacacccgacaatcccacgccggtgaaaatcgagaactacaaacttgatggggtgctctctcaggatcacgcctaccagatcggcatgcgtcgcctgatgaagtatcttcagcagcgggttacataccagaccaccaccgagctggatgcgctctgctacaacacaggcgatcgcatcgtgctcacggatgatattccgggtaacaacacgatttcctgtctggtggaggcgatgacaacggctggtggcgtgacaaccttcaccgttacggagccgctggactggtctttcgaaaacccccgtgcgctgatccgctatcaggatggttctgcatccggtctgatggtggcgagcagagtgggggattatcaattgtccgttccccatctgagtgattttgatgacccattgaagattgaccagacttcaccagccattgagccagtccgcctggtgttctgcggctcaacgcgtcatgtctatgacgccattgttgaggagattgccccacaatcagacgggacgtgtcaggttaccgccaaagagtaccgcgcatccttctacgactacgacaacgccagttatcccggcgacattgcataa

SEQ ID NO: 245308 - DNA, 228 bp, Klebsiella pneumoniae; identical to SEQ ID NO: 215168

SEQ ID NO: 245309 - DNA, 342 bp, Klebsiella pneumoniae
gtgcgtaatccctcgccactggccacgccggaagcgctgaaccagagctggtctgttgattttatgcattatgccctggtctgtgggcgtcgttttcgcacgttcaatgtcgttgatgactttaaccgtgaggcgttgtcgattgaaatagatctgaatctgccagctccgcgagtggtccgtgtgctcgacaggatcgcggcaaaccgcggttatccggtcatgctgcgtatggataatggtccggaatttatctctctggcactggctgaatgggcagagaagcatgcagtaaaactggagtttatccagtcgggtaagccgacgcagaacgctgaatga

SEQ ID NO: 245310 - DNA, 270 bp, Klebsiella pneumoniae; identical to SEQ ID NO: 239760

SEQ ID NO: 245311 - DNA, 180 bp, Klebsiella pneumoniae
atgaggaacttgttcctgaacttgaagactcagatgagcttggtgagctgtatgtttttggataataaggagtgctgccaccatagtacccgccacctgatgatgatcggtgagaactatggctccggtgggagctatgactgcgatgccctgcaatgtagaatggaacttcggtgttaa

SEQ ID NO: 245312 - DNA, 687 bp, Klebsiella pneumoniae
atggaaaacaaatgtattgaaagtgagcaaatcttttttgctaagatgaataggtatagtttcaaactgtcagataagaaatggcaactggataaagaaaactgcgtataccctcataaagttgtagatagaatgcctacaaaaatgaaacttagctacttaaaaacattggcttactatgcgtctgaatatagttctttttatattcaaagcattaacaatctattttataagtggtttggtgcgatgactatcgatactattgatgacaaagccatatatcaattgaatgtttatttaggttcagcgagaaactacaagctaaacatagttaaggccttcatcactaaatggaaaaaactcaattaccctggagtagaagcgactgcccttagaatgttggagaaaataaaaatcattccaaaccaaacaggagaggcagttaaaagacgagatccaaataaaggacctttaactgaaacggaactaaattatatccttaactctgttagcaaactttatcttcagaagaaaattcaacgcttcttatattgttatattcttctgttggcaataacaggaagaaggccattacaattaatctctctaaaagctaaggatctcattaaaaatgagaaagggtattttttaaatgtaccaaaagtacagtttatcaatgctaattaa

SEQ ID NO: 245313 - DNA, 1404 bp, Klebsiella pneumoniae
atgttgcatgtgcattcattcaataaatctaagacgaaacactcaacattatcaatgttgaagattgtagaattcgttttactgaaaatcaatatgcaagctaatgtaagctattgcaacaattcagtttttgatgaatgcataagaatagcctctgaaaagtattctaaagcacatgcatttgctattgggaaggaacttgagaaattgagttcatttttaagtgataataggatgactaattcatcttatttattttgggtaaatccaattagatataggattactcagtcttggactggttatgattcttcacttgaaggccatcctagattgcctgatatcaaatcagttattgcgattgctgagattttttcaaagcgggatgaacaattatcttcaagagatatatttacaacatctgtgcttgctttacttatgtgcgcaccaagtaggatatcagaaattttagctttgccagcggattgtgaaattacagaatgtgatggaaagggtattcaaagatacggattgagatttttttcagcaaaagggtatgaaggtaatataaaatggattccaactttaatgatacctgtagctaaaagggctattagcagattaaaagaattatcaagtcaagcgaggttattggctgctgaatttcaaaaaaatcactctaattcaacgatggggacccttaaagagaatatacctcaagatttcccttggtatgatagagagaagaaaattgaatattctaatgcgctttgcttgttaactgaaggacagttaaatcaaaacaaaaagaaaatgttagataagttattcagacctacaatgagtttttttaaaactgacattgttgattctgattatataaaaggacattttaatatctttaaaagatatggttatataaatgaagatggtagcccatatttgctaagaacacatcaactgaggcatcttctcaacacatttgctcaaataaatagcatggatgaattcagtattgctcgctggtctggacgaaagcttatttctcaaaatgtttcttatgaccacagatcgcatcttcaaatgtctaaagcaataagagaacaaaagttatcagtgtgtgttaacgagcacagaataaaggatattccagtggtggatcttaatgagtttgattcacttagtagtggtgcagtacttgtatcaaaacatggctactgcaaacactcatatgcgtttaagccgtgtgaacattatccgattgagaattctggtttagataacgaaacgatttcaaacattcacgataaaattttaaaaagaacactgtatgataaaaatgatgggaacataaatgctgatagatggtatgaatttcataagagaataaaaaaaggagaataa

SEQ ID NO: 245314 - DNA, 816 bp, Klebsiella pneumoniae
atgtgtgcatatcactggattagtttgcttgaaccattttctgataaatgggggaaattctcacttatctcttctttagtctactctaaacttggtttatacgcattagattttaatgatcatgctcttccattttcgcagcgacttgagaatgaagcgaagaaatctgcccaaacatttagtaatacatatatattcaccgatgcacagtttgatatttatacggatatgctgaaatcaccttactatagtttttcaggtccaacgtcattggggaaatcatttattctaaaacgctatattgaagagattattcaaaattctacatcaaacattgtcatcttagtcccaacaagagcattgataagccagttttctttggagattaaaaatgaattacatgaacttattgaaaatttcaattataaaatagtgactcacggatcattagcaagtaaatcagatgccgtaatcattaagcatatttttatattgacgccggaacgattgcttaatttgttctcgcaaggcaaggttgttagtatagattatttgtttgtagatgaagcacataaattatcaaataatgatgactcggatgtgcggagccttacagagtataatgctatcgatagtgcattattcaacaatccaaatatgaaaattgttttttcttccccaaatattgaaaatcctgaggtttttttaaatctttttgggcgtgaattaaatatttttctaattcagaatgcatcgatattgaaagtggttctttatatacactcaataaaaaaagtgatttcatttataatatag

SEQ ID NO: 245315 - DNA, 378 bp, Klebsiella pneumoniae
atgaaactgactttaccatttccaccgagcgtaaatagttactggcgcgccccgagcaagggaccgctgaaaggcaggcatctggtaagcgagacagggcgcaagttccagcaggcagcgagagcggcgattattgagcaactgcgagccgttccccggccatcctctgatctggctgaggttcacatagtgttgtatccgccggatcagcgccgtcgggatatcgataactacaacaaagcgctgttcgatgccctgactctaacaggcgtctgggaagacgacagtcaggttaagcgcatgctggtggagtgggggaacatcgtgaagaaagggaaagtagaaatcaccatccgacgttttcgtgcagttgcctga

SEQ ID NO: 245316 - DNA, 318 bp, Klebsiella pneumoniae
atgctgatgtatctgcgtcatgccattgaagcgcacccggaattgtcccgtaaagagacgttcacaccggaaggccttgatgaagccctctatcatggtgccgtactgcgtgtccggccgaaagccatgaccgtggcggtgatcattgcgggtctgctgccaatactctggggaaccggtgcaggttcagaagtcatgagccgtatcgcggcacccatgattggtgggatgatcacggctccgctgctgtccctgttcattattcctgccgcctacaaattaatctggctgcgcagacataaaaaaagcgtgtcctga

SEQ ID NO: 245317 - DNA, 162 bp, Klebsiella pneumoniae
atgggaacaaaagcgcacgatttgtttgtgttgccgctttgcagagcgcatcacgacgagttgcacgctgacaccgtggcatttgaggagaagcacggctcacagctggagctgctgtttcgatttctggatcgttcgctggcaattggcgtgctggcatag

SEQ ID NO: 245318 - DNA, 2694 bp, Klebsiella pneumoniae
atgcatgccgctaaccgtaacgaccttaacctcctgccctcggcggtgatgatctacgatgagcgcgaacgactgcaggcctggaatgataaggtggcgctgttttatccaacgatcgcgccctggctcgccgtcggcgcctctcttgagagcctggcggagaagtttatcgatgccggatataacatcgacccaggccggcaacagacgctgcgcgaggcgattatccgcaactgccgccagacgaaccactgcgaggtccgccagtcgggcaaccgccggatttacgttcagcatcagcggctggcggatggcgggattgtcagcctgcataccgacatcaccgagcttgacgaggcccggcgttcgcgtcatcaactgcatgatgactttttattcaccgcggagtcgatccagatcggcatctgggactggcaggtctccggcgacagcctgcaggtgaatgacaccctgctggcgatggtcggccagtcgcgggcgcagtggcgctttccgctgcgctttatgctcaacctggtccacgaggacgatcgcgccactctgcagcaggcgatgatcgcctcgcaaaacgagcacatgccggtttttgaatgtgagcttcgcgtccagcacccgacgcagggctggcgctggatgctgctctcggggcagatcgtcaccctcaacatgcagcagcaggcagagcgggtgatcggcaccttgcaggatattacccggcgcaaagccgcagagctgctggccattgaggcggcgaaggaggcccgtgaggcgaacgaagcgaaaagcgctttcctcgccaatatgagccacgaaatccgcaccccgatgaacggcattctcggcatgacgcagctctgcctcgacacgccgctgaccgcggagcagcgggagtacctttcgctggtgatgagctcagcccagtcgctgctgcacattatcaatgacattcttgatttttcacgcattgagtcgggcaagatgcaggtggacgtagagccgctggagatccgcccttttgttcagtcgctgatccgcccgcatatgcctgccgccagcgaaaagggcattgagctgctggtggatatctcccctgcggtgcctgaggtgctgatcgtcgatggcccccggctgcggcaaatcctgaccaacctgctgggtaatgccctgaagttcactcatcagggggaggtcctgctggcgatagcgccggccgaggacgaaaaccactggtgctttcgcattcgcgataccggcatcggcattgccccggagaagcaaaaggcgatcttcgaggccttcagccaggccgatagctctaccacccgtcgctacggcggcaccggactggggttaaccatttcggcccgcctggtcagcctgatgggcggtgagctgacggtggagagccagcccggggcaggcagcgaatttgccttcaccctgcagctggaaggcctgaacgccgcggcctccggtagcgccccgctgagccgcttcaatcaccagcgggtgctggtggttgacgacaacagcaccaacctgcgcctgcttgacgccatgcttcgccagatgggactgatgccaacctgcgtgaacaacgctggcgaggcgctacgccgggccgccgaaggcccgccatggcagctgatcctgctggacgcgcagatgccggatatggacggcgtatccctggcgctggagctctccgctttgcctgaagccaggcaaagccagattattatgctcagctccatgagccgtcattttgacgccaatatgcttaagcgcatcggtatcgcccactatctgcataaaccggtggcacagcgcgaactgcatcaggttatcgccggcattctggtgcccacgccggtggtgacgacaacgcctgcccccgttgcgcaaccggtcagggaccagaccgggctaaatatcctgctcgccgaggacaacctggtaaaccagaaggtcgccagacggctgctggagcagttgggtcaccgctgcgaggtggtgaacaacggtcgggaagcgctggagcgctggcgcgcagcctgctgggatcttctgctgatcgatctgcaaatgccggagatggacggtgaaaccgccatccgcctgctgcgggaagagacccaggcgcagggcagacaacatcagcccacgattgccatgaccgcccacgctatgcagggcgatagagaacgctgtctggcgatgggttttgacggctatatcgccaagccggtgagccaggaggcgctacgggaagccatagcccgcgtcggcgcggcggaagatagcgcgccggaggaagaggaaggcctgccggacgaagcccgcctgctgaaacagtgcgccgacgatcctgagcttgtcgaggagttgctgggactcttcgctgaagggcttgacgccgcaacgtcggcccttacccacgccattgacgccaatgaccgggagacgctgcgccgtaccgcccacaagctgcgcggcgaggcggtcaccctcggctttcaacgccttgccggggtgctccagcagctggagagccaggcgacgtcgcccgaccggaccgtcccagatgacctgcgcgacgcgctggccgaggcaaccacaggctgccaccggtggctacatcgcagatcgcaggaggttccccgtgctccatag

SEQ ID NO: 245319 - DNA, 579 bp, Klebsiella pneumoniae
atgatttcaggggctagcccaaatgcaggcaagactttcgtaagttcaaatttagcagcaattatttctcaaacaggtaaaaaagttctcttccttgatgctgacttaagaaaaggttatacgcataagttattcaatgtatctaacgaaaacggtctttcggattatttagcaggaaaagtagatataaaaaattgcgtgaaacaaattaaaacagctggctttgatttcatatccagagggatggtgccgcccaacccagcagaattattaatgcattcaagattccagaatcttctttcatgggcgagtgacaattatgatttagtaattgtagatactccgccgattttggcagtaacagatgcagctattattggcaattatgcaggtactactcttttagtcgcaagatttgaacaaaatacagtaaaagaaatagaagtcagtgcaaagcgctttgaacagagcggagtaatgattaaaggctgtatattaaatggagtggtaaagaaagcaagcagttattatgggtatggttatagccattatggctattcttactccaataaagagtaa

SEQ ID NO: 245320 - DNA, 312 bp, Klebsiella pneumoniae; identical to SEQ ID NO: 229274

SEQ ID NO: 245321 - DNA, 156 bp, Klebsiella pneumoniae
atgaacatttttatttcgaagcaaaatgtgttttttatttttatatttaaaatattgtatatatggcaggttggcgaaaatagtttccggatggttccggctagaaccactaccaaaaagggattgatctacattacaaaatccttttcggtttag

SEQ ID NO: 245322 - DNA, 675 bp, Klebsiella pneumoniae
atgggcacagcaattatggccgctggcactgatgcatcagcgtacgcaaataattatcttccgccggtatctggtcctctggcatgggcaaatctggagagtaacgccctcacagaggcgcgtagactcaagaattggggcaagaacggcggttcctttgcactgtcaggcgtcgcacagcttgtcgctaaaggtattgaggcagcggcagggaccgaaagccgtttgacgctgggtaattttacaccggatgcttacaccctgatcgcactcgttgatgtaggcgcaagcgcaggggttattcggcatcgaaatatccgcatcatgacggatgcaaataaaaaaatttggcgagtgatggatgcagggacaagtttatcgaatatcacggctccagcgaccggagctttcgtcgtattcctcaaaggcgacttaaccggccattctttcggcatggcgacgtcaaccggtgtacagaaggttgactccacagcggtgaacacaaccacaaccgatactttcatcggcggaaactgggaaaacggtactgctgctgcctggaaggcttatggcgctgctttctacgacagaaagctgagcgatagcgagctaatccaagtcgcagaacgcctgatcaagcgcgccaagtatctcggagtgacggtcaatggctaa

SEQ ID NO: 245323 - DNA, 486 bp, Klebsiella pneumoniae
atgacagtcctttcaaaatatataaattacattaacaagagaatcttaagcagagatttaaatcttcagtcatcactggacgttttgtcatacttactgagggttaataaatttagtttacgagatgcagagcgatgttattctcttttactactgtgcaatgcaaatgttgctaatggtttcaaatgggaatatcaggttggtattgcaatcgccgtgtttcttaaactcaaagatgaaactattcttacaaaaataaaagaaagattaattactaaagaacaactcatggaagagttaggcgttacgcaactacctgaagaggaaagctatcatattcttttagcattgaacactgagtatctaacacgcgaaggttatgccaaagcattgagagatggtgatcaaatgatctttcgcgatggttttggtcagcaaccattgaccataactcatgcgattgagcttatttataactttcaataa

SEQ ID NO: 245324 - DNA, 324 bp, Klebsiella pneumoniae
atgagagcgtttaaagaatcgcaatgtaatgcgtttctgaatgcttttggtcaaataatccagacttctacgggaagtacttttactggcattgtagaagtacttcccgtttctattgatagtggtggtggatttatcgaaagcacagaaacatatgtaagtatgaaaaaagaggatttagttactgctaacgtggcacttaattcagtactgataattgatggcattaatcaggttgtctataacattgaagatgatcactccgggatggtgaatgtgttttaccgaacgcaatcagggcaatcatttgcggaggattactaa

SEQ ID NO: 245325 - DNA, 1797 bp, Klebsiella pneumoniae
atggaaataaggaacaagaagagggagctaacgatacccctacaggcgattaatacagaatcgcgaactatcgatgtcgccttttgctcagaaatgccagtagaacgtgaaatcaatggcgaagtctataacgaaattcttttgtgtggctcagaaaacgcagacctacgccgcctgaataacaatggtgcagtactttataaccataatcgtgatgatcttattggtgctgttgtttcggctcaaatggatacagaccgggtaggcagagcgactttaaagattagtactacagcgagtgatatgtgggaaatgatccaggaaggaatcctccagcatatcagtattggctacaacattaatgattatcgaattgaggctaataacatctatgttacgcaatttgaaatctatgaaatcagtttagttactgtacctgctgataccaatgcgggaattggtcgttctctcgaaacaaatgaaaagcctattgaacctgaatcactaaatacaaccagtgaaacaattcaaaaggaagaactcatggaagaacagaacaaatctgttgagacggaaattactcaggaaattgaagttgaaacaccaaaagaacacagtgatgaagaactgttagccattatcgctaatcgtccagaactactaaataaactcacaactgtagaagaaacagtaaatagtaatgaattaaccgaagcagaattagaacgccaacgcgaattaacttccatcggtaaagtactaaatattgatgtgtcggaagccattggtaaaggaattaccgtctccgaatttaaacgtcatttaaatgataacaaaaatcctgttcatgataaggaaatcaaaacaatggaaaaaaatctaattaaggatatggtgcgtgctatcaaaactggtgataaatcagcacttgaagcatatgaacgtggcctaaatggttttgtacgtgccgtagtaccttcaaccaataccagtactgctacgggtctggtcgtcgaagatctacaggatcagtacattccagaactactaaaactatcctcactcggtgaacttaacccgactgtgtacagtggccttgctggtcgtggcaatcttgcgatccctaaagctgatggtgtcgcaccagtattcaaattctatgcagaaggtgaaaccgttgtcgattctatcgcttccttctcaaaagtcgtacttacaccaaaaacatttgctggtgctatccctgtcagtaagacggcgatcctaacggctccaaacattgagacattcgtacaggcagagttactccgctatgccgctcagggtcttgaacaatccgtattcgataagattgctgcggctgctccagttgttgaatctgctgatgctggtgtattaacccaggctgatgtacagggtgctgtagctcaattgggttctgctaatgttgacgttcgtcgttgcaaggctgtgatgaacagtaaaatgctatccaaaatgcgtcagactaaggtactcgataatactgctgctgtagcaatggttgagggattccgtgcagatgcaatgtggctaaatgacgaagtacaggtagtcgtttctgaatttattgaagacgatactattttgattggtcagtttgataatgtcattatcgctaattgggaaggtcaggaagttgattttgacgatactacttatcgttcttctgcaacaattgtataccgcgtttgggattttacagatgtagcaattgcccatgctgatgcattcgtacagctaactatcaaggcataa

SEQ ID NO: 245326 - DNA, 951 bp, Klebsiella pneumoniae
atggtcagtaaatatgccgatgctctttataacttcaatttacagacgttctataataacgaattgggattaccttatgaggatgaatataagaaagaattagacattcttcaacttgaatcgttgcgtgaagatgaatttaaccttcataccattcctgaaagtactttaggcgttacgatagccgtagaccagcaattagatcgtctcgaggctacggtactcggcttcgatgagaagaacatttatgtacttggtcatgagttcttctacggccacgattgtacgaagattgaaagcccggcatggaaagagttagatcaattctgtaggcaggatttcagtactgtatcatgccgcatagttccgacactggcggtattcgtggatagttcgaacggtaacgctactgatacggttaagaagttcacagctcgttgggctaaataccatcccattaagggtagtagttccactactggcgatttgttcaagcaatccacacaggccgggtacaagctacagatcctaaacgtacatgagcagaagaatgcgatacgtaagctactcaatctcatgctaacagaacagggggatcaagcccctgtgcagttacgctttagcagtactctcccttctgattactttgaacaactatctgccgaagaattaaaacccactggtggcaaattagtatggcgattaaagaaagggcagaaacgtaatgaagcccttgattgtctggtctatggaatgatcgcagtagtttatgcacaaagtaaattaggtactcaacctttcagaaaattacgcgaacataaagctaaggcgaacgaaaatactaaatatagcaaggaagctataaataaaaatgaagaaccaacacccacaacgacaaaaccagcaaaacgcaggcgtagtggcatggggagtaattggttcggcaaatga

SEQ ID NO: 245327 - DNA, 1983 bp, Klebsiella pneumoniae; identical to SEQ ID NO: 180223

SEQ ID NO: 245328 - DNA, 222 bp, Klebsiella pneumoniae
atgacaactttttactataaagatgtacccaattatcttataaatagttttgtagccgtaagagattcatttagtaatctagaaaatttattatgtgtagtaaatatcataaatcattgtcaagttcatcgggagagcaatggactggattttgatattgccattttgacctctggtataaaccgtattttagtaaaaaaaatgacggtttttttactatga

SEQ ID NO: 245329 - DNA, 243 bp, Klebsiella pneumoniae; identical to SEQ ID NO: 180221

SEQ ID NO: 245330 - DNA, 297 bp, Klebsiella pneumoniae; identical to SEQ ID NO: 180220

SEQ ID NO: 245331 - DNA, 270 bp, Klebsiella pneumoniae
gtggccaagggacggtatgcgatcggttttcagcaggtgagcgaactgctgccggtgcccggcgtaaccttcgtcggcgaactgccggataacctgcagtacatcacccgctttgccggggcggtgaccatcagcgccgaccacccgcaggaaggcaaggcgctgctgacgtatctggcgtcaccggcggcgcaggagaccatccacgccaccggtatgcgaagcgtagccgccgccgcgccggtcagccagaaggatactgttcaataa

SEQ ID NO: 245332 - DNA, 549 bp, Klebsiella pneumoniae; identical to SEQ ID NO: 149335

SEQ ID NO: 245333 - DNA, 492 bp, Klebsiella pneumoniae; identical to SEQ ID NO: 101052

SEQ ID NO: 245334 - DNA, 645 bp, Klebsiella pneumoniae; identical to SEQ ID NO: 149331

SEQ ID NO: 245335 - DNA, 291 bp, Klebsiella pneumoniae; identical to SEQ ID NO: 101049

SEQ ID NO: 245336 - DNA, 2760 bp, Klebsiella pneumoniae; identical to SEQ ID NO: 149329

SEQ ID NO: 245337 - DNA, 750 bp, Klebsiella pneumoniae; identical to SEQ ID NO: 101027

SEQ ID NO: 245338 - DNA, 930 bp, Klebsiella pneumoniae; identical to SEQ ID NO: 101029

SEQ ID NO: 245339 - DNA, 1212 bp, Klebsiella pneumoniae; identical to SEQ ID NO: 101030

SEQ ID NO: 245340 - DNA, 339 bp, Klebsiella pneumoniae; identical to SEQ ID NO: 101033

SEQ ID NO: 245341 - DNA, 204 bp, Klebsiella pneumoniae; identical to SEQ ID NO: 101034

SEQ ID NO: 245342 - DNA, 336 bp, Klebsiella pneumoniae; identical to SEQ ID NO: 149317

SEQ ID NO: 245343 - DNA, 471 bp, Klebsiella pneumoniae; identical to SEQ ID NO: 101036

SEQ ID NO: 245344 - DNA, 774 bp, Klebsiella pneumoniae; identical to SEQ ID NO: 149315

SEQ ID NO: 245345 - DNA, 657 bp, Klebsiella pneumoniae; identical to SEQ ID NO: 101038

SEQ ID NO: 245346 - DNA, 657 bp, Klebsiella pneumoniae; identical to SEQ ID NO: 101039

SEQ ID NO: 245347 - DNA, 2322 bp, Klebsiella pneumoniae; identical to SEQ ID NO: 101040

SEQ ID NO: 245348 - DNA, 456 bp, Klebsiella pneumoniae; identical to SEQ ID NO: 101042

SEQ ID NO: 245349 - DNA, 270 bp, Klebsiella pneumoniae; identical to SEQ ID NO: 101043

SEQ ID NO: 245350 - DNA, 234 bp, Klebsiella pneumoniae; identical to SEQ ID NO: 101044

SEQ ID NO: 245351 - DNA, 261 bp, Klebsiella pneumoniae; identical to SEQ ID NO: 101045

SEQ ID NO: 245352 - DNA, 903 bp, Klebsiella pneumoniae
atgttcatttctgatgaagtattgcgcatagttcatctggttgcacactatcagagcattgcaacggccgctgaacagctcaataaagtaccttcggcgttaagctatacaataaaaaagctggaagaaagcctcggcgtggagttattcgagcgtaagggacgaaacatcgggctaactccttcaggggagtactttattcaacacagtaaacccattctcaacgatattgattctttatgtcgtaataccacattaatccatactggggttgaacaagaattaacggtagcatttaataatattgtgcctaaaaatattatttcagaatttatttcagaatttgaaaaaacattcgacttaacgcagttaacagtaaacactgaagtttataacggctgctgggacgccatttatcacaatcgtgcggatgtggttgttggcgcccctcactccgtgccatccagtgatggaataataagcgaacatgttggctatatggattgggattttgttgttggtccgcaacattcgctagctactcacattcacccattagaaaacagagagttacgccaatatactgctgtttgcatccgggatacggcgacgaattttatccctctttatgcctggcatcttgagggacaaaaagcagtatttgtacccgatcttgaaatcgctatttcgctgataaaaagtaatactgcgataggataccttccccatcatttagccaggccgctactgaacaatggtagattaataaagaaatctatgcttgagcataagcacgcgacgcagttatttgtggccgcgaaaacggatggtttgggagaggcaggccgctggtgccttgaatactggctgcgtccggatattaaattcaggctgaatggttag

SEQ ID NO: 245353 - DNA, 963 bp, Klebsiella pneumoniae; identical to SEQ ID NO: 97235

SEQ ID NO: 245354 - DNA, 1422 bp, Klebsiella pneumoniae
atgaactcattattttctcagtcacttaatgtgattaacgaaggccttgccagttttgccgataatatcaggcaagccgggggagaggtcactcctttgaactggcagccgcccgctgaaggggatcgttttaccgggctgtccctcgcggggcttattaaccatcccgtcgtggagcgcgccaatcaggtggcaatggggcgctatcttgacgctcagccggtattagtggatgtcctgaccgcggctgtggcgattccggcaatggcggaacaaaaattaattctgcatgccggtccccctatcgcttgggaagagatgtgcgggccggtcaagggtgccattatcggcgcaatattgtttgaaggctgggcggcaagtaaagatgtggcatctcgtttggttcttaatggcgaaattgcccttgctccgtgccaccattacgacgccgttggccctatggccggcgttattagtccttcgatgccgttgtgggtaatcgaaaataaaactaacggcaagcgtgccttcagtaactttaatgaaggcctgggcaaagttttacgctttggggcgaacaatgaagaggtcctggagcgcttaacatggatatcgcaggaattaggcccggtaatgaaagcggcggtgtgccagttgggtgagcttgaactaaaacccataatggctcaggcgttgcatatgggggatgaggtacataaccgtaatgccgccgcgacggggctgctaattaagcgtttatttcccgtgctgctgagatgtaacttaccgaacgtccagcttcagaaggtcgtgtcatttatttctggtaacgatcatttcttcctgaatctttctatggcggcaagtaagtcgatgatggatgccgccgctaatgtaccattcagctcgctagtgactgttatggcacgaaatggcgtcaacttcggtatccggctctcgggccttggtgaccagtggttccaggcgccggccaacccggtagaagggttatttttccctggctatagcgtagaggacgccgcggctgatctgggagatagcgccattactgaaaccgcaggcgtgggcggctttgcgatggcatcttccccggccatcgttaaatttgtgggggggacccccgctgatgcaactgaaaatagccgacgcatgcagtttattaccgtgggctcaaaccctgcgtttactctacctgccctgaacttttcaccgaccgcggccggtatcgacgcgcgtaaagttgtcgatcgcagcatactaccgattatcaacaccggtatcgcccataaggaagccggcgttggccagattggcgccggaatcaccacggctccgatggcctgctttagtgcagcgattcgggctcttgcgcaaaagctcactgaggagaatcccgaatga

SEQ ID NO: 245355 - DNA, 1551 bp, Klebsiella pneumoniae
atgaaagtactacacggtatttttaaaaatctttatcaggattccgtttccctaatgcaggtttccgcaagcatcatcaatttgcctggtattaagcaggcatccgttgtgatgggaagtgagaccaatcttattcaattaagagacgcaaggctgggcgacaatattgctgcaggtcctaacgatcttattattgcgattatgggggaagatgaggcctgcgagcaggcactggcactggcgaaggagaaacttaacagtaagccgcaggctgatacagaagccgggagaaggctggtacagtttaccagcttggctatggcggctgaacaggatccagaggctaatttggcgctgatctccgttcccggcgattatgctgccgccgaggcaatcaaagctattgagctcggtatgcatgtcatgctgtttagtgacaatgtgagtctcgccgaggaaaaagcgatcaaaacccttgctcggcagaaaaatcggttggtgatggggcctgattgcggtacggcgattgttaatgggatcccgctggggtttgctaacgttgtccgcagagggggtattggcattgttggtgcttccggcacggggttgcaggaagtcacctgccgcattgatcaattgggcggagggatttcccaggcgttagggaccggtggccatgatttacacgaggaaattggtggtatcagcatgctgatggggctgaatgccctggcggaagatgatgagacgcaggtgattgtccttatttccaaaccgccagcctatgacgttgcggaaagggttctcacccaagcgcagaaagcaggaaaacccgttgttgtaaactttttaggtgctgcaccgcagagcgttacgcggccaggtgttgttgccgcattaacgctggcagaggccgctgaactggctatgtcgtttgttgcgccagagtccgctcagcaggcgcagtcatcagcatgctgtactgaagatgaatttattcaaaagcaaacgcagattaacggcgccgataattcacgtagatatatacggggcgtttttgcgggcggaacattttgttatgaaagtcagttaatttgccagcgtaatggtataaccgcccattctaatacgccaataaaaggaaacttagcgctaaataatatctggcagagtgaggggcataccttaattgatatgggggatgatgatttcacccgcggccgtccacaccccatgatcgacccgacgctgcgtaatcagcggattatcgctgaaattaacgatccgcaaacggcggttgtgctttttgatcttgttcttggctatggcgcagcaccggagccagccgaagaattactgaaactgctcaatgctaccaacagagcggccagcccgttattaatagcccatgtttgtggaacacagagcgatccacaacagcgtagcgtgcaaattggcgccttgagacgctatggcgttctggttgctgacagcaacgctcaggctacatgctgggccgccagcgcagtaaataatctgggaaataaataa

SEQ ID NO: 245356 - DNA, 879 bp, Klebsiella pneumoniae
atgacatctttaacactgattcccgttacggtcgggtatttggccattgaccgtctgaacgatgccgggaatcaacaaataaatgttcacagctgctttacaaatacgatgaatttattgttgtctgatggtgaattactgatactggcttcggagcacaccggtttaaatcatcctgatactattattgttagcgtaccggcgaactgggattggcgttgtaccgggcgtgcggggattacgttcggtgatggtatattcagcaatccggtttggcaaatggatatacgccatgttaaacgttggcagcaaacagacttatatccattaataatgacggaaactgaaaggaaatatacgtttcttgctgagcaattaaaagtgtacagtcagagatatccgatcaaaagtgcaattatgctgttgcccgataatatggctaaacaggtaaatcgaccattgcgcgaagtaaatatcgccattgaagataatgagcagcagattagccagctggttgacggattaattggttttggtttcggtctgacgcccgatggcgacgattatcttctcggatatctcgcagccatctcttttttgccacaggacattatttcgaggcagcgacgggcgcttaccagaattattatatcgaggctggatcgtaccaatgatattagccagcattatctgaagcgcgcgacggagggccatttttctgaagcgatttgtcagctgctgacgcacctatcggcgcctttttcgccttcgcctcttgcggcggcggcgacagctgtcatgcggtttggcgcctcttccggagtcgattgtctggctggactacttcatggcatacgtgcgtcaacccgcattcattaa

SEQ ID NO: 245357 - DNA, 1305 bp, Klebsiella pneumoniae
atgaataaccactttgtcggaattgatgagaagcccccgtttctatctttgctgttaatggggattcagcacgtgctggtgctgttctcaggtctggtagccgtaccgttggtggtgggcatggcgcttggtctgcccagtacggatattactgttctggtccagggcagcttgattgttagcggtactggtacgctgattcaatgccttggtttaggacatctgggatcccggttgcccatttgcatgggctcggcgtttgtcttcattgcacccagtatcacggtggggtcgcagatggggatccaggccgtgtttggcgcatccatggtgtgcgggtttgtcgcctggatcctcagtttttttattggaagagtgcagaaactgattcctccgctggtgaccggaactattgtttcactgattggtatcaagctgctgccgctgggattcacctggcttgctggtgggcatagtgaactttatggcaagccggtatgttttctgatcggcggcgttgtgctggtggcattactggttgccagccagtcgcgaaaaggcttgttatcatcgttttccgtcattattgccattatgctgggatatgttgtatcggcactgctcggcattcttgacctccaccacgtgcaggatgcttcctgggtctcttttcctgatttgctgcattttggttggccgactttttcgtattcggccattgtcatcatgatgattgctcaacttaccgccgtactggaaagcattggtaatacatacggtacgggagctgcggtacgcagagagatcacgcataagcatttgtctggcgcaatctcagtcgatggtatcggctcgattgtcgcgccgctgcttaacggttttcctctgacctgttttgcccagaatataggggtcatcagtatcactcgcgtggcaagccgctatgtggttgcctcagcgggtgtggttctgattgcacttgggttgattcccaaattttcagctctggtcgcgggaatgccggcaccggtgctcggtggagcgtctctgattatgttcggctctatcgtcgggtcaggcgtcgcccagattaaggattcaggaccgttcgaccagcgagcagccatggttttttcaacctctctcgcactcggactggggtttggcctggcgccgaaagacgcttttgatgccttttcgccatcgctggccgtgctcctggagtcgggtgtggcgattggtggaatggcggcaattatattgaatctggttcttccgcgatcacctgaaccatccgttagctga

SEQ ID NO: 245358 - DNA, 1104 bp, Klebsiella pneumoniae
atgcaaaaagttgaagtgttccgtattccaactgcatcgccggatgatgtatctggtctgaaaaatttgattgagaatggtagtgttgatccacgtgatattattgctgtattgggtaaaactgaaggtaatggttgcgttaacgactttacccgcggttttgcaacgcaaagcctctctatcttcatggctgagcaattagatatgtccgtcagcgccgtacaggagcggatcgcatttgtcatgtcaggcggcacggaaggcgtaatgtcgccccatctgacggtgtttacccgcaaagaggtggatcaacccgcaaaggaaggtaaacgtctggcagccggtattgcctttacccgggattttctcccagaagaaattggcagaatggcgcaggtgaaagaagtcgctgaaggggtgcgtattgcgatgaaagatgctggcattaccgatccgcaggatgttcattttgtgcaaatcaagtgtcctttactgacggcagatcgtattgaggacgccagagtgcgcggtcaaaccgttgctgttcatgatacgtataaatcaatggcctactccagaggggcatccgccctcggcgtcgcgctggccctcggtgaagtgtcagaagatgcgttgaacgataaggtcatttgtcaggactggacgctttattccggtgtggcgtctacttcggcaggtgtggaacttctgaaggatgaaattattgttatcggaaacgctgaaaacacgaccagcgatctgcgcatcgggcatgcggtgatgcaggatgctattgatatcgatgccctgtttgccgctatgcgtgaagccggtcttgaatttgacggtctgccgccgcaggaagagctggatcggatcgtaaatgtgttggccaaggctgaagcaagctccacaggaacggtgcggggaagaagaaatacgatgcaggacgactctgatatcaaccatacccgctcggcccgggccgtggtcaatgcagccattgccgcgattacacgtgacccgctcgtgtatgtctccgggggggctgagcatcaggggccagatggcggcggtcccattagcgtaatcgcgaaagtgtaa

SEQ ID NO: 245359 - DNA, 1236 bp, Klebsiella pneumoniae
atggaaatagtcgtgttattgccattgttggtaatgctgatactcgttttgcgaaataagcatatgattctggcaggactggtgggcggactaaccgcgatgctggttggtggcatcggtttttcgcaggcaagtaagatcgttatgacatcaattcccgggatgacgggaattatcaccccggttatctattctgctgtggcgttggtactggctaaactcggtggttttgaagcgttgctcggtctgagtcgcagagtgtttggccgaaagcaatatctcattgcggcggcgattgtactcactcaggcgttagcaacttatgccgcagggcttggggcgggtaataccatggtaaccgggcctcttgcgctggcgattgtaggtgctgttccacagctgatagcgggcatggcaattgtgactgccgcgagctttattacgtcaccttcaggggccgatgcggccgctatttcaaaaattgccaacattgaaattgcaacctatagcgatacgatgttccccattaccgtctgcttgtggactttgggaatgactatcgctgcattcggcgtctggaaaagcggaagcgtcctgcaggatgaggatacgatgtccgatgttacgctgaaagaacagttaattaaggtcatgcctcccgtatattttctggtagtcgttgtggcaggcaaaaacttgaatgagttattcgattattcgctgtttagcccgatatttaatatgttcagtacgttgatgctgggttttgcagtaacacgtcagtctcccggtaagctggctgaagaactggtacagaactcttctttcctgctaacaaaactattcgcaattggcattttcctcggttttatcaacatactggcggaaattggtacgttcacctatattgctgaatttattaaatcatcacccgcctttgttaccgtacccgtggctgtatttattgctttttgcatctcgattccggcaggaggatacagcgtgggggtcagtaccctggtcatgccgattatggtggagtccgggctttctattacacaaattggtctggcggcacttgctgtaggtgtgggcacgcaaatgagcccggttcaaatcaacgtggcttcactgtcacagtcattcaagctggatattcagcgaattgttaaaattaatgcaccttatatggctggcgttgcggcgatactgtgcatcatgggattcttcttataa

SEQ ID NO: 245360 - DNA, 663 bp, Klebsiella pneumoniae; identical to SEQ ID NO: 101064

SEQ ID NO: 245361 - DNA, 282 bp, Klebsiella pneumoniae; identical to SEQ ID NO: 101063

SEQ ID NO: 245362 - DNA, 978 bp, Klebsiella pneumoniae; identical to SEQ ID NO: 101062

SEQ ID NO: 245363 - DNA, 357 bp, Klebsiella pneumoniae; identical to SEQ ID NO: 101061

SEQ ID NO: 245364 - DNA, 444 bp, Klebsiella pneumoniae; identical to SEQ ID NO: 101060

SEQ ID NO: 245365 - DNA, 903 bp, Klebsiella pneumoniae; identical to SEQ ID NO: 101059

SEQ ID NO: 245366 - DNA, 516 bp, Klebsiella pneumoniae; identical to SEQ ID NO: 101058

SEQ ID NO: 245367 - DNA, 543 bp, Klebsiella pneumoniae; identical to SEQ ID NO: 101057

SEQ ID NO: 245368 - DNA, 267 bp, Klebsiella pneumoniae; identical to SEQ ID NO: 101056

SEQ ID NO: 245369 - DNA, 342 bp, Klebsiella pneumoniae; identical to SEQ ID NO: 101055

SEQ ID NO: 245370 - DNA, 258 bp, Klebsiella pneumoniae; identical to SEQ ID NO: 101054

SEQ ID NO: 245371 - DNA, 756 bp, Klebsiella pneumoniae; identical to SEQ ID NO: 166082

SEQ ID NO: 245372 - DNA, 1500 bp, Klebsiella pneumoniae; identical to SEQ ID NO: 181156

SEQ ID NO: 245373 - DNA, 168 bp, Klebsiella pneumoniae; identical to SEQ ID NO: 192694

SEQ ID NO: 245374 - DNA, 828 bp, Klebsiella pneumoniae
atgaaaacatcaaatataatatatacgttccttggggcttctctgtttattggttttttggtttttattttcaaaatctctatacatttccctaattcgatgaaagatgtgaagataactgactggctgtcagttgcttttaattttattatggcattactagccatctggggagtattgtacgccagaaactggagagaatctttaactgaaagcaaagctctggaggaagccataaatttaaagtatcaagttattatgaaggtctactacgcattttttaccctctctctatcaggaattaaatatcacatcccagatcgtgtaaaaggtcatgtttttgatgattatgatactaaaggattattcaattcattccatgatatgtgcaacaaactggattgcgttagggatgcgttttttgatttgcaggcgtcgcgtgaaaggttggttttctttggctgggacttctgtactgataaaaaaaatgaatttatgaaaattgacacctctgttgatgatctttatatatcacgtattaaacttgaaggtattattaatacagttttgtctggtcatggagtgttttataaagctgaattcagttttccaagggataaacgtaaccaagaaaatacagacttagataatttaataaaaattttaaatgacaacttcgtcacttcggaaagctttggtgaatttgagcacatcctaggtgaaattatggatattaggaattcatctctaaactctataaacgttcttagggatcataatgatacaatgcatgaattaattgagccaataaatagattcagaaaatga

SEQ ID NO: 245375 - DNA, 210 bp, Klebsiella pneumoniae
atgcaacttatcaatcatcgctttacaatttggaatagtatattctttaccacgcacatcaactattactatatcttcaagaaaatatatatcgccttctgttccatttatgagcagatcgttataatctactttaattatttttcgctggttttccttcaatactatttgttcatctactccaccatgataaatcgagtatccttctga

SEQ ID NO: 245376 - DNA, 1200 bp, Klebsiella pneumoniae; identical to SEQ ID NO: 150447

SEQ ID NO: 245377 - DNA, 408 bp, Klebsiella pneumoniae
atgcgtcaatttttagccattgctggccttgctgtgttgctatcaggctgcggtgaaaaaggcgattttgagaaagcgatcaacgcgaaaatttcacaatcaaagctgtgctactcactgcagaacaatgactttgcattcaataaaggttttcctataaaggttaatcatggctaccgttctgcaggatacaatgttagtgatgaaatccttaaaggacttgctgaacaagggttgctcactgtttcacaacaggcaaatggctttagcagtgtcgatgttctggaagtaacagacaaagggcaaaatgttgagttttggaaccgggcagaaggtgcgtgtattggtcatcgtgaagttgatgaagtgaaggaatggactgagccgggcaacggctttgttgaataa

SEQ ID NO: 245378 - DNA, 1149 bp, Klebsiella pneumoniae
atggaaaaaaggaaaacattacaggatgagaaaggaaaactaaataagcgtgtggctgctatgccagaaacgcaacaggaaatactccgtttaagtcgcgatgtcgagtctggccgagctgtatacatgcagttgttgaacagacagcaagaattaaacattgccaaatccagtgccattggaaatgtgagaattatcgacaatgccgttactcagccaaagccaataaaacctaaaaaagccattattgtgcttcttgggataataggtggtggggttgtgtcaattggactggtctttttacaaatcttccttagaagagggattgagtcaccagagcaactagaagaaatcgggattaatgtctatgctagtattcctgtagcagaagccttttctaaacaagcaatgcaggcagcaaaaactattagtgttaaaaagaaagctaatagtgaatattctgctggatttttagctgtagagaaccctgcagatcttgcaatagaagctataaggggattaagaacaagccttcattttgcaatgttagaatcacgcaacaaaatccttatgatatctggtgctagcccgaacgcaggtaagacttttgttagtactaatttagctgcagtaatcgcgcaaactgggaagaaagtactcttcgtcgatgcggatctacgcaaagggtatacgcataaattatttaatgtatcaaacgacaatgggttgtcaggaatactttcaggtacagtaaccgtcgataaggctgttaaacgattgaaagagcctggttttgattttatatcacgaggtatagtacctccaaatccagctgaattattgatgaactcgaagttcaatgaacttttagattgggctaatcacaattacgacttaatcattattgatacgccgcctattctagcagtaactgatgcagcaataattggcaattatgcggggacaacaatgctaattgcaagatttgaattaaatactgcgaaagagattgaagttagttataaacgttttgaacaaagcggcgtgaaagttaaaggatgtattttaaatggagtagttaaaaaagcaagtagttactatagttacgggtacaatcattacggttatagctatacagataaaaaataa

SEQ ID NO: 245379 - DNA, 558 bp, Klebsiella pneumoniae; identical to SEQ ID NO: 145585

SEQ ID NO: 245380 - DNA, 558 bp, Klebsiella pneumoniae; identical to SEQ ID NO: 145585

SEQ ID NO: 245381 - DNA, 147 bp, Klebsiella pneumoniae; identical to SEQ ID NO: 11513

SEQ ID NO: 245382 - DNA, 531 bp, Klebsiella pneumoniae
atgaacatccagtactggtctgtgccgatcacttctctcaatgggcaactgctcggagtggaaatccagccacagatagaaatacatggctgccgggttattgctggggatgtactgaagcggcagctacaccatgaacagatgagcgtcatacgcaggaaagaagagtggttcaggtcaaatggtctgctctgtgctgtcagtactccaatacttcccactgagacggcagactacataaagcactttggcttgcactggctcgatgacgtagggaggcgtggtactacggctgtcgaattgttacacggtgattatgaggtagtacggctaaatagaaggttcagtgatgagttgatcggcagcgtcatgttccccgtactgctacagaacatccatagatgctgtgacaaggtgatcgtacaggtacaggataccaaccatcaccagttgcttaagggatgtggagtttgggcagtacagggcatgtacaagccgatccgcttcgagcactgcgaaaaattactataa

SEQ ID NO: 245383 - DNA, 957 bp, Klebsiella pneumoniae; identical to SEQ ID NO: 11527

SEQ ID NO: 245384 - DNA, 669 bp, Klebsiella pneumoniae
ttggttaatagttttatcgaaccagttattggtactaaaaactctgaaattatgatggacattcatgatttcgccaaacataacatttcaataattgaagaggaatatgaaggtcttgagggaactgggtttgataagtggttgttagatttgacaactacttctctttataatctcttatgcgatatgagtagtaggtttggtacattgagggctatatgtgacagttcaaaaccattaatcacccatcaggaatcattcaatgagatgataggtaatgatgaaattgtgttcgagacctacaataataaaaaagtcccgatcacattcaaactctctgagccgataatcctttctgattctaaagtcacgcatggtattcaaattgctgatgtgatagctgcggccagcatttatgtgcttaataagaaaaaatccaaagaaagatatcacgcaaaatggctaactcatttcgaagatgagattttttattggcaatgttgtgttgttcccacaccagaaaaccttgaccctaaaaatgtcaacagctatttgaatagatatatattgcaagaaattgctgaacgaagcagaaaatcaatacctgttttagatgatattgaaaaggatatcatacgaatttccagaacattagcaatggtgcgttga

SEQ ID NO: 245385 - DNA, 474 bp, Klebsiella pneumoniae
atggaacatgcttataccagtcatatcacatggaccggcaatcagggcacgggtacctcgggttacaaggcttatgcccggacctgggatatcgcggtaaagggaaaagaacccattcattgttcaaatgatccattactgggcggcgatcccggcaaaatgaacccggaagatctcctgctctcttctctctctgcctgtcacatgctgtggtacttacatctggcctcagatgccggcattacggtcatggaatatcaggactcgccggtggcaacgggtgaagtattaaaagggggcgcgggtcgctttatttctgctaccctccggccgaaaatcaccgtattaccaggtaccgatctcgacgccgccgcggcccttcatcagcagatccatcacgtctgttttatcgcccgatcggtcaatttcccggtcagctaccagcctgaatttattatctttaacgcagagtaa

SEQ ID NO: 245386 - DNA, 198 bp, Klebsiella pneumoniae
gtggttccggaaattttgctgaagaccgtgaaaaagcttctgaagcaggtcgtaaaggtggtcagcacagcggcgggaactttaaaaatgatccgcagcgtgcgtctgaagcgggtaaaaaaggcggacaaaacagccacggtggtggccgcaagtccgataattcctaattatccttttccttgcaccctgaagtga

SEQ ID NO: 245387 - DNA, 474 bp, Klebsiella pneumoniae
atgaacaatcaattcacatggcttcacattggtctgggttcttttcatcgcgcgcatcaggcgtggtatctgcatcgtctgatcgcttccggggataagcgctggcgcatcgcggcgggcaatatccgcaacgacgccgagcaggtggtgcaggcgctggcggcgcagggaggacgttacgtgctggagaccgtcagcccggaaggggagcgcgaatatgaagaaatcacctctattcagaaactgctgccgtggcaggcagggctgcagccgctgattaacgaaggggccaatccgcaaacaaaagttatcgcctttaccgtgacggaaggggggtactacctgaacacccgccatcagctggaaaccagcaaccccgatctgcaggccgacctgaaaggcgaatgcaaaaccatttacggcccctcgcacgaattctggaaaagcgcatggcggacaacgccgggccgctga

SEQ ID NO: 245388 - DNA, 1842 bp, Klebsiella pneumoniae
atgaagacaaggtctttttctatttttttgcttaaagttggctacaatgcacagaactcccttaagctgaaccatcaacttatcggtggctttcaggctctaaatctcccacaaggcgcaaccttgtttatttccgatagggttagaacaaccccttggtgggttgactacttctcaattggtggaaatttaaaacaagaaaacaaaggggcattaatttttcttccggtaagagatcgatgttttgctctaacttttggccatatttatcacaacttgctagatgtttcctacgagtatgattttggcttaaaagttactttaaacagccttgaacctaatgagttaaaaagcgctgatatagtcgatcccggagcatcaagaaggaaaagaatgcaagtccctgttatgtctgacttaacctatttagattttgatagtaatagcgagatattaaaaagcctgacaggaaaagtaaaaccacaatatattgatctcttcaaaaatgcgactggttcaaccagcttaaaagttggacttaaagtcgagccagaacaacttaccggattgtgcgaccaactactagatttatattccagtgatgaatacttagagtctttccctaacatacaaaaaataacgccagaaaaagaccctattaaaattaagcgtcttgatgattctcttttagatgctttcattaataaaaacaatgaattagccttatcaatcccggacatcgtggattatagtgataatatttactgctcctttaaaggaaggaaaggcatatccccaatatatactgacattagtcttgaagagttttatgactatttaggagaagttgacttaaatacgttcaatatagacaaaatcaaagatttctcgcttaacctctgcaatgaagaaggtgttataacgaaagcatataacatttacagaagttttatctatgatattcactttgataacgaggaagttgtttaccatctctgcgaaggtgaatggtataaagttgaccaagaatatttgcagagtttgaaagattatatagatgcaaggtgtgaagatagccaacttccctcatatgatcatgacaacattaaggatgacataagaaactatagtgaagagaactataatgaagatgtggcaaacaactcagcatgccatatatgtttagatcagaaagacataagtcccgatggatactcacaaatagaaccatgcgatttaataagttaccaggataattactgtatttttcatcatataaaaatatcttcaagatcatctcaacttagccatcttttcaatcaaggtgtcaattctatagaattactcattttggaaaagagcagcaaagaaaaacttaagtcattaatcgaggaaaatattcaaggtaaagatttggatagtttcaaccgcgtgatagatagtggtaattataaagttgagtttggcataataaccaagaaaccagcggaactgaaatctgaaaacctccctcttttttctaaaataagtttaatgcgaagcttaagaacactttctctttatcgaacagagggtgtggttagttttataaaagatattagcccttctaaagaaggctatagtaaacacccgcgcattacagtgattgtgtctgccggtgcaaatggtaaaaatgaagttattgttgatcacagccaactttttcctcagggaacaaaagtcgcaagatgctcacaagaaataactaacagccctatcggctcgagatttatgattcatgtaaaagctagtgaacacgggaagttaagcacgagccatgcttgggagagcgaacgtctatag

SEQ ID NO: 245389 - DNA, 741 bp, Klebsiella pneumoniae
atggtcgcaaaattaggttttatcgtagatggctcaggctgggatccggccaatatcattggtagtatttaccctcaaccaacggttgcgaacatcggtctactgaatgctgacggggtaaccatgctggcggggtctacaccaacacaaattggttctccagtgatgggtgatggttatcagactctgaatggctataacgcaggatacgataccggcgttgaagatacaccggtaaaaaccatgatggcgcttgttaaaccggtcattagcggctcgctacgttctctggtaatgggatcatatcatggagggaatggcacaccgccggtaccacagggcgatacattcgttattgacccggttaacctgacggccagagcgattggcagtacgacgacaggcgtggcaacgtcgtctctggctttgaccgcagcagacctgacaaagtttatgttgcttgttgcggactattcagcagcaggtgttcagcttcacttgttcagagacggtgctctggtcagcgcaactctggcggcattcacgacaaggtcaattccggcatcaacgatccggctgggtatcggatatgatatttcaaccgtgacgggcggagtgaacgggccggttcaggaatcagcctgggggttgtggtctggtgtgaacctgacgacgacagaaaaaaacagcatgtattcgacgctgagaaacatgttatccgggaagattgcaatcagctaa

SEQ ID NO: 245390 - DNA, 1404 bp, Klebsiella pneumoniae
atgaatgaaaaatcaattgaagaaatgttagctgaaaagcaaataaaagaatttaacaattcaaaatttggtcagttttttaacagccaaaaactaaaagaacaagaactaacatatttaaataataaagcattagatatagttaacgaagaagatttgtttgaaataatgtccttaatacctcaaccttttattactgatgaaaataaaaatgttgatgtattaagtcttatatataataattttttagaacataccgaaataccattaacacttccaattttttcgtttttaagttttttaagtgctttttgtgttaaaaatgaaatcacatatacaattccattgagtgatgaaaaactaccacttgatacttggattacaattttagccccatcaggtagcggaaaatcattttcaaattcacaaatgaaaaaagttattccaaccggaatagatgggaaaaaagttattgaaccaaattttgtaaaaccaaacggccctgcaaaatttattgaagatttatcaaatttaccgactactaaaagtggcgaaaatcaatttgggttttggattgaagatgaagtttcacaaatgtttaaacaagtagaacagattggatctccactttctgaaattaaagaatatttgctcaaagcatacgaccatgaaaaattaaccagaaaaagcaagaaagaatcaatagaaactaaaggcattattttaactttattatttataaacacttttgaaagttatgcgaataatatttcaaatgaatctatgacagatggtttaatgcgtagatttaatttaatatacacggaaaaagatattgaacgagattttaccgattattttttatataacttaaagaaaataagagatgatagattacaagatgaggttgctgatttgtttttttctataaaaccagatcaaaatttcacattttcggataattgttttaaattatatcaaaagtattttaaaatattttggcatagaaaatataaaaatatactcacagataaagaaaacttttacagaacttatatgatgcaaagctggaaatttgctgtattttatcatttgatattaaaaagagaaggaacggaaattcagggagattgtttaatatacggaatgaaaatatcattactttttgctaatagcatgaaaaaattttttgatttcaaaattaaaaaaaatgttccagacaaaaaaatagaaaaaataaaaactgatttaacaaaatatattgtttttttagaaaataaccccgatgcttctttcagagaactttgcagaaaatatacactgaaaaaagttgatgccatagcagtattaaaaagtcttcaatgtgccaatattcaacacaaacttattgaagatttggagtaa

SEQ ID NO: 245391 - DNA, 177 bp, Klebsiella pneumoniae
atgagttatccaaatatttttcactattgcgaaaattgcgaaaaagaaacaacccacttcaatttgcctagtcttttcacagacttatcatttgagtgtgttgaatgtgaaaacgtgatccttcttgaagaaggagcaaaagttacttttataaagtatgaagatgaaaacgaataa

SEQ ID NO: 245392 - DNA, 315 bp, Klebsiella pneumoniae
atgaacagaacagagattacaaaacttatagaacagaatcaacaatcgatcacagagcagatcagcagtatgtcgaaaaccaactcagacaccatagagaaaattttgacacagagcttaaaaaaagacacagcagaaatagaactcgttttaagccaacacagagcaaagaccaaaaaaatgttgagttcagaattaaaaaagcaaatgacagtaaaaatgttagatctgaaatatcagacaataataatgttccttctaggaatgaacctgatattgatttttttcataataataagactatggaggatgtaa

SEQ ID NO: 245393 - DNA, 1164 bp, Klebsiella pneumoniae
atgattaaaatattaatagttgatgacaataaatctagaattgaaaaactaaaatctagcttaactgaactcatcacaaaaaacatgataaggattgatgagaaatatacaagtgacgccgcaaaaatcgcgctcaagttaaatcaatatgattatttaattcttgatgtctttttacctaaaaaggataactatagcccagatgaaagaaatggattaggtcttttaaaacaaataaactcagattctaaattttactctccaaaaaaaatagttggcataactgcatatctgaatgatatatccagatacgaatccgaattcagagaatatgcttcaattatattcgaggctcgacgtaatgatactggatggcttgaatcactcaaaaaaatcattgaaaaagatgttgaatctcaagtaagttataatctcaatgaaaaagatagtgttttaataacggtacatggtataagaacctacgcaccttggcaaaatacaatagaagaacaaataaccaacatatcaaataaatttaaccatatcaaattcaattatggttttctaaatattctttgttttttattccctccgactagatatctatttgcaagaaaaataatccaagacatacgaattacagtagaatcaaataagaataaaagaatttatattatttgtcatagttttggtacctaccttgtatattgtgccttaagtaaactgacacatacggatgcaaaaattgaatgtttaattttttctggtagcgtattaaaacgtactacctcattgaaaaaattaaagcaacattgtaatgcaataataaatgactgtgctgtaagtgattatattttattactatgtaaaatgttagtcattggcttgggcgatgcaggcagaaaagggtttattgagccaaatgatggtgtttttattaaccgttattttaaaggaggacattcaacttacttcgaagataaagatttcatagaaataaactggcttcctttaatttttgacaataaaaatattgcgtcacgagatgaaagaagaaatcatattttttccgatgtaaccaatgctttgcaaaatataattgaatatttaaaaataccaatgtggttatttttttcttttttattgatagcactggtattataa

SEQ ID NO: 245394 - DNA, 450 bp, Klebsiella pneumoniae
atgaaaattcttcttgttgaggatattgaatataagcgtgataaggtgatcggtttactagagtctatttctgccgatgtatcagtagatgtagctaaatcttatgtttcggcagtaaattccgcaaccagtaaaacttatgatcttataatattagatatgagcctacccacttacgataaggggcctaatgaaaatggaggtcgcttcagagtgtacggagggaaagatattattcgcaagttaatgagaggaaaagagcatccagtagttgtggttttaacacaacatacaacttttggcgaaattggtgagcaaaaaaatactgacactctatcacaagagttaaatgctttaatgggatcaaaatttataggcattgtaaaatatgactcaaccaagcctcaatggaaagatgaaataaaaaaagtcgtacaggatttgttatga

SEQ ID NO: 245395 - DNA, 1440 bp, Klebsiella pneumoniae
  misc_feature (1404)..(1413): n is a, c, g, or t
atggattcagacccttcattcacaggcacggacgacttgaagaaggaaagaattgctattatagatctattattaaaagaacacgatgatgcagatttattgaaagagaaagacgaaattatagatgaaatatcattcgaagaaataaaaacaaaatatgagacaggaaaaatatttgtagatatagaaaatttaagacgggcaaagcttgaaagatacagatattattttgatgcacttaaggattcgcttattctcggactagaaccacctgaagattttgctttaattacagacgatgggaatatcacagccattccatctggcgatacaaactctataatccatgaacttctaaaagaactaatctccgattttgttaaaaatgaaaattacggtcttgataaatatttgagtgcagatatacggcatggtgtttttgaaaatcaactcagatcaagtgctgaaaaatcgcaattaataactgatatggatggtactggacagtattcgaaaagcaatttaattattgagacatatccattaattaaccctattataaataacgaaatagggacagcaatagctgatttctcttatcactttgacattgaattggctaaagccaattcctggttcaatgtcaagacaatgctcataagtgaatcacagcaaggtatgattgatttcctcatttctgttgatatgtttaattcatttaaagcagcagtttcaaatcaagcatcttttgagaagttttttgacgcttgtattaacttcatgtgggaaagaacgttcagatgtttgaatgatattaaagagcgattgcattacgaatttaagaggaatattttagatttaattgccactcttaggcatcaaattgatatctatagaagacgtagttccatgagagaaatccaggagaaaattgacctcttggccgaaaacattaataaagaaattgcaacagtctgcgattggttaaatgtacttgagtataacgaggagaaaatatataaaatatcatccgtaatgcaggcatgtaggaaaactttttttaatatacaccattgttctgatgatgctatcgtttttgattcaatgtatcatgatgatgaaccaaaattatcttataaagaagccaagcctctaattacatcaataataacagcgttaaacaatgctatggcctatggtaataaaaaaatctttatcagtattaagcctgaagaaaagtcatggaaaataacgatcaaaaatttgataattgagacaaagaacagaactaccaaccaaattttacaagagattgatgataaaataaaacgaggggataatagtctaaatataaaagaaggcggagctggaatatataaaatatatgatttattatgttcattnnnnnnnnnngttcattaccgcaaagatttaatgtga

SEQ ID NO: 245396 - DNA, 762 bp, Klebsiella pneumoniae
atgacagaatttcaggatgaattttacgataaagtatcaaaaaaatatggattggatcgaattggtgaaaagccaaaaactaggctttcgagaagtgaatatttaaaacaacaacaagaaaaaaccaatgccaatttgatattgaatgagaaaaaagaacaaattaaagatctgaattctattgtagaaaaagcagaaaaagaaggttctaaacatggttataaatttgccatagacgaatttaaaaataaatcgattttggctaaaattagtttttccatgagcaaagaagtaaaatttacgaagagcgaaaatgaaagattaattagaaaaaacaatcgtgaaattaagcgtcaaagacaattgaaagaagaattaaaagaaaaagacaaagaaaaagaacaattgaaaaaagatcacgctttggaactgtcggagcagttccagaaaaacaaagaaacaagcaaaaatttatacctaactctacaaaaaaacgaatttctaaccaaagagaattcccaattgttggaagaaaacaataaatataaaaatgggttggaaaagttaattgagccgattgtgaatgaaaattctaagttgaaatctactgtaaattttttgaataagagagaaaattctaaccaaaatttcttcagcaagttaaaagcgttttatggtgaaaaatataatgattgggtaaaaagtatactcgatcacgaaaaacccaacgtaagcaacgacaagagccttaaacctaaatga

SEQ ID NO: 245397 - DNA, 582 bp, Klebsiella pneumoniae
atgggtaaaattgatccagaagcagaatacaaattaaatccgttcgttttcgaacaggatatttcaattaacattaagaaaaagaaaattgctgtttcgcgtggaacagaacttcatgatgaagaaggtaataatttcacttctacaatttctcaagtccaagaagttgataaagaagaattcatgaaaattttcacagggcagattaaattatacttcgatctatctcaaacagcttttaaattgttttttgtaatcataggtatttatcaaaaggctattggaaaagacgagatttatctctctcttgaagaagctaaggaagaatctttgaaatatgattattcgctttcaaaagctgtttactatcgagctataaaggaattgattgaaaaaaatataattgcgaaaagcactaaaagatatattttctttattaatcctgcggtcgttttcaatggcgatagagctaaatttgttaaagagataaaaatcaaaaaagaaaagatagcaaatgaaaaattgcaatctcaatttgaagaaaagaaaaacggaactgacgacgaatcaattccgttttga

SEQ ID NO: 245398 - DNA, 210 bp, Klebsiella pneumoniae
gtgggcgcgactgtggttctctttgcggtaggcgcccggcggctgattgaaggtccgggtaaagacgcgggtaaaagtctgttgcgaatcaaagccatacttgaggcagatatcgtagacccgctgatcggtgtcgcgcagatcgcgggcggccagcagcagcttcctttcgcgaatatagcgccccaggctctcccctttgtactgtaa

SEQ ID NO: 245399 - DNA, 1401 bp, Klebsiella pneumoniae; identical to SEQ ID NO: 136384

SEQ ID NO: 245400 - DNA, 417 bp, Klebsiella pneumoniae
atgaaatttgatttttcaaactttaaatttgatcctctgaatgtgattgaaactgtaaacagtattatgggggagcgagacactacaaaagagacacaaaaaaaactggatgatttagattatccacatatcaaagatttattgccttttgaagattatgacagttcttcacaactatttatcaacaagggttcaataggattcattattgaatcccaaccattaatcggtggcaatgaagcgcttgtaaaaagtctggattctttactgcaggataaagtacctcgcggtactccactgcaggttatcatggtcagtacccgagcaattactgaacagatcaaatcggggctcaaagatttttcctggaaaggatacagggctgatgagtgtaatgatattaccatgcgttattag

SEQ ID NO: 245401 - DNA, 606 bp, Klebsiella pneumoniae; identical to SEQ ID NO: 53558

SEQ ID NO: 245402 - DNA, 612 bp, Klebsiella pneumoniae; identical to SEQ ID NO: 104074

SEQ ID NO: 245403 - DNA, 351 bp, Klebsiella pneumoniae
gtgaaaaaagagatctcccgcaacccctctttcacgccttcgcctaagctgcgagcacatctgaactcccacagggaaggggtgactgaacggctgaataatatctttgatcgctatgcgcatctggttcgcgcctgtgcccttcctctcgatgacgacgaaacacaggttctgcttaatgttctgaatggctccgttgtggaacccgcctttattgaatatctggctcaggaaattcgggactcggatgattatctggaagggatacccgcagctaaatcactgtacgaaaagtgtcagtcagcgacctatccgcaattgctggccaccgtcgaacgcctggaacgataa

SEQ ID NO: 245404 - DNA, 582 bp, Klebsiella pneumoniae
atgtctactattgcagatttagtctcagcattggcatggccattggcttttgtatggttcgttcagaaatatggtaatgatgttaaagaacttattctccgattatcaaaagtaaagcttggaaatgctgaggctgaattcactttgggattaaaggtggtggaagaattagcaggtgaaacacctttggcggaagcatcaaaagatcttcctgaggaaggtgttgaattttctagacgtatggcgcaattagagcgaattgcagatgtatctcctagagccgcaattatggaatcttggttactaatcgaagaggctgcagggaaagcaggttttgtccagggggcatctgttccacgaataaaccctttgttatttattgactggttggtaaaacaagggaaagttgataattcaaccgctgccttagtcaataaaatgagaaagttacgaaacgaagctagtcatttaaaagatttcgaacttaccaaggatgaagctgaacgatatataaaaatagctgttcagatctcccttcttataatcgatccagacacacctacggcattggaaaatgattga

SEQ ID NO: 245405 - DNA, 525 bp, Klebsiella pneumoniae; identical to SEQ ID NO: 209280

SEQ ID NO: 245406 - DNA, 720 bp, Klebsiella pneumoniae
atgcgtttaataaatttagaaagccacttgttctcgaatagtttgttgtccatacaagctaaagacttgaatgattttattccttcttttttgccacttcagatctatccgcaagaatttaacgaggctatgccaaatggagagttaaaaaaacagtttatgttcatcaatccaatggatggaaaacaaatattatttcaggataataagatttcatttattttaagttttggtgataataggctcacccctgaaaaccttgaagaagaacataataaatttctagatttcattgatggcatcctgtctagagtggaaaatataaggccagataatagtttcaatagactatcttatgtcgttagatatgcagatatagaggaatttgataatgaactacaaagaataaaagaaaatacattatctacgttaagttgggtgaatgttgacaagaaaccaaccgacctaaatatccactatgggtttagagaacaactcgaaggtgagttaattaacaatctcgctaaaattactcttggtttttttcaaacatttactcccggcggtgcaatgaaacaagattgtttcattaaagagatagatatcaatactatagatgagaatcgggacaatcggtttacctacagcacggccaagcaactgattagacaattaaaagttatttctcaccaacgaattattgcccttaattctaaataa

SEQ ID NO: 245407 - DNA, 729 bp, Klebsiella pneumoniae
atgattgatgaaaacatcataaagcaggagcaggaaccagtatttaataagagtcatatgatgctgccttcgaatgcggatttttttcgcgctacaaactttagtaataaaaatttaaggcagttggagtacgcatcaaatattcaggattatatatgtataaatcatcatgtatttaaaaccactattaaatataaagatgttgtttataaaaacagtaattttatcaatgataagcttaatgtagagacaaatttaaaaaatgaagagtctctacttgctgatgatacagcaatattgtttaattatttgaagaacgaaacatttactcctgggtatttatcttcagcagaccgtttcttcgaagataagtttaaatcatccagtatgatttacatcaatgcattacttaataaagtatcaatgctatgctatgtacagtataaaaattatagttatcttcattttttaaacttattaaaaaatgcaactttttatatggagtacgatgatttaaaaatgtatgccgtattatccgttgcaaaaaatgattgtgagatcaaagacttagcgatgtctctgtttgagagctttaattataaaaactcagcttcacttaaagatgccatcgcatgtttagatcatattgatacgacatcctatccttggttgactgaatataaagaggaaattatttcagagcttaaggaagagctaggagagtattaa

SEQ ID NO: 245408 - DNA, 579 bp, Klebsiella pneumoniae
atggctaaattcatcagaaaaattaataagcaaggtgtttggaaaaaagatggcctttctttagacccagataaaatcttggaacaaataccttctgatgtattttcgagatgcatggattctaaagataatactctttccatttgggaagttaatggagatgattgggccgattataacgatgtcatcgctacaattgttagcggctccgatggtccaaatgccacagaccttgtcatacttgaagatgatattgtcaatcaaattgaaatcaagcaagttgacggagatacgccagcatcgcaaagtatgaacaagttgcattatgacttaatcaatttgacacatttcaaaatcggattacttgctaagtatataggcttaaaactagcagaagatcttatcttgcaaaagggaggtaagggcaagccaaaaggatggggggttgttagaataactgagcgtaagctgatagatattatgaaaaaagcgttggataatggttgtattgaaaaggatgcattatccgaacgttggcaaaaacatctctctaaattagagggaagtaaggtggcataa

SEQ ID NO: 245409 - DNA, 1575 bp, Klebsiella pneumoniae
atgttagaaattagagttattgaaagaaatggccatatacccgcactggacaaaaataaagccttcctgcgtgcagataattggaatgattactcctttgtgacaatgttttatcttattgtttttgacgagcatggaaagcgagttgaggttggtaatgtaaaaattggttttttggggcaaaaggaagaaataaccacttactctcgcatagataaaattttcaataaactacctgaaatgttcttttctttaggtgacggcattgattactatattaatattggtaaattaagtgataaatttaaatataagcttcttaatgcactacaggatttagtagtgcagccaaatcgattgtccgatattgaaaatgaaagcgttcttaatagttcgttacttagaagtgttactctttctgagattcatgggcagttcttacgtgtgctaaatggtttgccggaattgtcggactttcattttttatttaacaggaaaaatgcctcgggatttagtgatttaactataccttttatagttaaagtggactctatgccaagcactaatattcatgctcttatcggaaggaacggatgtggcaaaacaagtattttgaacggaatgatagatgcaattactaatccagagagtaatgagtattttttctgcgaaaataaaaaattttccgaatcacgcattccaaaaggatattttcgttcacttatttcagtttcctttagcgcatttgaccctttcaccccccctaaagaacaaccagatcccgcaaaaggcactcaatatttttacatcggactcaaggatgctgttagcaatggtttgaaatctctagatgatcttcgcctcgaatttgttttagcattcattggttgtatgagagcagatagaaaaagacaactttgggtttcagctattcaaaagctcagcagtgatgagaatttttccaatatggaacttatcggtctcatctctaaatatgaagagttaaggcgtaaacaaagtcagatacaggtcgataataaccaatttgccgatttactttataagagtatcgaaaattatcttttacgaatgagttccggacatgcgattgttttattcactatcacaaggctagttgatacggttggtgagaagtcattggttttatttgatgaacctgaggttcatctgcatccgcctttactctctgcttttttacgaacattaagtgatttacttgatgcgcgtaatggtgttgcaataattgctactcattccccagtagtacttcaagaagttcccaaatcctgtgtgtggaaagttttacgctcaagaaaagcgatgaatataatccgtccagatatagaaacatttggcgagaatttgggggttttaacccgtgaagtgtttttacttgaagtaacaaactcgggataccatcatttgttatcacagtcagttaacttaggactttcttataacactatcattgaaaactataaaggacagatagggttagaaggacgaactgttttaaaagcaatgattatgaatagagatgaaggacaaagataa

SEQ ID NO: 245410 - DNA, 891 bp, Klebsiella pneumoniae
atgaaaaggttatctcttccagtaaggtcttataccgaaatgcttaataagtgttcggaaggtatgaagcagataaatgttcgaaacaattttattgaacaccttcctatttttttacaaaatgaacagagatataccgaattaagtgcagcaggtcagctatttacgtacgctagaaagattcctctgacaaatacaacggaggttgttggtacgcttactaaagctaaattagaaaacctttatgagaataatcttcgagataaaaataaaccggctagagaatattatgatgaaatgctggtttcatcaggtgaaaagtgtccattttgtggggatatagggcagacgaaaaacatagatcattttcttccaattgcgcattatcctgagttttcagtaatgcctattaatcttgtaccttcatgtcgtgactgcaacatgggggagaaaggtgaggttttcgcaacggacgaggaacatcaggcgattcacccatatatagataaggatattttttatcgtgagcagtgggtttttgcaaatttcgtacccggtgctgcggatgcaataagttattatgttgaatgtccgatgatttggcggcagaaagataaacttagagctcttcatcatttcacatttttaaatattgctaacagatatcgtttggaagcaggaaagcacttgagtgaaattatcactcagagaaactcgtttgcacacgttataaggcaattcgatccagccgctacgtctcagcagatacagtcgtcatttattgaagcatatctgcaacctgttatagatttaaataatttccccaattactggaaaagagtcatgtatcagtgtttggcaaatgccgatgagtttttcgtggggatctga

SEQ ID NO: 245411 - DNA, 339 bp, Klebsiella pneumoniae
atgagcgccctgcatcagggatcgcgcgataatctgcgcattgcgcccaatctgtgggccggcgtcggactggtgcgcggcggcgcgggtaccgcgctggtgggtaatccgcagcaggtagcggaacgcatccgcgaatatcaggcgctcggcatcagcaactttatcttctccggttacccacatctggaagaagcgcaccgctttgctgagctggtgatgcctctgttgccgctggaaaacggggcctcgtcgaaggcgcgtagcgtgaacaccggtccgtttggcgaaaccatcggcggcgataagcgccctgtgcgccaggtcagcgccagctga

SEQ ID NO: 245412 - DNA, 1233 bp, Klebsiella pneumoniae
atgagcgagttgagctatctggaaaaactgctggatggggctgaggttgagtggaaaacactagagaaagtgcttaaacgaactaaaggcacaaaaataaccgctgggcagatgaaagctcttcacaaagataatgcgccgcttaaaatttttgcaggaggaaaaacagtagcctttgttgactttaaagatattccagagaaagatattaatagagagccatcgatcattgttaaatccagaggtattatcgaattcgagtattacgataaaccattctctcacaaaaatgagatgtggtcatatcactcaaataatgatgcgataagcataaagtatatttattacttcctaaaaataaatgaaggatatttccagaaaattgggggtaaaatgcaaatgccacaaattgcaactcctgatacagataagtttgaagttccaatcccttgcccggataatccggaaaaatctctggccatccagtctgaaatcgtccggattctggatacatttactgcacttaccgctgagcttaccgctgagcttaccatgcgtaaaaaacagtacaactactatcgcgaccagttgctgagttttgatgagggtgaggttgagtggaagacattgggggcgataggtaaatttacttatggatatgctgccaaagcgcagatttctggtgatgctcgcttcgttagaattacagatataaatacaaatgggaaactatctccttttgaaccgatgttcgttgacatatcagctgaaaatgaaaagtacacattaaaaaagaatgatttacttatggccaggactggtgctacgtttggcaagacaatgattttcgaggaagattatccagcaatctatgctggcttcttaatcaagttaagcctggatagagacatcattgaccccaaatactattggcattttgctcaaagtgattatttttgggagcaagctaataagttagtttcaggtggcggacaacctcagttcaatgcaaatgcacttaaacaaatcaaagtacctattccttacccaaatgaagcgggaaaatccctttcggagcaggcacgcattgtttctgtcctggataagtttgatattttagccagttcaatcaccgaaggcctgccccgcgaaatcgagctgcgccagaaacagtacgaatactatcgtgatttgctgttcagcttcccgaagcctgaaattgccagtcactga

SEQ ID NO: 245413 - DNA, 213 bp, Klebsiella pneumoniae
atggctatcactgaaggattttgcgccgatttgtattgcgactgtgatggttgtcagtcagggaaaatccatccgcaggggcaggctgattttattggccggaatatgaccgacatttctcagcaggcgcgcaaagctggctggcgcatcagcaaagaccgtcagcgttgctatgcgccgggccacaaaatttcacggggagccaacaaatga

SEQ ID NO: 245414 - DNA, 219 bp, Klebsiella pneumoniae
atgtttcattgtcctttatgccagcatgccgcacatgcgcgtacaagccgctatatcactgacacgacaaaagagcgttatcaccagtgccagaacgtgaattgcagcgccacgttcatcacttatgagtcggtacagagatacatcgtgaagccgggagaagtccacgccgtgaggccgcacccgttgccgtcagggcagcaaattatgtggatgtaa

SEQ ID NO: 245415 - DNA, 1164 bp, Klebsiella pneumoniae
atgctggatgcactgacatttgatgcaggcagtacgctgacgccggattacatgctgatgctcgacagcagggatattaccggcaatatcagcgaccgtctaatgagcatgactctgacggataaccggggctttgaggctgaccagcttgatattgaactgaacgatgccgacgggcaggtcgggctgccggttcgtggcgctgttctgacggtgtatatcggctggaaaggttttgccctggtatgcaaagggaaatttaccgttgatgaggttgaacaccggggcgcaccggatgtggtcaccatccgcgcccggagtgcagattttcgcgggacgctcaattcccgccgtgaaggctcctggcatgacaccacgctcggtgcgattgttgaggcgatagcctcccgtaacaagctggaagccagtgtcgctccgtcactggccggaattaaaatcccgcacatcgaccagtcgcaggagtctgatgccaaattcctgacccgccttgctgaacgcaacggcggtgaggtgtcggtaaaaatgggaaaattgttgtttctcaaagcggggcagggggtgacggccagcggtaaaaaaatcccgcagattaccatcacccgcagcgacggcgaccgtcatcattttgcgattgctgaccgtggagcctacaccggcgtaacggcaaagtggttacacaccaaagacccgaagccacaaaagcagaaggtaaaactgaaacgcaaaaagaaagagaaacacctgcgcgcactggagcacccgaaagcgaaaccggtcacgcagaagaaagcgccaaaagtaccggaagcgcgcgaaggtgaatacatggccggtgaggctgacaatgtttttgccctgaccacggtatatgccacgaaagcgcaggccatgcgcgccgctcaggcgaagtgggataaactgcaacggggcgttgcggagttctccatcagcctggctaccggtcgggcagatatttacacggaaacaccggttaaggtgtcaggctttaagcgcgtcatagacgagcaggactggacaatcactaaggtgacacattttctgaataatagcggcttcacgacgtccttagagcttgaggtcaggctttctgatgtggagtacgaaacagaagatgatgagtga

SEQ ID NO: 245416 - DNA, 480 bp, Klebsiella pneumoniae
atgatgctcgcgttaggtatgtttgtttttatgcgccagacgctgccacaccagaccatgcagcgtgaatcagattatcgctggccgtcaaattcccgtatcggtaaacgggatgcctttcagtttctcggtgttggcgaggaaaacatcacgcttgccggtgtgctttatcccgaactgaccggcggaaagctgacgatgaccacgctcaggctgatggcagaggaaggtcgggcgtggccgttgctggatggcaccggcatgatttacggcatgtatgtcatcagtaaggtgagtgaaacagggagtattttctttgcagacggcacaccccgaaaaattgattttacgctgtcgctcacccgcgttgacgaatcactggccgcgctttatggcgatatcggtaaacaggcggaatcgctcatcggtaaggctggcagtatggcgactaaattcacaggtatgacgggggcgggataa

SEQ ID NO: 245417 - DNA, 2448 bp, Klebsiella pneumoniae
atgagtaacaatgtaaaattacaggtattgctcagggctgttgaccaggcatcccgcccgtttaaatccatccgcacagcgagcaaatcgctgtcgggggatatccgggaaacacaaaaatcactgcgcgagctgaacggtcaggcatcccgtattgagggatttcgcaagaccagtgcgcagctcgccgtgactggtcatgcacttgaaaaggcaaggcaggaagccgaagcccttgccacacagtttaaaaacaccgaacgtccgacccgtgctcaggcgaaagtgctggaatccgcaaagcgagcggcggaggacttacaggcgaaatataaccgcctgacggattccgttaagcgccagcagcgggaactggccgctgtgggaattaatacccgcaatcttgcacatgatgagcagggactgaaaaaccgtatcagtgaaaccaccgcacagcttaaccggcagcgtgacgcgctggcgcgtgtcagtgcgcaacaggcaaaacttaatgcagtaaaacagcgttatcaggccggaaaggaactggccggaaatatggcctcagtgggcgctgccggtgtggggattgcggcggcgggaacgatggccggagttaagctgctgatgcccggttatgagtttgcgcagaaaaactcagaattacaggctgtgctcggagtggcaaaagactccgccgaaatggccgcgctccgcaaacaggcgcgccagctcggcgacaacaccgccgcctcggcggatgatgcagccggtgcgcagattatcattgcaaaagccggtggggatgttgatgccattcaggcggcaacgccggtcacgctgaatatggcgctggcgaaccgtcgcacgatggaagaaaacgccgccctgttgatggggatgaaatccgcctttcagctttcaaacgataaggtcgctcatatcggggatgttctctccatgacgatgaacaaaaccgccgccgattttgacggcatgagcgatgcgctgacctatgccgcacctgtggcaaaaaatgccggtgtcagcattgaagaaaccgccgcaatggtcggggcgctgcatgatgcaaaaatcacaggctcaatggcggggacgggaagccgtgccgtgttaagtcgcctgcaggcaccaacgggaaaagcatgggatgcactcaaagagcttggcgtaaaaacctcagacagtaaggggaatacccgaccagtatttaccattctgaaagaaatgcaggccagttttgagaaaaaccggctcggtactgcccagcaggctgaatacatgaaaaccattttcggggaggaggccagctcagccgccgccgtgctgatgactgccgcctcaaccggaaagctggacaaactgaccgctgcgtttaaagcctcagacgggaagaccgccgagctggtaaatatcatgcaggacaacctcggcggtgactttaaagagtttcagtccgcttatgaggcggtggggactgacctgtttgaccagcaggaaggcgcactgcgtaagctcacgcagacgtccacaaagtatgtgttaaaactcgacggctggatccagaaaaacaaatcactggcgtcaaccatcggcatcattgtcggtggtgcactggcactgattggtgtcatcggtgccattggcctcgtagcctggccggttatcaccggcatcaatgccatcatcgcggcagcaggcgcaatgggggcaatcttcacgacggttggcagtgctgttatgaccgccatcggagcgattagctggccggttgtggccgtggtggccgccattgtcgccggggcgttgcttatccgtaaatactgggagcctgtcagcgcattctttggcggtgtggtggaagggctgaaagcggcatttgcgccggtgggggaactgttcacgccacttaagccggtgtttgactggctgggcgaaaagttacaggccgcgtggcagtggtttaaaaacctgatcgccccggttaaagccacccaggacaccctgaaccgttgccgtgacacgggcgtcatgttcgggcaggcactggctgacgcgttgatgctgccgcttaatgcgttcaacaaactgcgcagtggtattgactgggtactggaaaaactcggtgttatcaacaaagagtcagacacacttgaccagaccgccgccagaactcatgccgccacgtatggcaccggtggttatattccggcgaccagctcttatgcaggctatcaggcttatcagccggttacggcaccggctggccgctcttatgtggaccagagtaaaaacgaatatcacatcagtctgacgggcggtactgcgccggggactcagctcgaccgccagttacaggatgcgctcgaaaaatacgagcgggataaacgtgcgcgcgcccgtgccagcatgatgcatgacggttaa

SEQ ID NO: 245418 - DNA, 276 bp, Klebsiella pneumoniae
atgaacaaagaaaatgtcattaccctggacaatccggtcaaacgtggtgagcaggttatcgaacaggtcacgctgatgaaacccaatgccgggacgctgcgcggtgtcagtctggcagcggtcgcgaactccgaagtcgatgcactgattaaagtgctgccgcgcatgacggcaccgatgctgaccgagcaggaagtcgccgcgctggaactgcctgaccttgtggcgctggccggtaaggtggtcggttttttgtcgccgaactcggtgcagtga

SEQ ID NO: 245419 - DNA, 519 bp, Klebsiella pneumoniae
atggcaatgccgcgcaaactcaagttaatgaacgtctttctgaacggctacagctatcagggcgtcgcgaagtccgtcacgctgccaaaactgacccgtaagctcgaaaactatcgcggtgcgggaatgaacggcagcgcaccggtagacctcggccttgatgacgatgcgctgtcaatggagtggtcgctcggtggcttcccggattcggttatctgggagctttacgccgcaaccggtgtggatgccgtaccgattcgttttgcaggctcttaccagcgcgacgataccggcgaaacggtggccgtcgaggtggtcatgcgtggacgtcagaaagaaatcgacaccggcgagggcaaacagggagaagacaccgagtcgaaaatctccgtggtctgcacctatttccggctgacgatggacggtaaggagctggtcgaaattgacaccatcaacatgattgagaaggtgaacggcgtcgaccgactggagcaacaccgccgcaatatcggcctgtga

SEQ ID NO: 245420 - DNA, 1191 bp, Klebsiella pneumoniae
atgagtgactatcatcacggcgtgcaggtgctggagattaacgacggcacccgcgtcatttccaccgtatccaccgccattgttggcatggtctgcacggccagcgatgcggatgcggaaaccttccccgtcaataaaccggtgctgattaccaatgtgcagagcgcaattgcaaaggccggtaaaaaaggcacgctggcggcatcgttgcaggccatcgctgaccagtcaaaaccggtcaccgttgtcgtgcgcgtggaagacggaaccggcgacgacgaagaaacgaaactcgcgcagaccgtttccaatatcatcggcaccactgacgaaaacggtcagtacaccggactgaaagccctgctggcggcggagtcggtaaccggtgttaaaccgcgtattctcggtgtgccgggactggataccaaagaggtggctgttgcactggcatccgtctgtcagaagctgcgcgctttcgggtatatcagcgcatggggctgtaaaaccatttccgaggtgaaagcctaccgccagaatttcagccagcgtgagctgatggtcatctggccggatttcctcgcatgggatacggtcaccagtaccaccgccaccgcgtatgccaccgcccgtgcgctgggtctgcgcgctaaaatcgaccaggagcaaggctggcataaaacgctgtccaacgtcggggtaaacggtgttaccggcatcagcgcctctgtattctgggatttgcaggagtccggcaccgatgctgacctgcttaacgagtcaggcgtcactacgctgattcgccgcgacggtttccgattctggggtaaccgtacctgctctgatgacccgctgttcctctttgaaaactacacccgcaccgcgcaggtgctggccgacacgatggctgaggcgcacatgtgggcggtggacaagcccatcaccgcaacgctgattcgcgacatcgttgacggcatcaatgccaaattccgtgagctgaaaacaaacggctatatcgtggatgcgacctgctggttcagtgaagaatccaacgatgcggaaaccctcaaggccggaaaactgtatatcgactacgactataccccggtgcctcctcttgaaaacctgaccctgcgccagcgtattaccgataaatacctggcaaatctggtcacctcggttaacagcaattaa

SEQ ID NO: 245421 - DNA, 594 bp, Klebsiella pneumoniae
atgcttattggctatgtacgcgtgtcaacaaatgaccagaacacggaattgcagcgtaacgcgctggagtgcgcaggatgtgagctgatttttgaggataaaatcagcggcacgaagtccgacaggccggggctgaaaaaactgctcagaacattatcggaaggtgacactctggtagtctggaagctggaccggctggggcgtagtatgcggcatctggtcattctggttgaggagctgcgcgaacgcggcgttaattttcgcagcctgacagatgctattgataccagcacgccgatggggcgttttttctttcatgtgatgggtgccctggctgaaatggagcgagaactcattgtcgagcggacacgcgccggactggaagcggccagagccaaagggcgtattggtggcagacgtccgaagctcaccgcgagtgagtgggaacaggcaggacggttgctggctgcgggtgaatcacgtcaacgcgtggcgctgatttttgatattggcctgtccacgctctataaaaaattcccctcatcagcggcaaagaataaattgtgtcatcccttagccaaccgggacaaatag

SEQ ID NO: 245422 - DNA, 900 bp, Klebsiella pneumoniae
atgaccactatttttcagtcatctacgccagccaataacccaaaactacagtatgccgtgcctgataatctgctgaaagggtatgggactgaggcgggcaccactgacggtgttttccttttccgcctcgatgacaaacgttcgttcccacttcaggccacacccgccagccccgctgatgctgcaattctgaacctggcaaacaatattagcgctcaggcgtcgctgggtggggatgtggcggcgtttacgtggaatgctgcccgtaaatccctgacactgaacagccggagtgccccccgttacctgcaaagtgcgagcaattttatggcgcggtttgatgctgcgacacacccggcaaagaatcaatatttcgcgctaggcatgtatgtgcgtattccatcagatgatgattttgttgcggtgagcaccagctactcaggcatctgcggaacggctgaatctctgacacccgcgaacgagttcggggggattgcattcactaatatcagcggaacaaaagcgatcaatgccattcgcggcactgatgcaggtgcgctgcgcacagtagctgtcccggcgactaatttcctcggcaaagtgtgtctggtcgtcgtctaccgggacgccgcagggatgcacctctatgtcgaagcaaccgacgggacaaaggcgagcgcaatgaccgcgattgcgaacgtgcctgtgcttactacaaacatgacgaccagtagcctcaagtttggtgttaccggtttttattccggtagcctcgtctataaacatgagttttttggcggctggttaatcgacctggaaactatcaccgtttccgatatccctgcgtttgcctctgcggacctggcgcgacagatcgccagagggtgggttgtcggctaa

SEQ ID NO: 245423 - DNA, 996 bp, Klebsiella pneumoniae
atgtctattaaaaagctcgatgatggtcgttatgaagtggacgtcagaccgcagggtgcagatggaaaacgtatcaggcggaaatttaaaactaaaggtgaagctcaagcattcgaacgtcatgtgctggttaactaccacaacaaagagtggctggagaagccagccgaccgccgaactcttacagagttgttaggcagatggtggatatatcacggaaaatcacatgagcgtggaaatattgaacgggggcgtttgacgacaataatcgccaaatttgcagaaatgggagtgtccagagctgaccagttaacaaagaaaacgataactgattatcgagttgtaatgatgaacgatggtctaaaaccagccagcgtaaatcggcatctagcaataatgagcgggatgttcaccaagttaattgacgccggtgaataccactctcacaacccgttccgtgaggttaagcggttacgtgaagctgttacagaaatggcttttttgtccagtgaagagattacgcggctgttatccatgcttgatggtgatgagttaaatgcaactctggtctgcctttctactggtggacgctggagtgaagtgtctaatttgaaagctgaacacatcattaaccagatggttacgtttatgaaaactaaaaacggaaagcgcaggacaattcccgtttcgcaggacctgattaaaaggatcaagaccaaaaattcaggcaggctttttaatgccagttactacaaagtgcgtaacgctctcagggaagtaaaacccgatttacctgacggacaagcagtacatgttttgaggcatacatttgccacacattttataatgaatggaggtaacataatcacattgcagcgcatcctgggtcattctaacattcagcaaactatgacctacgcacactttgcaccggatttcttacaagatgctgtgactcttaacccggtgtcaggaatgtccataatgcgtccataa

SEQ ID NO: 245424 - DNA, 198 bp, Klebsiella pneumoniae
atggccgtgcggcttaaggtggaaaggatgaacgagcctcgttgtattgctcagttattgcgtaacgaaagcccaagggcgattgacttcaccattacccacggtaaggggcgtaagggaatcattatccgcaccaaaaaacagagtccgttaaagaaggctctgacctttctgaaaagccggagggtctggaaatga

SEQ ID NO: 245425 - DNA, 501 bp, Klebsiella pneumoniae
atgacagtgatgacgctcaatcttgttgaaaaacagccagcagctatgcgccggataattggtaagcatctggccgtccctcgctggcaggatacatgcgattattataatcagatgatggaacgtgaacggctaacggtttgcttccatgcgcagttaaaacagcgtcacgcaacgatgcgttttgaagaaatgaacgacgtcgaacgtgaacgactggtatgtgcaattgatgaattgcgtggcgcattctcaaaacgccgtcaggttggcgcaagtgagtatgcatatattagttttttaacagtcagtcagcgccgtactttatttatgcatgccggattgactgaaaaagaatttaaccagccatactggcgaattaatgaagaatcatgttactggcgtgatgctttattccgtgcattacgtgaattattcagtctgtttgagtatgcaccgacaattctgacgtcggtaaaaccagagcaatatctgcattaa

SEQ ID NO: 245426 - DNA, 225 bp, Klebsiella pneumoniae
atgcatacagtttctgaaaatcagtgcggtaaatacgcattactgctgcaacaggccagaaccgaagcacaggccgacgcagcgacgcgcttttcttctcatcttgacgccatgattcgccacatcacaaaggcggagttatcccgcgtggagatagtcgagctgctcagtcaggagtcggaaaaatttcacaatatcggattatctcgcggggaggtgctttga

SEQ ID NO: 245427 - DNA, 303 bp, Klebsiella pneumoniae
atgtcctgttctcattcagttgtattactgaataacgccttaaaaatcgctgttatgaaaaatggcgatttgtctcttattcaactgggtcttgataaagaaaaacgcgaaataactgagtctgttatcgcgatttatcagaacgaattaaatctcctgtctgatgtggtcaatttacttgttaaacgcgctgtatttcacaagcaaatctcctccgtggatgaactgacgaaattaacgacagaaattgccagctattgcgctgatgaatttaaaaaacttaacgacaaaaggagctggtaa

SEQ ID NO: 245428 - DNA, 225 bp, Klebsiella pneumoniae
atgccggacaacgtagattttattcaggaacaacaggctgaattactggagcgccagattaacgcggcaagagtaaaacattgcggtgcttctgcgctggtttgcgaagagtgtgacgcgccaatacctgctgcccgtcgtgctgcttatccgtcagccacgcgttgtgtttcctgtcagtcagtctttgaagcaaaaaacaaacattaccggagaatggcatga

SEQ ID NO: 245429 - DNA, 276 bp, Klebsiella pneumoniae
atgagcattcgtattgaaattggcgaacgttatgtcgttaccagtgacagctttcagtttattctccacgagaaaaagagagcggaaagcggtaaaaacgccggtcaggaatggctggcggtggttggttattacccgaaattaagccagctcgtttccggcctgatgcatcacgatattctgaccggaagcgcaaagtcttttgctgatttaaacgcacaggttgagcaactcagcaggcgttgttcagaggcttttggctcatatggccgttaa

SEQ ID NO: 245430 - DNA, 2289 bp, Klebsiella pneumoniae
atggccgttaaagcctccgggcgttttgtccctccgtcagcatttgccgcaggcaccggtaagacgtttaccggtgcttatgcatggaacgcgccacgcgaggctgtcgggcgcgaaagaccccttacacgtgacgagatgcgtcaggtgcaaggtgttttatccacgattaaccgcctgccttactttttgcgctcgctgtttacttcacgttatgactacatccggcgcaataaaagcccggtgcacgggttttatttcctcacatccacttttcagcgtcgtttatggccgcgcattgagcgtgtgaatcagcgccatgaaatgaacaccgacgcgtcgttgctgtttctggcagagcgtgaccactatgcgcgcctgccgggaatgaatgacaaggagctgaaaaagtttgctgcccgtatctcatcgcagcttttcatgatgtatgaggaactctgcgatgcctgggttgatgcacatggcgaaaaagaatcgctgtttacggatgaggcgcaggctcacctctatggtcatgttgctggcgctgcacgtgctttcaatatttccccgctctactggaaaaaataccgtaaaggacagatgaccacgaggcaggcatattctgccattgcccgtctgtttaacgatgagtggtggactcatcagctcaaaggccagcgtatgcgctggcatgaggcgttactgattgctgtcggggaggtgaataaagaccgttctccttatgccagtaaacatgccattcgtgatgtacgtgcacgccgccaggcaaatctggaatttcttaaatcgtgtgaccttgaaaacagggaaaccggcgagcgcatcgaccttatcagtaaggtgatgggcagtatttctaatcctgaaattcgccggatggagctgatgaacaccattgccggcattgagcgttacgccgccgcagagggtgatgtggggatgtttatcacgctgaccgcgccgtcaaagtatcacccgacacgtcaagtcggaaaaggcgaaagtaaaaccgttcagcttaatcacggctggaacgatgaggcatttaatccaaaggatgcgcagcgttatctctgccgcatctggagcctgatgcgcacggcattcaaggataatgatttacaggtctacggtttgcgagtcgtcgagccacaccacgacggaacgccgcactggcatatgatgcttttttgtaatccacgccagcgtaaccagattatcgaaatcatgcgtcgctatgcgctcaaagaggatggtgacgaaagaggagccgcgcgaaaccgttttcaggcaaagcaccttaaccggggcggtgctgcgggatatatcgcgaaatacatctcaaaaaacatcgatggctatgcactggatggtcagctcgataacgataccggcaggccgctgaaagacactgctgcggctgttaccgcatgggcgtcaacgtggcgcatcccgcaatttaaaacggttggcctgccgacaatgggagcttaccgtgagctacgtaaattgcctcgcggcgtcagcattgctgatgaatttgacgaacgcgtggaggctgcacgcgccgccgcagacagtggcgattttgcgctttatatcagcgcgcagggtggggcaaatgtcccgcgcgattgtcagactgtcagggtcgcccgtagcccgtcggatgacgttaacgagtacgaggaagaagtcgagagagtggtcggcatttacgcgccgcatctcggcgcgcgtcatattcatatcaccagaacgacggactggcgcattgttccgaaagttccggtcgttgagcctttgactttaaaaagcggcatcgccgcgcctcggagtcctgtcaataactgtggaaagcctgccagcagtgatgcttcgttaccggctcccacaccttctgaacacgccgcagcagtgcttaatctggtagatgacggtgttatcgaatggaatgacccggaggttgtgagggcgctcaggggggcattaaaacacggactgagaagaccaaatcgccagcaaagaaacggaagcccgttaaaaccacatgaaatagcgccatcggccagactgacccggtcggaacgaatgcaaattacccgtatccgcgttgaccttgctcagaacggtatcaggcctcagcgatgggagattgaggcgctggcgcgtggggcaaccgtaaattatgacgggaaaaaattcacgtatatggttactaatgagtggttcggatttcgagatgaagagtcatttttcatgtaa

SEQ ID NO: 245431 - DNA, 294 bp, Klebsiella pneumoniae
atgggtattcgaaccctttgggcgaccaagggttcgtggagcagggggctagtgctgttcaatctcatccttatgagggcgaaccatagtgttggagcagacataccgtttgcacactatgggcataaggagcaaatcatgaagaatgataaattaaccaacgaacagcaggcgcagaacaagtcaaacctgaaaaagtgggctggttacgcttggaaattaatcaaatggggtattagactgtttgatttagttactcgagcactggactacttcgaagggggggatgagtaa

SEQ ID NO: 245432 - DNA, 309 bp, Klebsiella pneumoniae; identical to SEQ ID NO: 34420

SEQ ID NO: 245433 - DNA, 897 bp, Klebsiella pneumoniae
atggattcgccattttataaactcaaaagtaaaagaaaactggcgaatttgctttgtgttagtcttgatgatttatactctttgagaaaagatgaaggaaactattccgtttttgagcagctttctaaaaaagggaaagcacgaaaaatacaaaagcctttagaaaaactagaacttgtacatacacgaattgcaagtttgttatcgcggattgctttgccagaatatctgcactcagggaagaagaagtgctctaatgtgacgaatgctaaagctcatcttaataatgaaaagatgatgacaacagatattaaagctttttttccatcaactacaagagggatgatattttcttttttcttttcggtgatgaaaatgtcatctgatgttgctgatgttttgtctcacatatgtacttgtcatgaccgattgccaacaggtagtcgcatcagtatgccgttggcatattttgcaaattcaagaatgtttggtgaaatatatcaactttgccaaaagttacgagttaacatgactgtttatgttgatgatctcactttttcaggtagtaacgtaaatcgattgttctgcgctgtaattcgtaagatcgttaataagcatgggcatgttatacacccaacgaaaacaaaactatatgccagagataagcctaagttggtaactggagttattgtattaggcaatgcattaaaagttaggaatgagcagcattttttgatggctagggaaatagattattggaaaataattaaagacgccgaaaatgcgagagaaacaatcattgccaaaaagctctttggtcgtttgcattcaatgggagtgattgagcaacgttacaaatctaaggtgcttactttaaaggctaatactgcaaattaa

SEQ ID NO: 245434 - DNA, 132 bp, Klebsiella pneumoniae
atggcctcaaataacgacctgagttcccgcgaagtggaaagctacaccgaaaaaatggtcgagcaagccagtaaagatgagcttacggtcgttatcaaacaccttttaaaccacatcagaatgaacaaataa

SEQ ID NO: 245435 - DNA, 1035 bp, Klebsiella pneumoniae
atgagcaagaaaaaagggaaaacaccgcaacctgcggcaaaaaaaatgaccgccagcgccccgaaaatggaggcattcacctttggtgagccggtgccggtactcgaccgccgtgacattctggattacgtcgagtgcatcagtaacggcagatggtatgagccaccggtcagctttaccggtctggcaaaaagcctgcgtgctgccgtgcatcacagctcaccgatttacgtcaaacgtaatattctggcctcgacatttatcccgcatccgtggctttcgcaacaggatttcagccgctttgtgctggattttctggtattcggtaatgcatttctggaaaagcgttacagcaccaccggtaaggtcatcagactggaaacctcaccggcaaaatatacccgccgtggtgtggaagaggatgtttactggtgggtgccgtccttcaacgagccgacagccttcgcacccggctccgtgtttcacctgctggagccggatattaatcaggagctgtacggcctgccggaatatctcagcgcccttaactctgcctggctgaatgagtcggccacgctgttccgccgcaagtattacgaaaacggcgctcatgccggatacatcatgtacgtcaccgatgccgtgcaggatcgcaacgatatcgaaatgctccgcgaaaacatggtgaagtcgaaaggccgcaacaactttaaaaatctgtttctctatgccccacaggggaaagccgacggcatcaaaattatcccgctcagtgaagtggcaacgaaggacgatttttttaatatcaaaaaagccagcgccgctgacctgctggacgcgcaccgcatcccctttcagttgatgggcggcaagccggagaacgtcgggtcactgggcgatattgagaaagtggcaaaggtctttgtccgcaatgagcttatcccgttacaggacaggattcgggaaataaacggctggctcggtcaggaggtcatccgctttaaaaactactcactggacactgacaacggctga

SEQ ID NO: 245436 - DNA, 1773 bp, Klebsiella pneumoniae
atgaccatcaccacagacaccactcttttacacgacccgcgtcgtcaggcggcgctgctgtactggcagggattttccgtgccgcagattgccgccatgttgcagatgaaacgcccgacggtgcagagctggaaacagcgcgacggctgggacagcgttgcccccatcagccgtgtcgaaatgagtctagaagcgcggctgacccagctcatcatcaaaccgcagaaaaccggcggtgacttcaaggaaattgacctgctcggacgccagattgaacgactggcacgggtaaaccgttacagtcagaccggcaacgaggcagaccttaatccgaacgtcgctaaccgcaacaaaggcgggcgtcgcaaaccgaaaaagaattttttcagtgacgaggccatcgaaaagctggagcagattttctttgagcagtctttcgaatatcagttgcactggtatcgcgccgggcttgagcaccgcatccgcgatatcctgaaatcccgccagattggcgcgacgttttatttttcccgcgaggcgctgctgcgcgccctgaaaaccggtcataaccagatttttctgtcggccagtaaaacgcaggcgtatgtgttccgcgaatacatcatcgcctttgcccggctggttgacgttgacctgaccggtgacccgattgtcctgggcaataacggcgcaaaactgatttttctcggcaccaactccaacaccgcgcagagccataacggcgacctgtacgtcgacgagattttctggatcccgaattttcaggtactgcgtaaggtggcatcaggtatggcctcacagagtcacctgcgctcgacctatttctccaccccgtccacgctggcgcacgacgcctacccgttctggtcgggtgaactgttcaaccggggacgcgccagcgccgccgaacgtgtggaaatcgacgtcagtcataacgcccttgccggaggtcttctctgtgcggacggccagtggcggcagattgtcaccattgaggatgccctgaaaggtggctgcacactgttcgacattgagcagctcaaacgtgaaaacagcgccgacgattttaaaaacctgttcatgtgtgaatttgttgacgacaaggcgtcggtgttcccgttcgaggagctgcaacgctgcatggtcgacacgctggaagaatgggaagactatgcgccgtttgccgcgaatccgttcggctcccgcccggtatggattggttacgacccgtcacaccgtggcgacagcgccggatgcgtggtgctggcaccgccggtggtggccggtggcaaattcagaatacttgagcgtcaccagtggaaaggcatggactttgccactcaggcggaatccatccgcaaactcaccgaaaaatacaacgtcgaatacatcggtattgatgccaccggcctcggtgtcggcgtgttccagctcgtgcgctcgttctatcccgccgcgcgcgatatccgctacacgccggaaatgaaaaccgcaatggtgctcaaggcaaaagacgttattcgccgtggctgtctggaatatgacgtcagcgccaccgacatcaccagctcgtttatggctatccgcaagaccatgaccagcagcggacgcagcgccacctatgaggccagccgcagcgaggaagccagccacgccgacctcgcctgggcgaccatgcacgccctgttaaatgagccactcaccgccggtatcagcaccccgctgacatccaccattctggagttttactga

SEQ ID NO: 245437 - DNA, 1074 bp, Klebsiella pneumoniae
atgcgccaggaaacccgctttaaatttaatgcctacctgtcccgtgttgccgaactgaacggcatcgacgccggtgatgtgtcgaaaaaattcaccgttgaaccgtcggtcacccagaccctgatgaacaccatgcaggagtcctctgactttctgacccgcatcaacattgtgccggtcagcgaaatgaaaggggaaaaaattggcatcggtgtcaccggctccatcgccagcaccaccgacaccgccggtggcaccgagcgtcagccgaaggacttctcgaagctggcgtcaaacaagtacgaatgcgaccagattaacttcgatttttatatccgctacaaaacgctggacctgtgggcgcgttatcaggatttccagctccgtgtccgtaacgccattatcaaacgccagtcccttgatttaatcatggccggttttaacggcgtgaggcgtgccgaaacctctgaccgcagcagcaatccgatgctgcaggatgtggcggtcggctggctgcagaaataccgcaatgaagccccggcgcgcgtgatgagcaaggtcactgacgaggaaggtcacacgacctctgaggttatccgcgtgggtaagggcggtgattatgccagccttgacgcactggtgatggatgcgaccaacaacctgattgagccgtggtatcaggaagaccctgaccttgtggtgattgtgggacgtcagctactggcggacaagtattttcccatcgtcaacaaggagcaggacaacagcgaaatgctggccgctgacgtcatcatcagccagaaacgcatcggtaacctgccggcggtacgcgtcccgtacttcccggcggatgcgatgctcatcacgaagctggaaaacctgtccatctactacatggatgacagccatcgccgcgtgattgaggaaaacccgaaactcgaccgcgtggagaactacgagtcaatgaacattgattacgtggtggaagactacgccgccggttgtctggtggaaaaaattaaggtcggtgatttctccacaccggctaaggcgaccgcagagccgggagcgtaa

SEQ ID NO: 245438 - DNA, 744 bp, Klebsiella pneumoniae
atgacgagtcccgcacagcgccacatgatgcgggtctcggcagcgatgaccgcgcagcgggaagccgccccgctgcgacatgcaactgtctatgagcagatgctggttaagctcgccgcagaccagcgcacactgaaagcgatttattcaaaagagctgaaggctgcgaaaaaacgcgaactgctgccgttctggttgccgtgggtgaacggtgtgcttgagcagggcaaaggtgcacaggatgacattctgatgacggtcatgctgtggcgtctggataccggcgatattgccggtgcgctggagattgcccgttatgccctgaagtacggtctgaccatgccgggtaaacaccgccgcaccccgccgtacatgttcaccgaggaggtggcgctcgcggccatgcgcgcccacgctgccggtgagtctgtggatccccgcctgctgacggacaccctcgaactgaccgccacggctgacatgcctgatgaagttcgcgcaaagctgcacaaaatcaccgctctgtttctgcgtgacggtggtgatgccgccggtgcgctggctcacctgcaacgtgcgacacagctcgactgtcaggcaggcgtcaaaaaagagattgaacgactggagcgggagctgaaaccgaagccggagccgcagcccaaagcggccacccgcgccccgcgtaagatccggagcgtgacaccggcaaaacgtggacgcccgaaaaagaaagccagttaa

SEQ ID NO: 245439 - DNA, 510 bp, Klebsiella pneumoniae
atgatgacgctgattattccgcgaaaggaggctcccgtgtccggtgagggtacggtggtcatcccgcaaccggcaggcgacgagccggtgattaaaaacacgttcttttttcccgatatcgacccgaagcgcgtccgggaacgtatgcgccttgagcagaccgtcgcccccgcccgtctgcgtgaggccatcaagtcaggcatggcggagacgaatgcggagctgtacgagtaccgcgaacagaaaattgccgccggttttacgcgtctggcggacgtcccggcggacgacatcgacggtgaaagcatcaaagttttttactacgagcgcgccgtgtgtgcgatggcgaccgcgtcgctttatgaacgttatcgcggtgtggatgccagtgcgaaaggcgacaagaaggccgacagcattgacagcaccattgatgagctgtggcgggatatgcgctgggcagtggcgcgcatccaggacaagccgcgctgcatcgtgagtcaaatctga

SEQ ID NO: 245440 - DNA, 204 bp, Klebsiella pneumoniae
atgaagacctttgcgctacagggcgacacgctcgacgccatttgtgtccggtattacgggcgcactgagggcgtggttgagaccgtgctcgccgcaaatccgggactggctgaactgggtgcggtgctgccacacggcaccgccgtcgaactgcccgacgttcagaccgcgcccgcggctgaaactgtcaatctgtgggagtaa

SEQ ID NO: 245441 - DNA, 282 bp, Klebsiella pneumoniae
atgacagcagaagaaaaaagcgtcctgtcgcttttcatgattggggtgctgattgttgtcggcaaggtgcttgccggtggtgaacccatcaccccgcgtctgtttatcgggcgcatgttgctcggtggttttgtctcgatggttgctggtgttgttctggtgcagtttcctgacctgtcactgcctgcggtgtgcggcatcggctccatgctgggtatcgccggttatcaggtgattgagattgccattcagcgccgctttaagggcagggggaaaccgtaa

SEQ ID NO: 245442 - DNA, 429 bp, Klebsiella pneumoniae
atgaagaaattatccctttcactgatgctgaacgtgtcgctggcgctgatgctggcactgtccctgatttacccgcagagcgtggccgtcagttttgtcgctgcctgggcgattctggcgacggttatctgtgtggttgccggtggtgtcggcgtgtatgccactgagtatgtgctggaacgctacgggcgggagctgccgccggaatcgctggccgtgaagattgtcgcgtcgctgtttttgcagccggtgccgtggcgcagacgggcggcgactctggtggtgatggtggcgacgtttatctcgctggtcgctgccgggtggatttttaccgcgctgatttacctcgtggcgtcggtgttcttccggttgatacgcacggcctgtcgtcagcgttttgaggggcgggaaccatgtcaaagcagatga

SEQ ID NO: 245443 - DNA, 426 bp, Klebsiella pneumoniae
atgtcaaagcagatgattgtgctggttgtgttgttatcactggcggtggccggtctgtttctggcgaagcatgaaaacgccagcctgcgcacctcgctggacagggcgaacaacgtcgccaacgggcagcagacgaccatcaccatgctgaaaaatcagcttcatgttgccctcaccagggcagacaaaaacgagctggcgcaggtggcactgcgtcaggaactggaaaacgccgcgaagcgtgaagcacagcgcgagaaagccatcacgaggttacttaatgaaaacgaagattttcgccgctggtacggcgctggcctgcctgatgctgtgcgccggttgcaccagcgcccggcctgcaccgacgccagtgattgtcgccaacgcctgcccgaaagtgagcctttgcccgatgccgggaagtga

SEQ ID NO: 245444 - DNA, 468 bp, Klebsiella pneumoniae
atgctcaaacccgacagcctgcgcagggcgctgactgatgccgtcacggtgctgaaaaccagtcccgagatgctgcggatattcgttgataacgggagtattgcctccacgctggcgacgtcgttgtcattcgaaaagcgttacacgctcaatgtgattgtgaccgactttaccggtgattttgacctgctcatcgtgccggtgctggcgtggctgcgggaaaatcagcccgacatcatgaccaccgacgcaggccagaaaaagggcttcacgttttatgcagacatcaacaatgacagcagctttgatatcagcatcagcctgatgctgaccgagcgcacgctggtcagtgaggtggacggcgcactgcatgtgaagaatatcccggaacccacgccgccggagccggtcacccgcccggtggagctttatatcaatggcgaactggtgagcaagtgggatgaatga

SEQ ID NO: 245445 - DNA, 453 bp, Klebsiella pneumoniae
atgaatgagtttaagcgttttgaagaccggctgaccggactgattgaatcgctgtcaccgtcagggcgtcggcgactgagcgccgaactggcgaaacgtctgcggcagagtcagcagcgtcgggtgatggctcagaaagccccggacggcacaccctacgcgccacgccagcagcagagcgccagaaaaaagactggtcgtgttaagcgaaaaatgtttgcgaaacttatcaccagtcgttttttgcatatccgcgccagcccggaacaggcatcaatggagttttacggcgggaagtcaccgaaaatcgccagcgtgcatcagttcggtctgtcggaagaaaaccggaaagacggtaagaaaattgattatccggcgcgccctctgctcggctttaccagtgaggatgtgcagatgattgaagagattatcctggctcacctcgaccgttag

SEQ ID NO: 245446 - DNA, 636 bp, Klebsiella pneumoniae
atgaacactctcgcaaatattcaggaactcgcgcgcgcactgcgcaacatgattcgcaccggccttgtcgtcgaagccgaccttaacgccggtcgctgccgtgtgcagaccggcggcatgcgcaccgactggcttcagtggctgacctgtcgtgccgggcgttcgcgcacatggtgggcaccttccgtgggggagcaggtgctgattctggccgtgggcggtgaacttgacacggcgtttgttctgccggggatttattccggcgataaccccgcgccgtctgcgtcggcggatgccctgcatatccgtttccctgacggggcggtgattgagtatgaacccgaaaccagtgcactcacggtaagcggaatcaaaacggccagcgtgacggcttctgattctgttaccgccacggtgccggtggtcgtggtgaaagcatcaacccgcgtcaccctggacacaccggaggtggtctgcactaacaagctgattaccggcacgctggaagtgcagaagggcgggacgatgcgcggcaacattgaacacaccggcggtgaactctcatcaaacgggaaggtactgcatacccacaaacacccaggcgacagcggcggcacaaccgggagtcctctatga

SEQ ID NO: 245447 - DNA, 348 bp, Klebsiella pneumoniae
atgacagcgcgttatctcggaatgaatcgcagtgatggcctgacggtcactgaccttgagcatatcagccagagtatcggcgatatcctgcgtacaccagtcggctcacgggtgatgcgtcgtgattacggctcgttgctggcgtcaatgattgaccagccgcagaccccggcgcttgagttgcagattaaggtcgcctgttacatggcggtgctgaaatgggaaccccgcgtcaccctgtcatccgttaccacggcgcgcagctttgacgggcgaatgacggtcacgttaaccggccagcacaacgacaccggccagccactttcgttaaccatccctgtgagttga

SEQ ID NO: 245448 - DNA, 909 bp, Klebsiella pneumoniae
atgccgattatcgatctgaaccagctacccgcaccggatgtggtcgaggagctggactttgaaaccattcttgccgaacgcaaggcgacactgatttccctttacccggaagaccagcaggaggcggtcgcccgtaccctgacgctggaatccgagcctctcgtcaaactgctggaagaaaacgcttatcgtgagcttatctggcgtcagcgtgtgaatgaggccgcacgggcggtgatgctggcctgtgccgccggtaatgaccttgatgtgattggtgccaattacaacaccacgcgcctgattatcaccccggcagatgattcgactatcccgccgacaccggcagtgatggagtctgacaccgattatcgtctgcgtattcagcaggcgtttgagggcttaagcgtcgccgggtcggtgggagcctatcagtatcatggtcgcagtgctgacgggcgtgtcgcggatatttctgtcaccagtccgtctccggcctgcgttaccatctctgtgctgtcacgtgaaaataacggcgtcgcatccgaagacctgctggctgtggtgcgtaacgcccttaatggcgaggacgtcaggccggtggccgaccgcgtgaccgtgcagtctgccgccatcgttgaataccagataaacgccacgctttacctttaccctggtcccgaaagcgaacccatccgcgctgctgccgtgaaaaaactggaagcgtacatcacggcacagcaccggcttgggcgcgacatccgtctgtctgccatttatgccgctttgcatgtggaaggcgtgcagcgtgtcgaactgactgcacctctggctgacattgtgctcaacagtacgcaggcgtctttctgcaccgaatacagcgtcgtgaccggaggctcggatgagtga

SEQ ID NO: 245449 - DNA, 612 bp, Klebsiella pneumoniae
atgagtgattcgcgactgctgccgaccggctcatcactgcttgaagttgccgccgcaaaagcctgtgcggaaattgaaaaaacgccggtcagtattcgtgagctgtggaacccggatacctgcccggcaaatctgctgccgtggctggcgtggtcattttcggttgaccgctgggatgataagtggccggaagcgacaaaacgcgctgttatccgcgatgcgtatttcattcactgtcataaaggcactataggtgcaatccggcgtgtggtggagccgctcggctatctgattgaggtgagggagtggtggcagctcaacgaggagccggggacgttccgtatcgttgttggcgtgcttgagcagggtattaccgaagaaatgtatcaggagctggagcgcctcgttgctgatgcaaaaccggcaagccgccatctgacaggactggctatcagtttaagtacaaccggcaacatttttgccggtgcgggatgctatcacggcgacgccctgacggtttatccctacaccccggaggccattattgtcggaggggattatttcccggcctcggccattcatttaattgataacctgagagtaaacgcatga

SEQ ID NO: 245450 - DNA, 1272 bp, Klebsiella pneumoniae
atgttcgccctggcagacgtcaactccttctacgccagttgcgagaaggttttcaggccggatttgcgcggcaaacctgtcgtcgttctcagtaacaacgatggctgcgttattgcccggagtgctgaagccaaacggctgggtataaagatgggaaccccctggttccagctcaaagaggcgcagtttcctgaaaaactgtacgttttttccagcaactacgagctctacgcgagcctgagtaaccgtgtggtcgccctgctggaagagctgtcgccccgcgtcgaacaatactcaattgacgaatgtttcctggatgcccggggaattagccactgtatggatctggaggattttggcaggcagctgcgtgggcatgttctcagtggaaccggactgacgatcggtgtcggcttcggcgccacaaaaacactggccaaatcggcgcagtgggcgtcaaaggaatggccacaattcagtggggtgctggcgctgtcgcccgaaaatccacgcagaacggcaaaattactcagcctgcagccggtggaagaaatctggggcgtggggaaccggatagcgaaaaagctgcacgttatggggatcaccactgccctgcagctgtcgctgacgaaccctacatttatccggaaaaacttcaacgtagtgctggagcgcacggtacgtgagctgaacggcgagagttgcatttcgctggaggaagcgccgccgccgaaacagcagattgtctgcagtcgcagcttcgggcagcggatcaccacctacggagaaatgcgccaggccgtctgccagtatgccgagcgcgcggcggaaaagttgcgcggtgagcgacagtactgccggcatatcagcaccttcatcaagacatccccttttgcggttaatgagccgtattacggtaacgtggccacggaaaaactgaacccccctacccgtgacacccgggacattatcgcggcagcggtcaggtctctggacagaatctggctcgatggccaccgctacgcaaaagcggggataatgctcaatgatttcagtccgaacggcgtcgcgcagctgaatctgttcgatgacgtgcagccacggccgcacagcgatgcgctgatgaaggtgctcgacggcattaatcattccggactcgggaaagtctggtttgccggacgggggattgcgccggactggcagatgaaacgggagatgctgtcaccggcatataccacctgctggaaggagctgccggttgcccgtttctga

SEQ ID NO: 245451 - DNA, 324 bp, Klebsiella pneumoniae; identical to SEQ ID NO: 164524

SEQ ID NO: 245452 - DNA, 540 bp, Klebsiella pneumoniae
gtgacaaaaaaaagcgttcctcactgtatcgttcatgcctgcatgaacgggttattcttcctgactacagaattacatcgctccttcagttcatacatcacttttacaacactccttcggcctgtacatcacttttacaacacttttgcatcacttttacatcatttatacatcacttttacatcattccttcagctcatacgtcactttcatcctctgtgccatttgtacatcacccccttcctgaacgtgctgacagcgggttttccggctgcgccggcaacgcttcacggccacgcaataaattgcgtccccgttcaccgttttcggatgggaagaacgccggaaacaggacttcccctggctgaatggtgtgaatttccgcgctatgcacttgcgcgcatactcatgcatgccgtaaaaacagagcctgcgcgtttctggcgggttttcgggtggtttgttgcctgttttaccggtttcccgtcagaaacgccctcagagcctctcaggcggtgcacgcaagggatgttatggtaa

SEQ ID NO: 245453 - DNA, 324 bp, Klebsiella pneumoniae; identical to SEQ ID NO: 164524

SEQ ID NO: 245454 - DNA, 273 bp, Klebsiella pneumoniae
gtggctactgatgcacaaataaaacagattaacgctctcatcaaaaagtatcctgactcgtgctctatttgccagcaggattatgatgaggattacgtgacgtatacggtttttggatacgacaaaaaccggaagatgcaggtaacaacgggttgttgcgctcgaacgcttacagaactggtcttgctgggcgtctgcggatgctttgatcctgatgaacgtgatgagatcatgaaaaatcacccaatggcgaagaagttcttcacaaactaa

SEQ ID NO: 245455 - DNA, 552 bp, Klebsiella pneumoniae; identical to SEQ ID NO: 62425

SEQ ID NO: 245456 - DNA, 192 bp, Klebsiella pneumoniae
atggaatatatatcgaaaatattctcggtcaacgcgtcgtattggttgatgaatatgggaatgtggcaccaaggagtttgcgcgctgcgcgagatggttcgttcggcacagatgcggcaatggtatcaggcaatggccttaattttaactcaggtgggtcccggattgatattacaggtcctgagtttttaa

SEQ ID NO: 245457 - DNA, 2202 bp, Klebsiella pneumoniae
atgatccgtaggcttattctgctactggcattcagccccctgctggcacaggcgagtcagccgctcacctggtcgctggccggaatgtggcgcgtgcatgatgctaacgacagcacattcgacggggttaatgcccctgaacacggctggcgtgcgcttcgggtgcctgccaactggtacagcgccggatacgatcatcagggcgccctgtggtatcggcatgaatttacgcttcctgagcgtgcgccgaataccatggcgaccttagtttttgacggcgtggactattttgccgacgtcacgctcaacggaaaagcgctggctcgtcatgagggctattttcagcgcttcccggtggatgtcagcgacgcgctgcgccgccataatcggctcgcagtccgggtagacagcccttatgaagatcctgaaaaaatctggccgctgcacaaaacgctggtgaaggggatacttaaccaacacgacacccgccccggcggcgcatggtcggttcaggggcaggatgccaattcaggagggatctgggcgccggtaaaactgcatctgagccgcggcgtaacgatagatgacgtgattctacggcctgactggcagaaggggctggaaaacccggttttgcgagtggaaatccgttatcgggcactgacgaccggacctgccactctgtgcctctcagcaatgccggataatttcaacggccagcgcttttatcaggattttccggtcaatctcgcgacaacggacggtaagatgcaaaccctgagcgtcacgctgccgatggacggcgccaggctgtggtggccggtgggctatggccgaccaaacctgtaccgggtgcgcgccaccctcaaggatgagcagggggtaatggacaccaccgtcacccgcacgggcctgcgcaagctggaggaacagccggataacaaaggctggctgattaacgacaggcggctctttatcaaaggcagcaactatatcggttccccgtggctcgggacgatgacgcggaaaaaataccgcagggatttcgaactggtggaagcgatgaacgccaatgcgatccgcgttcacggacacgtggcaggccgcgccctttatgaggtggccgacgagatggggttgatgatctggcaggatgttcccctccagtggggctacgacaacagcgctgcctttgccgacaatgcggtgcgccagacccgtgaaatgattgaacagttcggcaattccccggccattatcgtctggggtggacataacgagccgccctggaactccccgtggatggaaaaacgcttcaccgactggaataaaacgttaaaccaggctctgacgaagcgggtgggcgatgcgctggcggaagacacgtcgcgcatcgtacatcgtttttccgccgtcgaggaacactactgggccggatggtattttggcaccatgcgcgatctgctcgctcccgccaaaaccgggatcatcactgagtttggcgcccaggccctgccgcgactctcaacactgaaaaccatcgtacccacccatctaatatggccgaagagtacagcggcagacgatcccggctggacgtactggaaataccataatttccagcctttccagacctttaaatttgcgaacataccgcgcgggaataacattcaggagatgattgataatactcagaaatatcaggcggatctggtcgccatggcggcggaaagctatcgccgacagcgctttcagccggtgaccgccctcttccactttatgtttgtcgagacctggccctcgatcaactggggcgtggtggattatctgcgtaagccgaaagcgggctactacgcgctacaaagggcttatcaaccgatcctgccctccattgagcccgtaaccgccgtctggcgtcagggaagcaaggcggccttacgactatgggcgatcaacgacacctggtccgcatgtaatgattgccgactgaagtggcaagtgaagcaaaatggacggacacttgccaaaggcgatataacgcggacgctacctccggattcaggcttccaggtaaaggaaattaccgtcacgcccaccaccagacataaagtgaccattgaataccgcattgagaatgacgccggaaaaacgatgggatacaacgtacgccatgagaacgtagaggaaccaatctcacgataa

SEQ ID NO: 245458 - DNA, 2676 bp, Klebsiella pneumoniae
atggggtctccttcttgtttcgatctcaacgtgctgccttctgcggtgatgatttacgatccgggcgaacgcctgctggcatggaatgacaaagtggtgcagttttacccggtgatcgctccgtggcttgccgtcggcgcgcccctcgaaagtcttgcggagaaatttattgatgcgggctacaacatcgaccctgcccgacgccagctcctgcatgaggcaataattcgcaactgccgccagccggatcaccgggaagtccggcagtcgggtagacggcggctctatgttcagcaccagcggctaagcgatggcggcatcatcagcctgcataccgatatcaccgagcttgacgaggcgcagcgctcgcgccaccagttgcacgacaactttttgctgaccgcagagtctatccagataggcatatgggactgggaggtctcccgcgacagcctgcaagtgaacgatacgctgctagcgatggtgggcctgccgcgcgtacagctacgctatccgctgcgctttctgcttaacctgatccatgaagaggatcgcgccaccctgcgccacgcgatgagcgcctccaggcaagatcatatgccggtgtttgagtgcgaaattcgtgtacagcatcccacgcaaggctggcgctggatgttaatctcaggacaagtggtgaccctcaatatgcagcagcaggccgaacgggtgatcggcaccctgcaggatattacccgccgcaaggaggccgaactgctggccatcgaggcggcgaaagtggcccgggaagccaacgaggcaaaaagcgcctttctggccaatatgagccacgaaattcgtaccccgatgaacggtatcctgggcatgactcaactctgtctggacacccagcttaaccccgaacagcgggaatacctttcgctggtcatgagttcagcccagtctctgctgcatatcatcaatgacatcctcgacttctcccgcatcgagtcgggcaaaatgtcgctggatgccgaaccgctggagattcgccccttcgtccaggcgctgatccgcccgcatatgcccgccgccagtgaaaaagggattgagctgctggtggacatcccgccagtggtgccggacgtgctgatagtcgacggcccccggttgcgacaaatcctcaccaatctgctgggcaacgccctgaagtttacccatcaaggcgaggtacttctggccattgagcctgccgacggtgaagagcaatggcgttttcgcgttcgcgacagcggcatcggaataccagttgagaagcaaaaggccatctttgaggccttcagccaggccgacagttctaccacccgccgttacggggggaccggcctggggctgaccatctcggcccgcctggtcagtctgatgggcggtgagctgacggtgcagagcgagcctggcgtgggtagcgaatttggctttactctccccctcgagagccagcagacgctctccacagctgccgcccctgtggcccacttcagcggccaaaaagtactggtggtggatgacaacagcacgaacctgcgcctgcttgataccatgcttcgtcagatgggactggtgccgacctgcgtcaacaacgccagcgaggcgttacggctgacgaccgggagcgaacgctggccgttattcctgctcgatgcgcagatgccggatatggacggcatttcgctcgcgcttgagctttccgccctgccgcaaaccgggcagagcaatatcatcatgctcagctcaatgaaccgccattttgacgccaggatgcttaaacgcatcggcatcgcccactatctgcacaaacccgttgcccagcgtgagctgcaccaggttatcgccagtgtccttgaatccctccccgccgcggcccttgcccctgaccccattgtgacgaccaccgtgccgcagaccgaattacgtattctgctggccgaggataacctggtgaatcagaaagtcgccagacgcctgctggaacagctcgggcaccggtgcgaagtggtcaacaatggccgtgaggcccttgaacgctggcgggaacagccctgggacctcctgcttattgacctgcaaatgcctgagatggatggagaaaccgccatccgcctgctacgcgaagaaacccacgcacaggggcgcagccaccagcccgccatcgcgatgaccgcccacgccatgcagggagataaagagcgctgcctggcgatgggcttcgatggctatatcgccaaaccggtaagccaggagactttgcgcgaagaaatagcccgcgtccgctttgagggagataagggcctgccggacgaagcgcggctattaaaacagtgcgcggacgatccctcgctggtcgatgagctgttgggactgttcggccaggggcttgacggagcaatggcagccatacaacaggccatcgacagcgacgatcgtgaggctctgcgccgggccgcgcataagcttcgcggcgaagcggttaccctcggttttaccgcccttgcagagcgactacagcagcttgagagccaggccccattgctggagcaggccgggattaacattcgacaaggcgaagttagcgaggaggcaaggcgcagtgctgcgtggctacgccgcagaacgcaggaggtaaaacatgatccgtag

SEQ ID NO: 245459 - DNA, 435 bp, Klebsiella pneumoniae
atgaaattttatcgcgatctctttgaggcaagtctcaaccgcgtgttgcccgagaatgacaaaaagcgtttttttgaggctttccgggatacctttattcatatgtccccggaaacagagcggcacttctcccgacgttcaggcgaggagagccagcagatgatctataaaagcttcttcgccatgctcgcggtcgatggcgcgctcttcgtaccggactttcttgagcggctggcgcgcgaacagggcgatgaaggactgcgcctgccgccgcgatttttcgccctctggcgggaagcgatgctcagaaccgttcgcgccagcgatccactctgtgatgaggagatcctcaccgcctgggcgatggcgatagcgcctggtctggagtacgtgcgccgccaggctgagctgcattaccaggtcaggggtgagtaa

SEQ ID NO: 245460 - DNA, 1395 bp, Klebsiella pneumoniae
atgcttaaaaccctagcccgctggctggccgtcgccatcgtcgtactgcttatcgccttcgcgctgttcagtcgcgaaggcgcggggtggcgctggctcactaaaggcggttggcacaccaccgcgcgcatcagcagcctgacgccgcaagagcaggcgtgggcgcacatcgcctggcgctatttcgagaataatacccagccgcaaaccgggctggtcaacggcagcgacaagcagccgcgcgtgaccctgtggcaaatgggcgacaccctgatcgccctgatcgccgccagagagctgggactggtgcaggaagatgaattcgacgcccggctgacgcgcctgctcggtaccctgaatcgcctgacgctcaccgatgtccgcacgccgggaaggctctactccagccagacggcgatgcctgttgatttcagcggccagccgacaaaaagcggctggtcggcaaaagatatggcgcggctaatgctggccctgcggctgaccgccgaacgcgcgccgcagtatcgtgagtatctggataaaatcatcctgcgctggaacttctgtccggtcatagataaagacggggaactgtggtcagcctctgttcagaacggtcagacggtcatacgcgaggagctacggctgggggagagcgaatacgcggccagcgcctttcgcctgtggggattcctgcctcagaaagcgctctctcctccctcgcgcaacgtcattatctatcagcgtagcctcgccgtagatgaccgtgacccgcgtacaacatggcagccgtcgctgttgaccaccctgcccgccatgctgccagggctggagttcggctggcagccgcccggcgtgccgccggaggtacaaaaagcgctgcgcacccgcgcccagggagtatggctgagtcagaaaacgcgctgggagcgtgacaaagtacttaccgcgcgagccgattttacgctgccgcaggccccctggcacgttgaggacaccgtctgggggaacggctacgcctggaacaccattggcgacgacggtcgcgactatccccgactggcgcaggtatccactaaagcggttttcgtcctctggacgctgtggaaaaccgactacaccgatgctctgatggcggtgacaacacatcttaataacccacaacaaggctggtttgaggggcgcgtggaggcgaccggggacgtcaaccggaccctcactctctccaccaacgccatggtgctggaagcacttctctataaacacaacgccggaccgctgtttgaaaacggccttacagatgacaacagctattttgtccaccgcgcgacagacgaatttaacccgccaggcttgtgtctgccaggcgaacgggcagcgagggccgcaccatga

SEQ ID NO: 245461 - DNA, 339 bp, Klebsiella pneumoniae
atgaacattgatacagacaggcagcacaacgtgaatattatgatgccgtcggtacgccgactggacgcctcggtggcggcggcttttaaggatgctatcatccgggagatcggagaggatcgtaaagacctgataatcgatttcagcaagatcgattttatcgacagtagcggtctgggaatgttagtttccctgctgaaaatgatgaacggtagaggtgaaatgacgctgtgcgcgctgaatcccggcattcacaatatgttcaccctgactcgtatggatcgtatcttccgcatctgccaggatcgcgccacggcacttgcactgctgaatcagtga

SEQ ID NO: 245462 - DNA, 420 bp, Klebsiella pneumoniae
gtggctaacgctatttcgcttccggccgccttaacctctgtctcgccgcttgcggcgtggcttgcgcagcaggtggctccgctgtctgtcagcgacgaatggcgctttgcgctcgatctcgccgtttgtgagaccgccaccaatatcattcgccatgcgttacatgaggacggagagcgtcgcttcaccgtggagtttatcgccgctgcctcgggagtgatgctgcgttttaccgatgctggcgatccctttcccgctgattgcctcgcggcggcgcgcgataatcccttgttcgataccgaccctttggctgaaagcggcagaggagtgaaattgattttgtcgtatgtcgacacttttaccgcagaaaacagggaggggaaaaatgtcaccgtccttgaaaaaaggatgtcgggatag

SEQ ID NO: 245463 - DNA, 231 bp, Klebsiella pneumoniae
atgaaacaacgtactactcagagtgtcactgtcacgctggaacgcgatctgatcgccgccgcccgtgctgctggggtgaatatgagccagactctggctgtagcccttgatgccgaactgaaaaagcacgcagccgctcgctggaaagcagaaaatcgtgaaggactggaagcgcttaaccgcttccatgatgagcacgggcacttcagtgatgactacaggacgttctaa

SEQ ID NO: 245464 - DNA, 318 bp, Klebsiella pneumoniae
atgcaattcaccatttatcgcaatccgggtagaagcacgctatatccgctactcatagatgtgacaagcgatatcattggtgcgttgaatacacgcgttgtgatccctttgctacctctggagcgttatcctaaccctgaggtacgtccggtgcgattaaatcccgtactggaactgattgatggtaagcagtacgccttaatgacgcatgaactggcgagcatcccgttaaaggccctgggcgctgagttttgtgatggtagcgtgtatcgtcagactgttaagggggctctggatttcattctggatggtatctga

SEQ ID NO: 245465 - DNA, 207 bp, Klebsiella pneumoniae
atggaaactgaacatgaagctattactattgaattaatcattaagaatggtgttgttacctatgtccgcaaagttcaaaagggagaaattacagcctctttcgatacttttttctggttagcaaaacaggccggttacaaaataatcccaccacaagaaaacactcaagaatcacaagatattctaactttcgcagaagtcgattaa

SEQ ID NO: 245466 - DNA, 1242 bp, Klebsiella pneumoniae
atgggggtcggtttaggccggaatttctggttctacagatgtgctcagattgcgacagcattgggttacagcgcgtcgtcgattgctgctgtctggtggattctgggtgaataccagaagatgatctatgtgtcatacctcattgtcccgccattgatcatttctgctctggcccagccgttgattgcacctgccggtgatcgatacaataagaaattgttgatactgtccggtcttgctctccagttcttaagctatgttaccgttgcttttgttttcatgtctggtggcatgaaattgtcggcactgattgcatttgagcttctgtctgcttcaggccgaattttatttaatgcgggctcaataggcattcttcctcatcttatcccggaaaacaggatcaccgagggtatgaacattacccatcgtgttacctccacgatgtccattattggtggcgtgtctggtggtgcaatggtgactgtatttgggatcgctaattcttttctgtttctggcattctgcatcagtattgcctgcttattctgtgtatgcatgcgctgtcattctcaggccgaccagggggagcatcgtcgagtccgatggctggatgatatcagggaggggcttaactacacggtgagtaacagggtgatctccggattttttatctacagccttattattggccttgcctttgcgccgatgatggtggcctttccttacttgataaaagaaattaaagggctgcctcctttctacgtcggattgcttgcaaccagcatgggggcaggtgtgataaccggatcgtttatttttccccatttacgctcgcgatttgataataagtctctggtttatgtctcctcatcacttttctttctctctctgctgctcatcagtttgtgccatcatgtcatcgtgctttttatcggacaatttatcatagggctatcacggaactggattaacgtggtgattgactctctgttactgattaatttacctgggcatttaaggacacgtgtactgtcgaatctgtcatttttcgccatgatcaatatgccagtggcaatgctgttgtttagctatctgatggatttgatgggggtatataacatcttccttatgctgtcggcactgtgctttattgcaatgctggttattgtctctaaccgggaaatcagacgatttttatctgctgaacccgaagaagccgcagagatgctgatgagtaaatga

SEQ ID NO: 245467 - DNA, 1305 bp, Klebsiella pneumoniae
atgacagcagaaatagcagttttcaatagatctggggtagctctcgctgcagattcagcagtaactacgacgaatggattttcagaaaaaatctacaataacgctgataaactattcgaactttccaaggatcatccagttgcagtaatgatctataataatgctgtattatgtcacgctccttgggaagttcttattaaagcctaccgtaagactttaacttccccccccttaaaaacaataaaagaatatagcgacagttttttctcttttattgagaactgcaacaatataattacatctgaaatgcaaagtgagtatttcaaacaattatatagaaatgcaattttacccgacattctaaataaagttcaaaacgaagatgtaactgctttcttacaatcacaaaacactttcccatcgaatgatcaataccagcagtttatcgaaaacagagcaaatacgctttcatcaaagataagtcacaatagtttctataaagactttgataacaatgacttagtgctggcgaggcagtttgcatcacaatttattgttgaaatttgcagtcagtgtatagttccaattaatgtgaatggccatcccccttatttacaatctttgctagattcattgattgagttgtttgctctttacacatgtaaagaaagtgaccttgagacctattcaggaatagtaattgctggttacggggatgatgaatattatcctgccattcagtctcatcatgtttatggcttattcaataaaaaagtgatgagaccagttaatacacatcaaaataacgctgacagctgtagtggaataatgcctttcgcgcaagatgatgaggtacatacattcatgaaaggatgtagtaaaggtattataaattgcgtgaatgattctttagaaaactctttaactaatcttaagaatgaagttacaaatatcttaacaagtcaaaatccaagcttaacaagaacaattgttgagactgcttttgattcagtaattccgaatcaattagcttataccaaagcaatgattgataatcatgcagcgcagaaccatatacaaaaagttttatcaatactggattcattagccaaagtcgatttgggttatatggcagagtcgcttgtaaacctcacagccttcaagcgcaaagtctcaaatgacagcgatagtgttggcgggcctatagatgttgctgtattatctaaaggagatggatttgtgtggttaaagagaaagcactattttgataaagacttgaattataggttttttagtcgaaactag

SEQ ID NO: 245468 - DNA, 1233 bp, Klebsiella pneumoniae
atgcacggctggacctcacgacagcgtaatgcggcgatagccagttttttaagctggacgctcgatgctttcgactttttcctgttagtttttttactgagcgatatcgcccactcgtttcatgtcgaccttgaggaggtcaccctggcgattctgctgactctggccgtgcggcccgtcggcgcgctaattttcggcagggcggcggagaagtttggtcgcaaaccaatcctgatgctcaacattgtgttcttctcggcttttgagctgctctccgccgccgcgccgtcgttgatgctgtttttcctgctgcgggtgctgtacggcgtggcgatgggcgggatttggggcgtggcctcttcgctggcgatggagacgatccccgaccgctcgcgcggcctgatgtccggcctgttccaggcgggataccccttcggctatttgctggcggccgtcgcctatgggctgctgtttgaacaactcggctggcgcgggatgtttgtcattggcgccgcgccggtgctgctgctgccgtttatctatttctgcgtcgaggagtctccggtttggcaggcggccaggcagaataaagagagtacggccctgctgccggtactgcgtagccactggaagctgtgcctgtacctggtggtgctgatggcggctttcaacttcttctctcacgggacgcaggatctttacccggtctttttgaaagttcagcacggcttcgagcctaaaacggtcagcatcatcgcggtctgctataacatcgcctcgatcattggtggagtgttcttcggttcgctgtcggagaagattggccgacgcaaagcgattatgatcgccgccctgctggcgctgccggtcattccactgtgggctttcgccagcggctcgctggcgctgggggcgggggcgttcctgatgcagtttatggtccagggggcctggggggtgatccccacctggctcaatgaactggtcccggccaacacccgggcggtgctgcccggcttcgtctaccagctgggtaatttgctggcttcggtgaatgccactctccaggcatcaatcgcccagcatcatgggcataactacggcctggcaatggccctggtggccgggacggtggcgattgtcattaccgtcctgaccttttttggtcgcgaaggccgggcgatccaatccgcaggagcgggacatcaccagccgctctccaccagccgttaa

SEQ ID NO: 245469 - DNA, 579 bp, Klebsiella pneumoniae
atggcaattggtgtggatattattgaactgcttgagcagcgtaataaacaaggtgttaaaattgaccgaaaaatttttcttgcggggataaccgaaatgttacgcggcgaacgccgactgtctcaggatgagtttgaacgccatctttccagggcaaatcagcgggttaatgacgctattcagcaagcccttgaaaataagacggctcgcgatagtgaatggctgaaaaactttattaaacaagagggtacgctagctgccgggaaagaagcctggtatcggattatatataccggtaatgagttattaccagaagatgactcgaaaaccgagttaacaatttcgctggtacgtcgtcacactgacggaacgctgattgctgattccgatctatctggcctggtgctgcaagaaaaaattatcgatctgccggtctggttgcaggtggtggtgcaaaaaattcgcctgaatggagaggcagaattagctgtaaaagtaaatgaatatggagatccctgggaacagggaacatatgtcgaacattggaaaattcgagtgattaaacaacaatcaatgtaa

SEQ ID NO: 245470 - DNA, 225 bp, Klebsiella pneumoniae
atgacaggcgtaagcgtctggggctccggtaatggcgataaacagctgtggctcatactgctttctttgttatccccgcttgtggcgtgtttttgtgaactgagcggttttcagggcgagcggatgcgtggcaattcagccctgagtatgcgatgctcagcagttgggtttgcagagggtgatagtctgcaatttgtacagataagttatcacatgattttgtga

SEQ ID NO: 245471 - DNA, 417 bp, Klebsiella pneumoniae; identical to SEQ ID NO: 129284

SEQ ID NO: 245472 - DNA, 2070 bp, Klebsiella pneumoniae
atgaaacgcgccccttttctcaacaagcagtctccggaccgcacgctcgaagtggtgatccttgccggaagcctggcatgggaaacctcacgtgtgtggcgaaaagatcccgaccgggaagatgatgttcctccggtggtactcggcccggatgaactggccgatctgagcaatctgaccattatcaggcccgacacgctctacgttcgggtacttcgcaccggcgatatcagtgaacaagagctgctgaaaattgccgtaaaactggcgcacgcagatgtgcagatggcccggctgatgagccctgacggtgagttgctggaggactggagcggtcaacttgcacgcctgcgacgggaaaggccctttgacatcctgccggagcacttccgcctcgatgaagaggcactgtggtttgacaagctcaccgaacgacgcgacggggagagcgacgtccagacccagcgcatctgttcccctctgcgcgtcaccgccatcacctgcgacagccatgacggcagctatggccgcctgctggaatggcacaccaccaccgggcagttgcggcgctgggccatgccgatggcaatgctcagcggcaacggcgaggagctgcggcgcattctgctggaaaacggcctgacttatatctccacccgccccgccctgcgcagcctgctgtgcgagtacatctcgcggtcactccccgaacgccgggtcacctgcgtggagaaaaccggctggcacaacggcgtgtatgtgctgccgaatgaagttatcggtcccggtggcgacaatgtcattcttcagggtagccactacctgaccggcggctttgcacagtccggtacgctggcggaatggcaggtgcaggttgccgcgctctgtgcaggcaattcacggctggtctttgccgtctgctgtgcgctggccgccccgctgctgcgcctgaccggaacgggtggcggaggctttcatctgcgcggtgagtccaccgacggcaaaaccacggtaatgaaggtggcagcttccgtctgtggcgggacggattactggcactcctggcgggcgaccgggaatgcgctggagggaattgccagccgccataacgacgccctgctgccgctcgatgaactgcgcgaagtggatccgcgtgaggccgggatgattgcctatatgctggcgaacggccagggcaaggggcgcgcccgcaccgacggcgaggtacgcaaccgcaggcactggacgctgctgctgttctccaccggggagctgtcgctggcggaacacaccgaacgcgccggggagcgcctctacgccggaatggatgtgcgcatggtacaaatccccagcgacaccggacagcatggcgcgtttgagcaactacacggctttgccagcggccagcaatttgccgatgccctctgcgaccgggtcgcccgcttccacggcaccgcctttcgtgcgtggctagtcttcctcacccacgaccaggacgacaacatcgcactggcaagagagttacttcgccgctaccagactgccctgatgccggagaacgcaggaaaccaggtgcagcgtatcgtggcccgttttgccctgctggctgtggccggagagatggcgacgctgcacggcattacgggctggcaggaaggcacggcgtatgaggcggtgcagatctgcctgcgcgcctggctgaacgaacgcggccatattgccaaccaggaggatgaaggcgtactggcgcagatcaagcggttcatcaccgcgcaccagtacagccgttttgcctcgtgggatggcccggaccgcccgctgaatatggcaggctttcgccgggtggaaaaagatccgctgacgggtgaggaacacacactgttcttcatcctgcctgagggctggcgggaaatttgccggggcttcagtcccgccagagcggccagattatgtctggaagcagaatgcctgctgtccggcagcgacgggaaataccagtcgcaggttcgcctgccggagatcggcaaagccagggtctaccggctcacctcccgcatcctcagtatctga

SEQ ID NO: 245473 - DNA, 681 bp, Klebsiella pneumoniae; identical to SEQ ID NO: 112614

SEQ ID NO: 245474 - DNA, 513 bp, Klebsiella pneumoniae
atgaaacaaatgatgttaagcgcgtgttttttgctggtggcgggtaacgctttagccgctgacggaaccattcattttaccggaagcattaccgatcaaacctgtaccgtcgataccggctcacaaaatctaccggttgatttaggcaacgtcgcgcagaccgctcttaacggtgcggcagggatgaaggcggcacctacgcgtttcacgctcagcctgagtgattgccctgacaccgtaacgggtgcaaatgtgaaatttgacggtacctctgatggcgtaaaccagaatctgctggcgctggatagcggcaccgggatcgctaccggcgtgggtatcgaaattgccgacagaaatggcaccgcaatcccgctgcatacggcatcgacggattacccgctggcagaaggcaccaattcgctggactttatcgctcgctatgtctctaccggcaccgcggttacaaccgggacggcgaacggtacctcgcagttcaccattaactacaaataa

SEQ ID NO: 245475 - DNA, 282 bp, Klebsiella pneumoniae
atgccaaaaatatctgtcatgggggataaaatgaacgtaacttcaccaaaaatgctggctcaggcactcagaaatgcacgcaagcaacgtaaactgactcaacgcgaagctgccgaaagtatgtgtatgaagcaatcaacggtttctgagtttgagaaccatcccgaggggacccggctagatacgctctttaaactgcttgccgctctggaccttaagcttcaggtcgtaagccggaagggtgaaaaccattcttctgatggctgggaccaggagtggtga

SEQ ID NO: 245476 - DNA, 528 bp, Klebsiella pneumoniae
atggcggctcggggttcaaagaatcaagatattagcacaatggctaaaaagacagctcctttacttccagtgaattaccaactgcttgctgaacttggcgagcggcttaagctggcgcgagtgcgacgtaagctaacagcaaagcaggttgcagagcgggctggtatgtcaccgaggaccctccgttctcttgagtcaggcgaggcaggtgtaacaattggcgcctacttgtccgttatgcaaatattaggacttgaaagagatctgaataaaattgccgccgaggatgagttgggacggcatcttcaggattcccggttaataaataaatcgcatctttcccattcttctgtttcctctcgtgcaaaaatacataccggaaatgagataaaacacgatgcattcggcaagcaaataacggcatcacaagacaaatcagtaaagactgaagtaaaagcaccagtcgtgacatcggcatctcttgctgcactgttaaaaccaatcaagaaacccactaagagtagctga

SEQ ID NO: 245477 - DNA, 1035 bp, Klebsiella pneumoniae
atgattgagtacagacatggcgacattcttcatgccgatactgaagccatcatcaataccgttaactgtgttggtgtgatggggcgcggtatcgcgctgcaatttaagaacgcttaccctgataatttcaaagcctatgcgaaggcctgtaaagctgaacaggttaaacctgggaaaatgtttgtttttgaaactaaccaactaaccggcccgcgttatattgttaatttcccgacaaaacggcattggaaggggaagagtcggattgaggatattgtttcaggactagaagatcttgtgcgtgttgttgaaaactacaatatccgatccatagccatacccccactagggagtggattaggcgggctggaatggcaggatgttaagccgttaattgaatccgctgttaagccgcttaagcaggttcagattgctatctacgatcccaaaggcgctccttcttcagagcgtatggcgcataagacggaagtgccgaagatgacggctggacgtgctgcattgattgaacttatgcagcggtatcttaacggtctactcgatccatttatctcgctacttgagctccataagttgatgtatttcatgcaggaggccggagagccacttcgcctcaagtatcagaaagcgcattacggaccctacgctgagaatttgcgtcatgtgcttaatgctattgaagggcatatgatctccgggtattccgatggcggtgatttaccggagaagcagttaatactggtaccaggggctattgacgaggcccgacaatttctcgcccgacatgaagaaacccagcatcgtttccaacgggtttccgaactggtagagggctttgaatcttcttttggtctggaattgctggcaacggttcactggacaatgaaacatgagtcaataacttcttccgaagaagtgatcaattacatctataactggaatgagcgtaagcagcagttctcaccccgccagatcacactggcaatggatatattgaaaaagaaacagtgggtgtag

SEQ ID NO: 245478 - DNA, 645 bp, Klebsiella pneumoniae
atgcctgtaccagaacgccctaaaatttatcatattttgcatattgatcggttgcgttccgtgattgcagacgggctactttgtgatgaacaaatttcgcagcgtaacaacgctggtactgtaattggtatgaatagcattaagcagcgacgtcttacggagttaacgcttgattgttatccggacttgtatattggacaatgcgtgccgttctacttctgtcctcgttcggttatgttgtacttgattcatcgcggcaatcatcctgatctcggttatcatggtgggcaggatcctgttctgcatttggaagctgatttgtttacggttatggattgggctgaacgaaatcggcagcgttgggcgtttacattgtctaacgccggggcactttatgtcgagtcacgttgtcaaagagatcaactaagcgagttaaactggcaagcaatcaatgcatcgcagtggagtggcaacggtctgaaggagtcgaagcaggcggagtttctggttgaacagcatttcccatggcaactggttgaacgcattggcgtacattcacgatccattcaccaacaggtagctgatattcttcccactgatgggcatcgcccgccgattgagatacaggaagcctggtattactga

SEQ ID NO: 245479 - DNA, 1095 bp, Klebsiella pneumoniae
atggcgaaggtcatacccatcgggcaacccgcaaacgaatctgaacgccaggccattggtttccttcgggatcatctgccagatggctggttgattttccacaacttcgagatgcgccaaggggaggaggtgttcgaaatcgacattgccatcctcgcgcctcacgcgatgtacctggtggatgtcaaaggaacgcgtggcaacatcgatgtgtatggctcaaagtggtatccagaggggaggcaaaaatttcactcccctctggcaaagctgcgcaatcacgctaaggtgatgagcaccttattggctgatagcaataaaggaataatcgagttacgtaaagtgcatgtacatgcggttgtattacttacagcagatgatgcccagttgtatgatcctactggcatcgatagcccggatgtgactgactacaagcgctgcttaaaattctttactgacaagagcaaaatcccgagccaccgtctttctgatattcgtgcttatcactcacatattgacaaagccattcaaggcagagccaaaccaaaatcagcgccccctgtgtttggaagttggcaggttatagaacagctaggtggcacagatcgttataccgagtatcgggcaaagcacaatttattgggtgcgaaggcgggtcaggttcgcctaagagtttatcgcgcagacccctatttagaggaagccgcccgcaaagacgaactgaaaaaaatcagtaatgcttttgtggctgttcagcacatgagtgctcattcgaatgtattggctgtgcgtgacctgattcaatctgacgatggtaatgaaattactttggtggccgatgatatttcaggtcaagcgctgcgtcagcatttaaaaaagcctacttttgcgctcacaacagatcaaaaataccaggtgatcaaaggtgtactttctgcattggatcacgcacatcaacatcaggtcattcatcgaaacctcacaccagatgcgattctcatcactaaagggggtatagcccgcatcaccgatttcgactttgctcgagtaggtaaaaaccgaacgatttcagaaactattgctaatcaaaggtga

SEQ ID NO: 245480 - DNA, 1398 bp, Klebsiella pneumoniae; identical to SEQ ID NO: 112606

SEQ ID NO: 245481 - DNA, 2019 bp, Klebsiella pneumoniae
atgagcgaccaaggcgacataattgaagcacagcaggattccaccgaagagagcggtccggataactttttcatcgacattctgaccggcaacaaggagagggcatcggccaaaaagttgttggtgcagaaaattctgcgccaactcatagaaagctacggttttgatcgaaatgacttggaagtcgattacaatccccagattcctggccaggggcgcaagcgcatcgacatcgccgttttccgccctgatgctgagcacaccaacgactacctgcagcggataatcgtctgcaagaatcagaagaagcgcgacaagctccgttccattgccgaggccgatgccgacctgcacgagctcaaggagttgctggggctgatccccagtgctacgttgggtatgtggacaaacggtcaggaggaattcctgttccatatagagcgcacccgcttcgaggtccgcgccaagccgctgggtgtctggccggcgccaggcgaacgtaccgccgatctcgatcgtgtcggaggtgtcattcaggttagcgccgaggcggaagatctggaagatgctctgctgcgctgccgccagtatctgaaccgtaacttggggctcgatcacaaggattcctttaagcagttggcagttctgatgctggccaagatctttgatgagacccaacctaccggcgatcgcaaattctggatcaggggggacgagcctttcaccgagataggtcaacaggctattgccctgcgcatcaacgaatccattgttgccgccaaggcctggcaaccgaacttgctgactcgtggctgggatctgacgttggaacctcacgaaacagcccgcgtggtgatggagttggcccgctataacttaagcgaaacccagcctcgttaccgcaccggagcctttcgagcggtcgcccgcagtgcgatggacggccgcgagggccgctaccccacgcccctaaacgtggccgaaatggtggtggagatgctcgacccacaacccggcgagcgtgtcatggattgctccagcggaaccggcactttcctagccatggccgccgcgcatatcttcaagaagaaactggctggtctcggcaccacgcctgaagaggccaccaaggaacaaatttgccaggcgcaaaacgaaaccgccgcctgggcggccagcaatgccctgggctgcgacatcgatcccttcctggccgtcgcaagtcgcatgaacctgctgttcaccaccggtaaccctggacgcgtgttccgcatcgatgcccgcacgttcccagaaggtgatctggatggtattgaaactgcccgcccggcaatgcagctgggcagcatggatatggttctgctcaacccctggttctcaacccaagacacggtgaccgatccctctattctggagcgctatgacttgggcaacaactgggagcgtgatgaagaaggtggatttcgcaacactggcaatctgagcaccggtggagtccctcctgaggtgttgtttatcgaacgtgccttgcaatgggtgaaacccggcactggtcgtgtgggcatcctgttgcctgatggcttgttgggtaaccctggtgatgaatacgtgcgctggtggattctgcaccacagcgaggtcttggcatcggttgacctgccggtggagcctttcaaggtcacggtgaaggaatatggtttatcacccgcactaccgagtttattgatcctccgccgccgcagtcaggaggaactgatcaataccgaacaccaggaatatagggtgttcatggctgtagtggatcgagccggagttgatgcccgaggtaatctcctgttccagcgggcccccaatggtgaagagctggtttttgatgacgaagtgatcgaacgggttcgtgaaggcggcgaagtggaaatccgtagagtcacgcgtcgcaaccgccgcattcatgacgagctaccactggtggcagaaaaatacaaggaattccgtgcaaccagtgaggtgacattatga

SEQ ID NO: 245482 - DNA, 633 bp, Klebsiella pneumoniae; identical to SEQ ID NO: 112611

SEQ ID NO: 245483 - DNA, 255 bp, Klebsiella pneumoniae
atgagtctggtatgcttcgatctttatatcaatgctttttttgtttatgtgactgcaaaaatcattagcatttttagttataaattcataaaaatttgccatgttggtttgcagataatttcttttaaaaccatagttcctatcatcgttatcatgaatgttcctgcgtccctttccatttatgctattggaaaaatttggtttgtgaataacacagtatttattttgaatatcattttcatattggatgaatga

SEQ ID NO: 245484 - DNA, 1119 bp, Klebsiella pneumoniae; identical to SEQ ID NO: 112619

SEQ ID NO: 245485 - DNA, 309 bp, Klebsiella pneumoniae
atgcgacatagtccattatttctgttactgacttttcccatatggtctctggcctatgcctccccggaatccacccaactcgccctcgcgctgaaacaactcgacggcgtgaaaacctcgctggagcgtgcccaaaccagctccagcaccgatccacaatcgcgctatttcttcgactacttacaggcgcagcaggacatctccgccgttgaacagggcatccgccgctaccttagcccggcgagagcgcagccgcgcgccgtccagtccctgagcgctagctaccagcgggagaactccgatgactga

SEQ ID NO: 245486 - DNA, 669 bp, Klebsiella pneumoniae
atgggcaatcaggctgccgagcgcggtttcctgcaccagggcaatcagcagcgagacaaaggccataaacgggataacgttgcgcagggacacgtccaccgcttcacggctggcggcgaacagcagggcgataatgtgtccgacggcggcgccggtctgctcgaccatacgcaccagtttctccgcacctcgtggagacggcggtgtactgataacccgtggcgcaggctcctgagtcgtttcaggctctccgtcctgggcttcggcggtatccaccagaaccagttgctccagcgtgacgccggaaacgtagttatcctcgctaataaactgcgccagcggcccggcgcgccaggtgggcaggacgttgatggtcggaatacctttctgcggatacaggccgcatctcagcgacccggcgcagttaattaccacgcacaggatgtcgttatccggtgggatatcggcaaaaccgttgaccacttccgattcggtaagtgcgccgatttcaacggcgacgggatggatttcccgcccggtaagcgacagcacctttttgccgctggcgacgggcaaccacagccccttaccgtagccgccggggccggggggaataagcaccgtattcatgggcgtccctcctcaatcaccagattgccgtgcaggtag

SEQ ID NO: 245487 - DNA, 213 bp, Klebsiella pneumoniae
atgaacgagcaactggtaaacgcgctgattgcagcgctgagagaacaaacagcagcacagcgagagcagacggaagcgataaaccgcctggctgaatctaacgtcgccctgtccgatgtaattatccagtcgctggctgcagatgacgatattgaaatcacttcactggatgataatcgccccgtttacctgagtcaaagaacgagggggtga

SEQ ID NO: 245488 - DNA, 2043 bp, Klebsiella pneumoniae
atggcctttaatcctccgctggggagcacgtctcctgctgtgctgctcgataatgccaaacgtcttgatgaactggccaatgggcccgctgccactgtttccgatcgtgcaggccaaccgctggattcctggcgccagatgatggcgaaaaatgaagccctcacggaggcaacccgccagaatcttatccccctgagtcgtcagtacatgacgctgtcagaggcgcaggctgatatcgcgaatatccctgccggctcgactacatatgtgcgcagccaggacggcagcgcgctggctgatgaatatatgaacgtcagcggaacgctgcagcctaccggacgccgcatgttatctgctgaaccattccaggggttagttgatgctgttctctttgccgaccctgcagagttttcacgctccgggtatgcgtctgcggtagtagccgaggatatgttcattattaccgctgtccggtctgatggttcattttttattcctgacctggatatctccggcattgaccttgacaccctgtctcgtatcactgctgagatcacatttattgaccctattgagtttttgcgatcgggatacaggtcagctgtgctgtcagctgaccgctttattctgtctgcggtggcgctggattccgatgtttatatacccgtcatttctgactcggtcggggttattgaatcgcgcgagttcgcccgcagtggttttatcaacgcagttatttcagaggacagatttattatggcagccaggactactgacggaaacgcccaggaggggagcagggaaattcgcctgccgacagagtttgagcgttcgggataccggtatgctgatgcaagcgcagatatgtttgttacagacggagaccggctgttaactgaggcatggcggcgtgacgtgtattacgccagggtggtgggcgcatacagtcagctgtttaaatttgatgcgaatggcgctgaaactcagttgacgcatgacaatgcgaacgtgacgaacgtccgggatagcggcgatgaggtgcaatggcagagtgatgtcgatgcaggtgtaaaaggcgggctctggtttacgaagaagtccagtttcgacccccacccggtattcccacgaaacatcatcacgctatgggggcactcatttctgcaaaacccacgactggctaacaaactgtataaactgacaggaatgccggtctggaatttcggccgcagcaatatcacaagcaagggcgcagctctgcgccagggcgggcagcgaatcgaagtatggcctttgacggggaagattccggcaacaacggatgctgtccaggtcacgccatcatcccccggcccactggagcttggcgctaaaaattatgcgctgaacgggcaagggtatttccgcgggcaaaaggtctgggttaactggtacgctgacaacacgctaaaaatcacacgctatgccgccggtgcggaaattacggttcccgctgctgaaacgctgacgtggataccgcagacgcaagaagcactgaccgatattgataccgggcaggtgataacgccgcagtatgcaacttatgacaggcacgctgaagggattaatattttctggataggacgaaataacagtgctggtattgcgcaggttatttctgatttgaaagcgatggtggaaaaagtccggtcgtcatctaaatttcccagaatcgtggtgctggctgatttcatggatgccggacagactaatggcacggcaggccgtgcgcagatgttttcgctgaacgctgcgtataaacgcgcgtaccctgaatattattgcgaaattgagggcgttgatattctccagaactttatcaatcacgccaacccgaactatgcagatgatgtggccgacgttgcagccggaacaaccccccggagtctgcgatatgacgacctgcatccgtctcaggttctgcaggaaaatgcattacatattggcgcggatgttaacgccgaatttatctatcaatatctgacaaaaaaaggctggttataa

SEQ ID NO: 245489 - DNA, 483 bp, Klebsiella pneumoniae
atggtcatggcggtggagatcgtggagcccaaggggtttgggcgcatccggttacgccgcattgaccgagacgccgccacccacgtaatcccctttgtgcaggaggtggtcgagcctggagcccaggtacgcacggatggttcggcggcataccgcgctctgggagaactgggttacacccaccagcgcaccgtcatgctcggctcaggcgtacctgcccatgtctccatggcgggagtgcaccgggtcgcctcactggtacagcgctgggtgctgggaacacatcatggctctgtacagccagaccacctggacgcctatctcgatgaattcgtgttccgtttcaaccggcgcacatccagctcacgcgggatgctgttttaccgcttgctgcagcaagcggtggttacgccgccagtgacgtatggggatgtcgtgagcaagaacaccggggagagccaatcggataccattgctggatga

SEQ ID NO: 245490 - DNA, 396 bp, Klebsiella pneumoniae
atgtccgatcctgtttctggcacaacggtagctgctggcgggctgatgggggccagtatgttcggtcttgcaactggcattgattatggcgtggtatttggtgcgttcgctggggcagtgttctatgtcgctacggcagtaaatatcagccgcctaaagctggtgggctacttcataacttcattcatcttcggtgtgattggtgctcctctgctggggtcttacttctcaaagtggacggggtacagtgacaggccgcttgatgcactcggtgctgtaatcgttgcagccatagccattaaattgctgacgttcgttaacagtcaggatctgggtagcctgtttgggattctctctcgcttacgtggaggagggacaagcaatggtaacaagtga

SEQ ID NO: 245491 - DNA, 282 bp, Klebsiella pneumoniae
atggtaacaagtgatccgagcgcaatcgtcaatgcggtgatatgcgctgtaattgttggggcgttgatgttctatcggcgcgacgggtcaagacaccgccccatgatatcgctgatggcttacttcactgtgctggtttatgccagcatccctttccgtttcctgtttggcttgtacgagtcatcccactggctggtggtactggcaaacattcttatctgcggcgcggttctctggttcagggggaatatagcgcgtctggttgatgcactgaggcactaa

SEQ ID NO: 245492 - DNA, 630 bp, Klebsiella pneumoniae
atgaatcaatcacaatttcaaaaggcggctggcatcagcgccgggttagctgtgcgctggtttccgcatattgcagccgcgatgaaagagtttggcatcactgctctactcgatcaggcaatgttcattgcccagatgggacatgagtccggaggctttacccggctggtggaaaatctgaactatgcagcagatagccttgtgcctacgttcggtaaacaccgtatcaccgcccagcaggccgccgcactcggcagaacggcaacgcagccagctaatcagcgagcaatcgcgaatctggtgtatgggggcgagtggggaaaaaagaatctcggtaatcaggttgccggtgatggctggaaatatcgcggtcgcggtctgaaacaagtcacgggcctgagcaactatcgcagctgcggactggcgctgaagcttgaacttgtcacccagcctgagctgctggagcgagatgattacgcagcgcgttcagccgcatggttttatgtttcccacggttgcctgcttcattccggcgacgtggagcgtgtaacgctgcttattaacggtggtcgaaacggtctggataaacgccgagcgctgtttaacctcgctaaatctgtactggtatga

SEQ ID NO: 245493 - DNA, 423 bp, Klebsiella pneumoniae
atggtcatggcggtggagatcgtggagcccaaggggtttgggcgcatccggttacgccgcattgaccgagacgccgccacccacgtaatcccctttgtgcaggaggtggtcgagcctggagcccaggtacgcacggatggttcggcggcataccgcgctctgggagaactgggttacacccaccagcgcaccgtcatgctcggctcaggcgtacctgcccatgtctccatggcgggagtgcaccgggtcgcctcactggtacagcgctgggtgctgggaacacatcatggctctgtacagccagaccacctggacgcctatctcgatgaattcgtgttccgtttcaaccggcgcacatccagctcacgcgggatgctgttttaccgcttgctgcagcaagcggtaaaacagcatcccgcgtga

SEQ ID NO: 245494 - DNA, 633 bp, Klebsiella pneumoniae
atgctggagaggtttattgatgttttaaataaagatgttttgtttgatttgtcggcaactccatctcctgactcttcggtgttagttgttcgtgaagatggtgagcttagtgaaataaaagagttaactataaaagaaatacctgatgattcgattgctttcactttggatttttcaagcaagaaaaactctaaagaaaatggcgctttattttctcaattgtcgccatactttgacaagtctaatggcgatggggtgaataaatcttgtgatcttgtattgattacaagagatggcgataagttcactgttcttatttttgaccaaaagtcaaaaaaacctgatatagaatcatcatttttgcagttggaaaactcaagagtttttgtttcctatgtaattaatattatttctttaatttataaagacaatattgatgaggggaagattatttttaaacgagttattgggactacaagggttgtaaaaactggagttaatgctgctaatcatgagcaggaacgatcgagaagagagaagcttcgtgctcttggcatgaatgaagtctcgataaagcgtacggcatcaatagaaaagggatggttggactatcgaggaatcgtttccttttag

SEQ ID NO: 245495 - DNA, 1431 bp, Klebsiella pneumoniae
atgcgaatggaaatagagtttgaaaatatcggctttataaaaagcgggaaaataaaaaccaataacattactgttattttggggccaaataatgtgggtaaaacatacctaagttatagcacatacgctgctattagtaggtacaatgacatatttagagagaaaataaaaataccaaaatcagtatctagcaacctggttttaaacggaactgccaggtacgacatcacaaacgtttttactgattctcttgttaaatcagttaatgaagaggtttcatcaagcttacctgcattcttcaaagatagttcaggtatgttttctaaatcaaaaattagtgtgattgactcttatattaaagatagagttgttaattctgaagttaatgtaaatatttctgtcagtgaaaatataatattaaatatacaaaagaaaaaaaacaatacatgtattgattttacagtcacctcatccaaaaagaataatgagtcagggagtcctgtcattgatctgaaggaaaaagacgcttcaaattatttaaatattttatttaatttctttttccttaatgaggttttagactctgcagctaataacgcatttataataacatctgagcgtactggaatatccttgtttcaaaaggagattgatggtaatcgtagtaatattgttgattcttacatgtggagtaagttgtctacgaggaagttactgtcttttgatgacattatgagccagaaagttgctaaattctcggagccaattaatcacaatataaatataataagagactttgctgatctgaaaaaaatgaagcatataatgacggcaaatggtgttagaagggcatctaaggagcgagctgatgttataaaaacactagagtcacttactggtggcagatactcaacatctgacggtgaggctatttttacagtttcttgcagtgatggagataaagtgtcaatgccactttctctctcatcagcatctaacaaagcactatttctattagatatatatgtaagatactacatgtctaataactcttacttgataattgatgagccagagctgaatctgcatccacataatcaaattaaaatggcagagttgcttgtaagactttcaaattgcggagttaaaattataatcacaacgcatagtgattatatcgttaaagagattaataatagaataatggcttcgcagctgaaagataaatcacgattaactgaacttggatacaaagaagcagatttgattttttcgtcagaggttaatggttttactatcggtaatgatggtgccatctctgaggttgaagggaataggtatggggtgaatgcttttctttttgataatgttattaatgatatagaaaacaaggctgatctcttgtatacatatttagaagaggggctctaa

SEQ ID NO: 245496 - DNA, 909 bp, Klebsiella pneumoniae
atgaaattttacattgcagttccaacatataatggttcttcattatgggaaaaaacagttaaagaaataaaaaagcatgctccgaaggatacatttgtaaaagtgattgattctggtagtacagataatacagtagcaatagcaaaagcagcaggatttgatgtggatatcatatcaagtactgagttcaatcatggtggtacgagaaataaaatcgtcgagcagtatattggtgaatatgatgtggttatttttttaactcaggatgctatacctctggaaggttttgttgaaaacattattaatatattcaataatcctgatattgtttgcgcttatggtaagcaaattcctcatttggatgctaacgcgatagccaagcatgcaagatattttaattatcctgatattaaatatgaaagtagtaaagaaagtgtgacttctttagggctaaaatcggtatttatgtcaaattcgttttcagcatatcgcttatctgcatttaagtcattaggagggtttccttcaaatactatattatgcgaggatatgtatttcgctgcaaaggcattactcggtggctataaatcagcgtacgtaccaagcgcaattgtaagacactcacataactatagtccattagaagagtttaagcgttattttgatattggagtgttccatcaagatgaaccatggataagggcgcagtttggaggggctactggggaagggaaacgatttatcttatctgaattttcttatttgctaaaaaatggttttttatggataccacaagcttgtattaataatatcatgaagtttgtaggttacaaattaggtgggcactataaaaaacttccattagaaatgagaaggaagatcagtatgcacaagagattttggaaataa

SEQ ID NO: 245497 - DNA, 177 bp, Klebsiella pneumoniae
atggttgcccgatttgagctgaatacggcgaaagaaatagaggtcggtattaaacgcttcgagcaaactggtgtagtcgtaaaaggttgcattcttaatggtgttgttaaaaaagcaagtagttattatggttatggatataaccactatggttattcctacaaggataacaaataa

SEQ ID NO: 245498 - DNA, 432 bp, Klebsiella pneumoniae
atggcgacggcggggatcctgtttgcgctggcggcgctgctgctgatgacctttggcgcgctgtggcaaaagcgcagccgtcaggcgccggcggatgtcctgccgctgcagtatgccgttagtctggggctgtgcctgctgattgccccggtcagcggcttccagtttaccgttaacgccgggttgattattccggtgctgtttctcggactgctgatttcggtggtcgcccagctactgctgtaccgtctgctgagcgcgggaaatatcgtcaatgtcaccagcctcttttatctggtgccagcgatcacggcgctgctggattatctgctgctgggcaaccggctgccggcggcggcgatgatcggtatgatggcgatcgtcggcgggatcgtgctggtgttccgcaccgcgaaggtccgcgccggctga

SEQ ID NO: 245499 - DNA, 390 bp, Klebsiella pneumoniae
atgaaaaacaacaccgaacaaccggtcagtacgacctctcatccctttcgccggatacccgtcatcgttgctctcgtgtttttcgccctggcaaccagcgcgtttctctcgcgcgtggttctggagtactccacgccgcgggtggtggcttttgatatgaagaagacgctcgacagctttatggacagtgtcagtcagaagcagctgacagaagcgcagtcaaaagcgctctctgaccggtttaacgacgcgctggagaagagtctggcggagtatcagcagcagcatcatgtggtcattctggtttcacctgccgtggttcagggcgcgcccgatgtgacccgcaacatccagcacgacattgcccgccgcatgaaaggagaacagtaa

SEQ ID NO: 245500 - DNA, 198 bp, Klebsiella pneumoniae
gtggatcatcaaaaagttacttttaaaaaccgttacggcattacgctggccgcagatgtgtatcttccaaaagatcgcgggaacaagaagcttgctgcgcttgttatttccgggccttttggcgcggtaaaagagcaggcctcgggtctctatgctcagactttagcagagcgcggattcgtgacgctggcttcgtga

SEQ ID NO: 245501 - DNA, 1284 bp, Klebsiella pneumoniae
atgcatttatctcatcagcaaccgaaaaccatactcggtcttcgtattgatttagtttggggtctgttaggcgttttgctttttattgtcggcgacggtgttgagcaagcgtggatttctccttttctcatcgaacgcggtcttacgatgccgcaaagcgccacgcttatcgctatctacggtattgccgttgcgatcggggcgtggctgtcgggggtgatggctgaagccatcggcccgcgtaagaccatgttgattggcgcttcctgctggctggtgggccaggttctgtttctgctggtggcactgccaacgatgaatttcgccattattattccaacctactgtatccgtggtctgggttatccgttgttttgctattccttcctggtgtgggtgacctaccgcaatccgccgaaaaccctggctaccgcggtaggttggttctatctggcctttaccggtggcttatacattgtggcaaacttctatgcctcgttaatgatccctgtcattggccatattggggtcctgtggagcgcgatcggctgggcgctggctggtaccgcaatcgtactgttctttgtgaaaggcgccgtccgggaaaatacctccataggcgatcagctttccattctgctcagcggtatctcgattatgaaagagaatcccaaagttggcatcggcggactggtcaggctgatcaacactacgtcgcaatttgccttacccgtattctttcctgtttatctggcgcagcatggtttcaccaccgaacaatggttaaaagtctgggcgctaacatttaccgtcaatattgccttcaatttgatctggggaatggtgggtgaccgcattggctggggacgcgcggtacaaatctttggcggctttggctgtgcctgcaccatgattatgatggcgtatgccccggtatggtttgccggtaactttatggccatgctgctgatgggctgtatctacggcgcgttaatcgccggtttctgcccgctcacagcgttagttccgtcccttgagccggaaagaaaaggcgctgcaatgtcggttctcaacctgggcgcagggctttccagctttgttggccccatgttagtcgccttgctgtttgccagctttggcgcaaaaggcgtactgtttgtcttcgccggtctctatgtggtgagtatttttctcacgggttacgttgcatcggatgaaagagcaactcgtcgcctgaaagcgcaatccgtatccacgcaagagtcggccagcaaaacagtctga

SEQ ID NO: 245502 - DNA, 1518 bp, Klebsiella pneumoniae
atgtcagcttgcaaagaagtcattattgctcttgatgaaggtaccactaacgccaaagctgtggcgctggatagccttggaaatgttattgccaaattttcccaggctctgtccatccagacgccgcgcgaaggctgggttgagcaatcaggtgaactactcattgacgcctcactgcacgttattgctaaggctatcgaacatgtcggcgcggaaaatgtgcaggcgttagcgatcagtaaccaacgtgaaaccgcaattggatggtaccggggaaatggtaagcccctgagtgcggcgataacctggcaatgctcgcgtacagcgaatttttgcgaagggctacgcagagatcatatggagccgatcattaaacggaaaacgggacttcccgtcgctccgctcttctcggcctcgaaaatgcgctggctccttgattctatacccaacggccattcactggcggaaagcggcgaaatctgcctcggcacgattgatagctggctactgtggaatctgaccgagggtgacgcttttagctgcgactattccaatgcttcccgtacccagcttttcaatctgcaaagcggagattgggacgacgagatgctggaaatttttcagatcccacgctgcgcgctgccgcaaataaaaccttccgccggcttatttggtcatactaagggtttgaaaaatattcctgacggcattcctattatgtccatggtgggtgactcgcatgccgctctctttggtcatgcattaggggaaatgggctgcgttaaagccacttatggcaccggctcttcagtgatggcgccggtaaaatccgcccaatgcgatattcagtcgctggcaacaaccgtcgcctggcatgatggtgaaaaaatcgtttacgggctggaaggcaatattccgcacaccggcgacgccgttgcctggatggccgacagtacaggattaagcgaactgcccgatcatgaacttgctcatgagctcaatacgctaccggcgtccgttgaatctacgcttggcgtctattttgttcctgccctcaccggcttgggcgcaccatggtgggatgaaaacgcgcgcggggtgatctgcggcttaagcagaggcgtcaaacgtgcacatctgatccgcgcggcgttagaatctattacttatcaaattgctgacgtggtgatcgccatgcggcaacataaagattttaagcttacagcgctcatggttgacggcggccccaccaaaaatgactggcttatgcagtatcaggccgatctgcttggctgcccggtgatgcgcagtgatattcccgagctgtcggctatcggtgctgcgctgctggcccgtaaagccctatcgcagatgagcgaagaggatatgagaaattatctttccgttcatagtgaattccgccccaatatggaacgccacggtcgtttacagaagcgttggcgtgaatggcagcatgcggtagaacgaaccttatttaaagctggttcagccaaatga

SEQ ID NO: 245503 - DNA, 1080 bp, Klebsiella pneumoniae
atgagcaacgaaatcagatacataaacacggaagaactggattttgatcctgaaaacccacgtttctaccggctaaatgatagagctggttccgaaaatgccgtcattgaggaaatgcttgatgatgaaagtgtgcaagatttgatgctctccattggagagcaagactactttcccggtgaaccacttttagtggtcagttctggaaaaaaatatgttgtggttgaaggtaaccgtcgcctcgcagccgtgaagttgctaaatagcgaactcttaccacctaaaagaaaagaaaaaagcgttcaactaattcaagatgaagcgacttataaaccaaccagattgccttgcctcgtctacaaaaaacgtgaagatgtgttgcgttatattggttatagacacattacaggtgtaaaagaatgggatgcattgtctaaagccaagtatcttaaagaacttagtgaaactttttatcaaggtgcagataaggaatctcttttaaaatctttagccaaagaaatcggaagtaaatcttattatgttggacttttattaaccgcactcaaattatacgaaacagctgctgacaaaaatttctataatttgcctatgaatgaaaatgatgttgatttttcatacataacaactgctcttggttacactaacatcacagattggctgggcctagatgatagaaaggatttatcggctgaaaacttaaaagaggaaaatcttgagaaaatttttgcttggttttttgtgcgagaccagcaaggtgataccatcattggcgaaagtcgaaagataaaagatctttcaacaatagttgctaatgaggcagcagttgacaacctaataaagtctaaaaatattgaagaggcatatctatacacgaatggtcatgaagaagctttggaccaagctttagaccaagcagagtctcgactaagaattgtttgggatatgcttctcaatacgaattccttcactgagaaccacgaatatcgttctggtgaaatattatctatagcgcgtaaaattaaaaaacaaattgaaagcatccgtgaggaagatgaataa

SEQ ID NO: 245504 - DNA, 930 bp, Klebsiella pneumoniae
atgatttttcgcatggactcattgcccgataacgagtcatatttatggggtgactatttagaattatgggcaacagtaagcactgataaatgcttcagtcgaggagagttagctagcctcttcaggtctcaagcaaatccaaaatctcggatatattctgatgaaaaatggaattttgctgctacgtttattgacacaagaattagtcttttcgggaatgattacccattctatttttccgaggatagagacactttattcttaaaaaaacaaaacatagctgattataatcagaatgaaaaactatacatagctctcttagcctgcgcgaatataaaatatattgaaaataatagtcgagatatatttaccggtgcatttgaaaaaataagctacccaatatttgaagcgctcatgccagtaggagctacagttaagcattgttgggctagtgcgggcaatgctggccactatactgggttactttttgataaacttacaaaaatttcacaggatttcagatgcaaagccaattttgtaatcgaagattttaaacccaatgaccgaggggatggagggattgatatactcgcctggcatgatatgggagataatcgtgaatctatacctattgcccttgctcaatgcggatgctcaaaaacagaatgggtagttaaacaacttgaagctactccggcgaaattatggaatttgctgccagcattacacccatggtcaacgtattactttcttcctcaggacttaagatggcataaccgtgactgggctcacagaagcgactttggtgctgcgatctttgttgatagacttaggctagtgaatttaactaaaaaatacgcaaatattaaccaccaagacaatctgacttttgttgatgacttggtggcgatgaattatgtgttgagctaa

SEQ ID NO: 245505 - DNA, 255 bp, Klebsiella pneumoniae
atgaaatcgaagcgtacaactcaccgcaccacaaataagaacggtaaagggaaatccggaaagaaggcttgtagcaaatctgttcgtaatttagacacagtagaaaaatgcacaaaatatatgcgtttcttttattggctgtgcaggttgtatcggcttttcttcggaagtgatagtgacttactcggcagtacgtcattgttcctttgccttaaggaggttcttaacgcgctgatcaaaaaatactttaactga

SEQ ID NO: 245506 - DNA, 210 bp, Klebsiella pneumoniae
atgaaaaacagctttctcgtgctgacgctggcgctcataagcatccaggcgaatgccacacagataacattaaccaacccacaggaagaacagacggagaacgggaaaacgttatgcatctatgagaatgccaattacacgttcacctacatcactaaggggaaatgcccgtatgctcgaacctttagtacagaggattcagaagagtaa

SEQ ID NO: 245507 - DNA, 687 bp, Klebsiella pneumoniae
atggcagaacaggggatagatttaagtcgttaccttcgtcacggagcgaagattacagaaaatgggtcagacgactggcaaactccgagagctatatttgatgcgttagataaacggtttcatttcacacgtgatgctgctgcgagcagagagaacagtcactgtaaattatattgggatatccgggatgatgccttattaatggattggagtgctgagagatcattatttataaatccgccctattctagggtggctgagtttttagcaaaggcgcatgagccggagacggcagtatttttaattccgtttagaccacaaaccgggttcttcctccagtatgtctgggcttcgccctatctgcatgaaatgatgattattcaccgaggtatacgttttattcatcctgatagggtggaatctgtacgtagcccaatgcctgtagtggtgttggtttatcgtaataagcccaggaagcgtgatcttcttattacggtgaactgtgcagatagcctacagacattgcatgtggtagcggggcagaggccaggccatccccttgagcatagtcccagcaccagggatagggtgatacaggattaccaacgaggagccaccgttgcagagttggtgaagaggtacgaggggaaagtgtcccggcgtagcatttaccgatgggttaaatag

SEQ ID NO: 245508 - DNA, 1449 bp, Klebsiella pneumoniae
atgactcaaaaaagaccgatagtagcctacgttgatgcaatttgcggatctggaaaatccacgacattacagcaatacattaaatccagtttactaaccaactctgatgcaatcccccctcgttacctcctcgtgatgccaacacatgatttgtgcgagcaggtgaaatctgagctagagcacagagatgtacgaagttatcacgtagacattgaactgaacgcagtaaaacatcttatcagtacgttggaaaatgactttcaacattctgttattatctgtactcatgaatgttttaaacattattgttatcgtgctgagtttgagacagaactgcaatcgctcctcaaagattttagcgtatttattgatgaagtccctgatgccatgttcggtgcctatatcaaggccacacacaccgaccgcacagaggaaaacttcccgtttattaaatggctggaagagagggacgggcttttattcttaaatgagagctatcgtgatgatctctacaaatactggcatgagaaacaggccaacggagaggatttaaaacgcctcctgtgggcaataatgcagggtgctgggcttctctacgaagagaataaacacctttttgcattcactgcatcgccgattatcaaatccgcacagtgggctgaaaatctcacagtgttaggtgctggctcttctcgtagtctgttctgctgggctgctgagaatgttgcagggtatacggtagaagaggctaaaccgtctctacagccgcctgaggagcgcaggaagcataaacgaggtgctatcaccctgatggcagtttgtgagagcagatgcacgctcacgagcctacagcacgtgtttaacgaccatttgcaggaaatcatccgccgtgttcctggtgagtttattttcgctaccaacagagacaaatctatttgtgaattcacaacgataggggatgagattctctccagtggctctcgtggtgagcgtgtttcaatggcctcctatggattaaaccactatcagcacatgaataatgctgtgttcctgggatgcagcaatcttgacagggattttcagggtaaatggcggcagtatgcggagcttaacgggtggaacgttgaggagttcgaacagaaacagcgtgcagcaatgaactatgaacggtgctaccagtttatcagccgcacatcgatcagaaatacagctataagcgctcctctcgtgttcgtagtgcccgatttagctactgctgagtacatcaaggagtattattttcccggtgcatccatcgaatgtttccattttgaaaaacctaggaaaaaagttaaagggactgaaacacgtgaaaaggtgcaggcctgtaaagcccaggggatgacacaaaaaagcgcagcggaaatgttgcaggttaacataaaaacaatcaaacgtaattggaactaa

SEQ ID NO: 245509 - DNA, 138 bp, Klebsiella pneumoniae
atgtccactactgcggatatttatcgactaatggcctcaataacctggtacgcgattttgacgcagtatattcagataaggagagcgaataagtgcaccaacaaacaacacaaacgaaaagattcgaaaaactattaa

SEQ ID NO: 245510 - DNA, 348 bp, Klebsiella pneumoniae
atgaacacttctacttcttataacaccctacaatctgtcctacaaacctaccacgataattacgctgtcccgatgctgcgcgtcattctacaaatgcaacgtgacagaacgcctgagacgctcctggcggcgattaacgcgcaggaactggcacaggaaatgttagagcatgttggcgacgtggcaagccgtatagcgactacggaacattcaacactaacacaggatgaggctgattgtatttcagcggaaatctctgattcactgcttctgctattccagtgcattgaggagacgggcgaaatggcgcttgaactggcgccgaacaccaacacacaagaggcgtaa

SEQ ID NO: 245511 - DNA, 471 bp, Klebsiella pneumoniae
gtggacggtcaggactatgggaaacaggtcaacttcgaggatggccgggactgtgggaaacaggtcaacttcgcggatggccgggactgtgggaaacaggtcaacttcgtggacggtcaggactatgggaaacaggtcaacttcgaggatggccgggactgtgggaaacaggtcaacttcgcggatggccgggactgtgggaaacaggtcaacttcgtggacggccgggactgtgggaaacaggtcaacttcgtggacggccaggactatgggaaacaggtcaacttcgaggatggccgggactgtgggaaacaggtcaacttcgcggatggccgggactgtgggaaacaggtcaacttcgtggacggccgggactgtgggaaacaggtcaacttcgtggacggccagggctgcgtgaaacaccacatgtataggcacacacagatagcgtgttcagggcaacaaatgtga

SEQ ID NO: 245512 - DNA, 621 bp, Klebsiella pneumoniae; identical to SEQ ID NO: 112191

SEQ ID NO: 245513 - DNA, 789 bp, Klebsiella pneumoniae; identical to SEQ ID NO: 112192

SEQ ID NO: 245514 - DNA, 741 bp, Klebsiella pneumoniae; identical to SEQ ID NO: 112193

SEQ ID NO: 245515 - DNA, 327 bp, Klebsiella pneumoniae; identical to SEQ ID NO: 101462

SEQ ID NO: 245516 - DNA, 258 bp, Klebsiella pneumoniae; identical to SEQ ID NO: 112194

SEQ ID NO: 245517 - DNA, 288 bp, Klebsiella pneumoniae; identical to SEQ ID NO: 112195

SEQ ID NO: 245518 - DNA, 756 bp, Klebsiella pneumoniae; identical to SEQ ID NO: 112196

SEQ ID NO: 245519 - DNA, 270 bp, Klebsiella pneumoniae; identical to SEQ ID NO: 112205

SEQ ID NO: 245520 - DNA, 195 bp, Klebsiella pneumoniae
atgactccattagttcttaccgcagagccagctccggcagacttcgctgagcaggaaggccagcccacttacatgatctctcaggccagcatccctgaatttgaagcggatgacggcagcactgtaccgggttacgagggccttatcgcctactcagaatcagaagagcacggcgtgcttcagctggaagattaa

SEQ ID NO: 245521 - DNA, 261 bp, Klebsiella pneumoniae
gtgcttagtctgcttatccagcacatcgatatcgtggtcagtaaggtagatgaccgcacccagctgcaggccgtatcaacgactaccggggtgggggaagtgctcgcgcagctcccgatcaacatcgtcattatccatacactaaacgctctcctctacatcgcgggcttccaaggtaacttcctcacttctgttcagagttgcgaaatgatgattgcatttccttcgcaacactggttacgagtgaagttcaccagttga

SEQ ID NO: 245522 - DNA, 192 bp, Klebsiella pneumoniae
atggaatggattaacattgaagatcaggttcctgggccatttgaaatggtcatacttgatacggataaaggaattgctatcggttgcttcgacgtttctgggaagccaaaagaagctattttcggtttcactggcatcatagctcactctcagttcgaagtgttacgatggatgccattacctacaaagtga

SEQ ID NO: 245523 - DNA, 582 bp, Klebsiella pneumoniae
atgttttctcactatcaggccctgatttttgatatggacggcacgcttttcgacacagaaccgctgcatcgacaggcatggcttaccgtattcgcgaaatattcactatcgttaaaagaagaggagctcatccccttcaatggctcagcgccctggcaggttgccagcaatatcatccagttaaaaggactgcaggcggacccgtctatactggccgccgataaaaaagccgtcgttgagcaactcttccactctgccactattcctccactacccgcgttgcaaatcgttcgcgaatggtacggaaaaaaaagcttagctctgggaaccggcagcgagcttagcactgcggatacactgctaacgcgctttaatatcaagcactactttgatgttatcgtttctgccgacagggtagaacatcataaacctgcgccggatacctttttactgtgcgccagcaggatgaatatcgcgccggccacttgtctggttttcgaagattctgcatttgggatcatggcggcaaaaaacgccggaatggacgttgtcgacgtacatacgttattacctgaacgctaa

SEQ ID NO: 245524 - DNA, 366 bp, Klebsiella pneumoniae
gtgacccaaaacccaggaaatgaatccgttgaagtcctgcataaaagagcggtatcgcggtttaactctcttacttatgcaatcatcggtgaaatcagttctatgctcagcaaggccaaattattgccaattcctgagctacagttgaacaaccctacattcgaagaggttgtttcacagttaaggctttatcgtgccctatccgaaagagtcgctgagttgttaaaaattgataggaaagatgaactagctgagcttgacacgtacattgagctcgcagatgacttggctcaagccattgtagctgacaatcctgaagggttgtgcgccgccatagctgctttggatgagaagccatacgtataa

SEQ ID NO: 245525 - DNA, 282 bp, Klebsiella pneumoniae
atggagaacgcaattaaacgcaataaggacaacgctcgtcgaatcgagacatggctgctgaatcggatatctctcatgggagggaaaaaagttgccatggctgtaggcgtcaatgagtcgcaggttacgcgctggaaatcatcatgggtgccgaaaatggcgatgttactggcggttcttgagtggggggttgtcgacgatgacatggccaggctggcaaaggaggtcgctttaattttgcagagcgacaagggcaaagaaacttctcatctggaggcgtaa

SEQ ID NO: 245526 - DNA, 564 bp, Klebsiella pneumoniae
atgactgatatcaccaaactggcgcagagcctgaaagcggcggcagagaaagcgagtaacggcgactgggttaaagaatctggcgacggctgggaagcgtgttgtagcgcaaatgaccaggccaacggcggattcatcatcgcgcacttcgtaggtccagatgcagcggagaaccgcgagttcgtccaggccgctaaccctgccaacgttctcgcgctggtagaggctattgagaaggcgcagaccatcaacgcagcagctgaaaaactggtccgctgcaaaggtcgctatcacagcgagcagaactatcgcgcattggctgcactgtttggcgtgaaaaccccagacctgccgcctttggagcatgaaaacgtccattatgccgatgctgcagagatggagattgaagcactgcgccagcgcatcgccgagctggaatctcgcaccgtgaagcttccagagccgttcgagctggctggactatcgggagggtcatcttactaccatgccgatgaggttgatgctgcgcttatcgccgctggcatcaaggtggaggctgagtga

SEQ ID NO: 245527 - DNA, 1677 bp, Klebsiella pneumoniae
atgagcggaattatcgaatgggatgacctgtcattcccggagcgcgtgatcatccgttcaaagtccacgaagtcattcctgaacttcacccggatatggttcgagctgattcagggcgaccggttgctggttaactggcatcaccgcctgatggcttcgaaaattgatgatctgcttgccgggcgtcttgtcccgcgaaacctgattatcaacatcccgccaggcggtacgaaaactgagttcttctccattcacttcccggcgtatgtcaacgccctggtgcaggagaagcggcttaaacgctttcgcaacctgaatatctcttttgctgacacgttggtaaagcgtaacagccggcgcacccgcgacattatcgccagccgtgaatatcaggagttctggccctgctcgtttggtgtcaaccaggcagaagagtgggagataaaggacgagcgagggcgctctatagggcagacggtatcgcgctcaagcaacgggcagatcaccggtggtcgtggtggctactacggaccagagttctccggcatggtgatgctggacgactacaacaagccggtggacatgctcagcgagtcccgacgcaaaagcgcgaatacgctgctggtaaacaccattcgatcacgccgcggcgataagtcgaaagagcacccgacgccatttgtaagcattcagcagcgcctgcacaccgacgatgcaacaggcttcatgcttgccggcggaatgggtgtgccgtttcaccatgtcgccataccggccatgatcgacgagaagtacatccagtcgcttgatgagccatggcgttcgctttgctgggaaacggtcaaagataccgattctgtggtcgttggaggcgttcgctactggtcctactggccgcagatggaagacgttaacgacctcctgcagctgtgggaaaaggaccgctacaccttcctgtcgcaataccagcaaaacccgatggcgctgacaggcgggattatcgacaccagctggttcagaacgtacaccacgctgccgaagcttacgcaccgcgccgtgtacgtcgatacgaacagcgggaaggtagaggactggctggattacaccgtatttacgctggctggcatgggcgttgacgggaatctgtacatcatcgacgtcgttcgcggtcggtgggacccggaagacctcctgaagaaagcggaagaggtttgggaaaaatggcgcctgtctggctccatgcgggtcatgccgctgcgtcacatggccattgaagagaagcaagccggacagggcctcatcaccacgctgaaaaaacgtagtcagacccccggacaactcgccatcccggtgagggaaattccgcgcggcactggccagaacaaactcgttcgctgccttaacgtcatcccccaaatcaaaaccgggaaagtgttcgtccccgcgacgcacaccgacgacggacagaagctttccagcatcttctacgaggacggcacgatcgcaggctcaacggagtgggttctgacggcgatgacggaatgcgctgctttctccgctgatgatagtcacgacaacgacgacatcctcgatacctggatggacgcaatcgacgacaacctgatttccggcccgcagccgatggttatcgacccgaatcaactcaggagaatttaa

SEQ ID NO: 245528 - DNA, 705 bp, Klebsiella pneumoniae; identical to SEQ ID NO: 96512

SEQ ID NO: 245529 - DNA, 252 bp, Klebsiella pneumoniae; identical to SEQ ID NO: 96513

SEQ ID NO: 245530 - DNA, 1782 bp, Klebsiella pneumoniae
atgaattttgatgcaacaccactaaatataaaaaacattctatctgtaaaacaaagatatgttattcctcgtaatcaacgtgagtttagttgggaaaagcttcagcttgaagagttatggcaagatattgtcagaaacataaggttgaatgaagatggacagaacttggagtgttcagaatattttatagggactattgttctttctggagcagatagtgatgatgtattagaagtggttgatggacaacaacgattttcagttattactatattgctttcattaatatcgcgtaaattgcgttccttagggcaagattcattagcggatgatatatttaaaacatatatcgttactgtgagtcctacatttagcagaagccaattagcttcaaatggtgagacatttattgaaaaattagcaaaaaatagcgatagaacatattttaagttaaaatatcaagatcgcgaagagcatcaagttgatgaatcttgtgaagaggatgtacgtataagttatgcaggaatttttctttctagaaaactagggaggaaatcactctgttctgcattgttgcgagatggtgcaaaacattataataaccaagattatatattttgtttgactgctgtatatagaatgattaccaattatttgaagttggtaaaaatatctgtaggtaaggaggatgatgcttatgatatttttgaagtgttgaatgctcgagggataaacttaagttcaattgatttgataaagaataaagtattccaaacttgcactcaaacatatccggtagatattgcaaaaacaaaatgggattatatcgttactcaaattgagtctagggatagtaatagcactattgctgattatattagaacgtggtggctttctaagtataattatattggagaagatcaactttatcgtgcttttaaacgtgagagtcaagatgagaatactttattgtcatcagcatcatttctgaacgaattatatgatgatgttgaattatactgtaaaataatagcgccaaatacagatgactggcctcaacctgatcagcgtgaaatttacaactcgttaaaagcattcgagatttttaatgtgagtattcctcgaccatttgtactctcattacttagaaaacgtaaagagaaaccgagagcccttacacaatcaatgctgatagaatgtttgaagtccttagagtcatttcactttaagtttaatgcagtatgtcgtctaagaccatctggaatcgatgcaaaatattctgtattagcagtaagaatgaataaggcattaaacaaaagagatgttgagggtgttattaatgacgcgttagattattttacacagaaagggccttcagaaaatatattcaaacaagcattttcaaagaatattgtttatacaaataaaaagtctgggcaaaggaagttgattgtttatatttttgacaaattggaacgtatcagacgagggacacgagagttaaaaatggatatagtttctttggaacacatatcatctcaaagcaaaactaacgagtcagtcgtgggtatgattggtaatttactaccactctgtttttcacttaatgaagattgcaaaaattatgagttgcacaaaaaaatagaatcttataaaaaatctgatttaaaattagttacagagtttgttagtgagtcagaagcaagagaacataaatgggatgattcattaataaaagaaagaacagatagcttggcgttagaaacgtttgctaaaatataa

SEQ ID NO: 245531 - DNA, 582 bp, Klebsiella pneumoniae
atggaacaggctaaattaaacagcagtcagattgctactgaggctggatatgtcactgtttttaattatgacagcgcgacacgtgaatatttatcttcggctgttgagtatcttcagactggggtaggtatacccgcgaactcgtgtattgatgcacctgccaaaagtaaacccggatttgccatttgccggaccgcagacctgacaggttgggaatatgttgtcgatcatcgtggtgagacggtctacagtacagaaacagggggagaaatagcaatcactgcgcccggtgactacccacagtgcaccaccgcacaggctccagccaccaaatacgatacatggagtggcaaagagtgggtagctgatccccaaaaactacagtcatacgtcggacagcaaaaatcagcgctaaaagtagctgctgatgctgaaatcgcgtggcgtcaggatgcggttgatgcagggatagcaacggcagaagaagccgacgcgctggctgaatggaaaaaataccgggtactgctgatgcgcgttgatacctcaaaagcccccgatattctgtggcctccgcaaccgtaa

SEQ ID NO: 245532 - DNA, 507 bp, Klebsiella pneumoniae
atgccagttagccgttacctctgcattttcttaaacgttggtttaggagatggttcagctttacctgtcggcgtcccgattccatggccggcagcaacagccccaactggatggctgaaatgcaacagtgcagcgtttacagcggcgcaatacccaaagcttgcaatggcttaccctgcgctggttttgcctgatttacgggctgagtttattcggggctgggatgatggtcgcgggattgattcttctcgtgtacttctgtcaagtcagaagggaagtgttatccctggcgatgatggtttatctactccaaacgtagtgggtattaataacttactgaataatagtgcgctgtggggaatggaccaggcaaccattgctgaaattaccgggtgctacatagctgtcattgcctcaaccaacagcagcaatagcattcagacaaacatagccgggatttcccgcccgcgtaacgttgcgtttaactatattgtgagggccacataa

SEQ ID NO: 245533 - DNA, 318 bp, Klebsiella pneumoniae; identical to SEQ ID NO: 185382

SEQ ID NO: 245534 - DNA, 720 bp, Klebsiella pneumoniae
atgtttgatcaattgatgtgccgcatcagttttaaaaaattacgctacgatggagattttacacttcctggacttaaagcggccctcgtataccctggcgcattaggtggttttaactggggtagcgcttcttacgacccatataatcatcgcctgttcgtcaatgatatacgtgtggctaatgtcaaaaaaatattgacgcgtgatgaatataatcatctagcgagtattcatgcaccgacccctgatggccatggattagcaccaatggagcatactccatatgggataatgacaacactctggtcttcaccactgggtgttccttgccagcaaccaccttatggtacaattacatctattaatcttgagaaccgtaaagtagactggcaagtgccggcggggactactgaagacacaggtcctttcggtattaaaactcacttgcctttatcggtaggtatgccaacttatgccggcacttcagtgacagcaggtggattgctattctttgcaggttctcaggattactacctacgtgcgtatgacgcacaatcagggaaagaaatctggaaaactcgcttacctgttggttccagcgcaacgccaatggtgtatatttctccggaaaatgggaaagagtatattgcagtagccgttggtggctctgcccactcaccggatgtaggagactacattatggcctttagcctcccataa

SEQ ID NO: 245535 - DNA, 174 bp, Klebsiella pneumoniae
atgctgccggccggcatgaacgaggacggtgtcattgaggacatgcaggcgtatgacgcctggctggcagatgagcagacacagcgggatatgcagcggcgtgaggaagtcaatatcaaccacagccaccggcacgatgagcaggatgatgtcgagattggagggaatatctga

SEQ ID NO: 245536 - DNA, 210 bp, Klebsiella pneumoniae
atgagccccttcttcgtgcgggttgtcactggatgcgctcagtcagcccagcgtcggaccgttatagctccgctgacgggaacgggtttccgccagctctttttcgtgctgtcgctgctcgtatgcccgttcggcggccaccgccatttcatgccgctgcactactggctcaaacgctgtaactgcctgctcaagttcgccacctgctga

SEQ ID NO: 245537 - DNA, 285 bp, Klebsiella pneumoniae
gtggtgcgcaccatctgcgccattctcgacaaggtggtggcgcagaagccgggcaacatcacccactttgctgacctgatcacttttgtcaccgaccgtccgggacacgacctgcgttatgccattgatgccgcgaaaattcagcgcgatctgggctgggtgccgcaggagacgttcgagagcgggattgagaaaaccgtgcactggtacctgaacaaccagacctggtggcagcgcgtgctggacggctcctatgccggtgagcgccttggtctgaataactaa

SEQ ID NO: 245538 - DNA, 912 bp, Klebsiella pneumoniae
atgagatattacttggcaatacctacctataacggtggggagacttggaagttggttgttgaaaatataaagaagtatgcaccacaagatttattcgttcatgttattgattctagcagtaaggataatactgcattcattgcgaaaagcgcaaattttgatgttataacaatatccgggcttgaattcaaccatggcggaactagaaataaagctatcgatgattttattgagcaatatgatgtggtcatatttatgacgcaggatgcaatacccgaagaaaattttatagaaaatatcattaaagcatttcaaaatgaagatatagcgtgtgcatatggtcgtcaaaaacctcatatagatgcaaatccaatagcaaaacatgcacgatattttagctatcgagaagaaggatatataagtagcaaagaaacagtattaaatatggggttgaaaactgtatttatgtcaaattctttttcagcctatagattatcaatatttaaaaaactaggtggtttcccttcaagtacaattttatgtgaggatatgtattacacagctaaagcaatacttgctggatttaaagttgcatacatgcctaatgctattgttaaacactctcacaattatacaccgattgaagaatttaaacgttattttgatataggtgtttttcacacagatgaaccttggattagggatagttttggtggtgccagtggcgaggggaaaaaatatattatatcggaagttaaatacctcttatcaaacgcccctctttggatacctcttgcatttctccacaatgtaatgaaaatcacaggctataaaattgggcagaaatataaaagaataccgaaatggcttgttaaaaaattaagtatgcataagagatattgggaatcataa

SEQ ID NO: 245539 - DNA, 1212 bp, Klebsiella pneumoniae
atgaacaataccaatttcaacatggcagtctgcgggacgtccggggcgggtaaaaccggtctgattcagcccctcattcgcagtgtgctcgactccggcgggtttgcctgggtgttcgacatgggcgatggctataagtccctgtgtgaaaacatggggggcgtatacctcgatggcgataccctcaagtttaacccgttcgccaacgtgctggatgatgctcactttgacatgtcagcagaacgtatacgcgatcagatgtcggtgatggccagtccgaacggcaacctcgatgaagtccatgaaggtctgcttctgcaggcagttcaggcggcctggttaagcaagcgtaatcatgcacgcgttgatgacgtagttcagtttttacaggacgcgaaggacagcgatgaatatgctgattccccgacaatccggggccgtctggacgagatgataatcctgctcgatcagtacacggtgaatgggatctacggtgactatttcaactcagataaaccaacacttcacgatgacgcccggatggtggtactggagctcggtggcctggagtcgaggccctctctgcttatcgcggtgatgttctcattgattatttacatcgagaacaggatgtatcagtcaccgcgtggcctgaaaaaactgaacgtcatcgatgagggctggaagctccttgatttcaagaatgaaaaagtggggcagtttatcgagaaaggctaccgtaccgcgcgtcgacataccggcgcatacatcaccatcacgcaaaatatcgtggacttcgactccccgaccgcatcgagcgctgcacgcgctgcctgggggaactcgtcgtacaaggccattctgaagcagtcagccaaagagtttgccaagtataaccagctgtacccggatcagttcagcaagctggagaaagacatgattaacggcttcggttcggccaaagagcagtggttctcctcttttatgctgcaggtggaagcgaactgctcctggcaccgcctgttcgttgacccgctcagccgggcgatgtactcctccaaaggcccggattttgagtacatgcaagcgcgccggcaggagggggtcgatatccacgatgcggtatacggactggcgtgccgcaactttaaagacgaaatggcagagcttgaatcccgaataccggtgaatgacatggaggataaacagtga

SEQ ID NO: 245540 - DNA, 564 bp, Klebsiella pneumoniae; identical to SEQ ID NO: 104054

SEQ ID NO: 245541 - DNA, 405 bp, Klebsiella pneumoniae
gtgaaagcgtactatatacttggacataacgttgcatggcttaacggtatatgcctgattctttttgttattggtttggtcggtgcgctggcaatggttgccatccctgaaaaattcaatcttcgagttaacagaggcgatacattcatatactgtgcgcttatagcggtggttgggttttccgggatgttcgttatctccattcactcattttcgatggatgaacttgaagcaggtagacactggaaagatgactgccagacacttgaggtaaacatgccgacaggcgcttttaccagccctgttaataaactggactgtgatggcatcatcattaatgtgcctggtgggcagtattattcctatatccatcagtgggaattatataaagctaactcaaaatga

SEQ ID NO: 245542 - DNA, 405 bp, Klebsiella pneumoniae
gtgaaagcgtactatatacttggacataacgttgcatggcttaacggtatatgcctgattctttttgttattggtgtggtcggtgcgctggcaatggttgccatccctgaaaaattcaatcttcgagttaacagaggcgatacattcatatactgtgcgcttatagcggtggttgggttttccgggatgttcgttatctccattcactcattttcgatggatgaacttgaagcaggtagacactggaaagacgactgcaagacacttgaggtaaacatgccgacaggcgcttttaccagccctgttaataaactggactgtgatggcatcatcattaatgtgcctggtgggcagtattattcctatatccatcagtgggaattatataaagctaactcaaaatga

SEQ ID NO: 245543 - DNA, 141 bp, Klebsiella pneumoniae; identical to SEQ ID NO: 36145

SEQ ID NO: 245544 - DNA, 405 bp, Klebsiella pneumoniae; identical to SEQ ID NO: 245542

SEQ ID NO: 245545 - DNA, 174 bp, Klebsiella pneumoniae; identical to SEQ ID NO: 229381

SEQ ID NO: 245546 - DNA, 297 bp, Klebsiella pneumoniae
atgtcatttgtaataaataaaactctcaacgccagcgtcaccgaagacagcggcacggtgattggctcggttcaggtcactgtggatgttacgtattctatttcgctgattcaggttgtagatgacacaaccgcctacgcctctatttcggcatcagtaaacgggcagacgcccagacaggttgatcagtttgagttcaattacacgctggagggcggtagaagcctgtttgaacaagctgaaaatgccattcgttcaagcaataaatatggcgaaatggaagccgttcctgtgtag

SEQ ID NO: 245547 - DNA, 2049 bp, Klebsiella pneumoniae
atgtaccatcttgacaacaccagcggcgtcccggaaatgccggaacctaaggatgaacaatctgtttcaccccgctggttcggggaaagccaggagcaaggcggcatcagttggccgggggctgactggttcaataccgttcaggccgaactgcttaacttgcttgctgcagccggaatacagccggagaaaaaagcatttgatcagttatcacaggcgataccggtccttggcgaaaagaaaattcgtgaggatttaggctctggacagggtgcgagtaatgtttgctacaaaaaaccatacaggagcgctgtatcgcgcccgattgctgatatggtttcagaaaccatttcgccgtttgactttggtatcaaatctgacgcagtttttgacccggtgacgcaacgcctgattgatggaacggataacaccactacgatgcaggcaatgttgtgcgaggcgcattatcacggtgtagaaattaatttcccgttaaatggtcgattcgcaacaaaatcacttttactgcattatgacgctataaaaaaccctaactgggaggggcggccaggccgtattaaactaaccggctcagtcacggggcattctactggtgatgttgagacgcagggtacggctatttatcatatacccggagaggcttccccgctgctttcaatgattggcgagtttagcttaacaaaccccgctgcgatgggggggtatttaagttttggccggctaaatcttattggctcacaggattctacggacgttttactattacagggtagccaggggcaaattgaactagagagctacacggtaaaagtgctcaatccgtacgggaacggtgtaactgaatcaacaacgtgggaaaccacccatcgtaacgttttaattcgtggcctggcatcactggccagacctggggaatggaaggggatcggcctcaacatcaaatcggatgacacccagggccagaccaatatgaagatttacctaaatgttgacgtataccgcatgggtactggcattgatataggtcggcgtgaaaaaccccagggtacattcggtcccctgatattcatgggggggcaaacaagtctgtctgatgaatacggcatgcgcctggggggcggagtcatctcattcagttgtattggcatgcagcatgagggcgcgagaaaaaacgggctactcattgaccggacgttacccgatggttcgctggaaagcgacctcgcgcgaagcattagaatccagcaaaactacttcacagggtgcggaacgattgaggatggaaccagagacagttacgcaatttatattgccaatggcgatggtgtgcatcttgatgagccaacactaaataccgtcgggaacggtatcggcttcgattctggtgtagtagataacctgaaaataagccgccctacattccgcacagtcagggattatggccgtgagcagggatatggtatacgggcgttcggtgagcaaaatgcagcaaaacgtattgagcttaccaacccaatatttaaccaaaatccactcacacccatagatagtgtggcaaaagaaattttcgggagagccgcggttggtggtcgagtttcattcgctacaaacaacccgacaccttcgctttcaaaaggtagcagtaccggtggagattcatttaaacaagtaaactttaacaactcagcatcaacggtagtgactaatatcctcgatggcaatattcatcaggttttattaatcactttcagcaataccaatactacgttacagcacgggtctagcatcatcttacagggcgggaaggatgttcagggggcccctaataaggtcatacagctctactataacggtagcgtctggcgtgaaattggcgacccggtcagatctctggttggaaccaccgctaacaggccattcagcaccgcgtttcctggcctggagtatttcgacaccacgctgaataggccgatctggcgtaatgccgcaaataacggttgggtagactccgccggtaacgcggtctga

SEQ ID NO: 245548 - DNA, 876 bp, Klebsiella pneumoniae
atgtcattcgaattttctcaaagcccgcaggccatctggctttatcagtatgacgtcgatggtacttatattggctccgtctttatgactattccggcaggcaccggtctgccagcaaataccacgcatattccctgtgagccgggaaaaggccagaccggcatatttaaaaagggtgaatgggaatatgtgactgatattcgcgggacacgtttctggaatattcacggtgccggttttgttatttcctccctgagtgaatccttacctgaatgggccatcactatcgagccaccggtcgcggctgcgggttatgttcttctgttcgctgatggccagtgggcgcaggttgaggataaaacaggtcagctttactacgagagcgacggtacgaaacataccgtctctgacgcctggttcacgctgccggagggttgcacgttcgtgaccccaccagaggacaaaacgacgttcgtcactcgctggaacgggactgagtgggtttatgtcaaagacctgcgcggtcaggttatctggaacaccacgacccgcgagcctcagaccgtcaccgatattggtcccatccctgatggctataccctcaaaattccgggccagtttgatgaatgggatggctctgcctgggtaaaaaacgcagaagctgagcgggcatacctcatagcccaggctgatcgcatgaaggctaagctgctctctgaggcttcggagcagatttcactgctcagcttcgctgtcagtagtagccaggcgactgacgatgaaaccgcacagctggcacgctgggaggcgtatcgccttgcagtgagccgtgtggataccactgcaaccgatattgtctggcccgagaaaccgtaa

SEQ ID NO: 245549 - DNA, 813 bp, Klebsiella pneumoniae
atgtatcacctggataatgcctcctccgttcctgatatgcccgccatcaagccggtattatttactgagcgccgctggtttaccgaaggcggcgatggcattcagccgagttatccgggcgcggactggtttaatgccattcaggcggaaatgctgaacgtgctggcgctggccaatatcacgccggataaaacgcagctggaccagtttgctcaggccatccgtattttctcctcggactatatgataccgccgggtatccctctggcatggccggggtccaccgcaccgaccggctttatactgatgctgggtcagagctttaataaaacggcatatccgcgccttgcgattgcgtatccctctggcgttctgccggacatgcgcggccagaccatcaagtttttaccggcctccgggcgggcgctgctgtcttatgaagccgatggagtgaaggctcacgcacacacagggagcgtggcctcaacggacctcgggaccgtgaccaccagtaactttgatcacggaacaaaggccaccagtctggataacgaacatgaccatgatggtggcctgttagcgccgggggccgtctgggacccggattacgttgtcgggtcagataatgactcccatcgtacgcgaaacaagaccagcaaagccccggcccacggtcataccgtcgatatcggcattcatggccacatcgtttatatcggtcctcatgctcatgctgtgactatcaacagcaccggtaataccgagaacaccgtcaaaaatatcgcctttaacgccattgtgaggttagcgtaa

SEQ ID NO: 245550 - DNA, 585 bp, Klebsiella pneumoniae
atggcgcatcgtatagaggactggcaggacgtcctgcagcagctgatgccacgtggtaaggcatggccgcgcgaccagacggcggcgctgacgtcactgctccggggcttcagttcccgcctgcagttggcggaggcgaacgcggatttgctggtcaccgagatgcgcccggagaccaccgacctgttgctggccgactgggaagattatctcggtctgccggactgcaacgccatcccggatggctttgaccgccgtcgtgacgccgtggtggagaagtatcaccgcaagggcgggctggctacctggcagattgaacaggccgtgaaggatgcgctgggcttcaccattcaggtgacggaaatcctgccgcatcacgtcatgcgcgacatcatgtatccgatttattcgcacaaataccgctacctgctgcaggtgacggtcacggatatgccgatgatccgctttcgcagtatcagcaacgtcctgacgccgttaatcagcctgcaggcgcagatactggaatgttttttacgtcgttaccggctcgctggccacgattatgattttctttacgaggtttaa

SEQ ID NO: 245551 - DNA, 1257 bp, Klebsiella pneumoniae
atggccactatatgggaagacctccgcgacgcctcgttccggggcgctcccttctttttccgcgatgtcgaggggactggcggtcgccgcgctatccctcacgcctaccccaaaaaagaggtgggctggacggaagaccacggcgcggtgctgactcagcagcagattaacgcgatcctgctcggcagtgactacatcgaccagatgaaccgcctgttggccgcactcaatactgctggtccgggtgagctggtgcatccttggttcggcgtccagaaggttcaggtgggtcgcgtctcgcatcgcctttccaccgaggaaggcggcattgcctacgtttcatttgaggtgtacgaagctggcgagcagctgtttccgtccggcaccgaagataccagcgccaccacgctcagcgcggcagacaaggtcaaggacgcgctggccagcggtgattattttgcggcgctcgatggtgtcggtagcatggtggacaccctgctggaggacatggagggctttgtcaccagcctgccgaccctgccggatgcgctcagcgagtggatggaccgcctcaaccggtttaaggacctcgccggtattgtggccgccgctccgggtgaaatgatccgcgatatcaccggcctcatcagcgatatgaaggacctggtctctgagccgccgttcgccctgcgggtctatgaccagctgcgcgataagtgggaaggcgaccgggcagcgcagtctgcgaccaaatccctggtcgataacatcagcgtgaacaccgataccggttttgccagtagcgtcaccccggcatcgacgccggagaccacggcggcgatggagaccaatatcattgacttccggcggctggtgattatctccacgctggtcgctcaggctgaagcagtggccaccgcgaccttcgagaccggccaggatgcgcagagcaccggcgatcagctggcggaacgtctcggcgagaccgccgcagaagccgtcgaaagcggcctgcgtgagctgtggcgctcccttcgcgagctgcggttcgctgtggtcaatgatgttcgcatccgcagtatccagttgccggagctgcgccgcgtcacacctgtccggaccgtgccggtgatgctgctggcttaccgtgagaccggcgacgccgagaaccgtgatgagctggtgacccgcaaccggctgcgctatccctcctttattacgccttcacagacgattgagatcatcagcaatgactga

SEQ ID NO: 245552 - DNA, 384 bp, Klebsiella pneumoniae
atggcggagatgaaaatcaccttaaaacacggttacatcgccggtaaaggcactgacgatgagatcctctacaaagaagttacctttcgcgagctgacctcaaaagacgttatcgacgcccagcttgaggcggagcgcgtggtcatcggggagaacggtaaggcggtggcgtactgttcagaagtgctgatggggctggcactgctgcgtaagcaaattctctgggtgggtgaaatccccggcccgctgtcgcttaaacagctttacagcttccaccctgaagaccttgagctgctgtccagcagcgcgagcaaaatggatgacctcgtgacggagactgctggccgggggcgacctgatgccgctggcgacggcgctcagtag

SEQ ID NO: 245553 - DNA, 354 bp, Klebsiella pneumoniae
atgagcattctgggtatggcggccattcgtgctaacggccgtgaaatcaaaaccacgggaaaatccaccctcaatccgggcggtaaaacacgcactcagcatatgggcgccggtaaggtttgggggctggcgggcaagatggcgggtccctcgatccagatgaccattgctgcggcggaggatatggacgttgtcgaaatcagtaactgggagaacgtgaccatcatgtttgagggcgataacggcctgacttacatgatgaccggtgcggcgaccgctgaaccggccacgctggacgaagacgcgggcaccatcagcgccaacttccttggcaaaaaactggtgaaggtgtaa

SEQ ID NO: 245554 - DNA, 276 bp, Klebsiella pneumoniae
atggcgaagaaaaaaccgttgcctgctgcagcgcgtagtgccatcagacggctcgctgccgcgtttgtctgcgctgaacttgagctgcaggttgtggcgaagttcgtcgaagaaaagacgggcaaaccctatgaccgcaacgcttctgacagttatctcaattcgtttctggattccgatccagaagtccgccgtgtgtgggaactgatgcagaaagatattgtatccacccgcaaagactttgccgaccggctggggagagaccgtgactgctga

SEQ ID NO: 245555 - DNA, 513 bp, Klebsiella pneumoniae
atgaaattctcaaacattttaattcttgcagttattttgggtggtggatacacataccttttcccgaaagataaaacaccaaccataaatgaaaaactcattagccaatttgataaacatgatgttatcaacagtagcgagtgggggaaaggcaacgtcattgatggagttcaaatctattctgttcgcaagaattactcagtattccagagtatctggagcttagggagtggtgaggcaggcgtgatggttttaactgaaggaaaggatccaaaaattgaggcagccttcgctttaagtcagtgcaatcaactggccagcgcggtaatagacgcaaaaaccgccgctacttctgatgccgtattttctgtttttcaaaaagcgctaagcgctgaaaaagatgataaaggagtattgcgtgctactggagaagttggtggaaaatcatatgatgtatctgctcgcgttatcgactccgttctaacatttagttgtggaataaaaacaacataa

SEQ ID NO: 245556 - DNA, 288 bp, Klebsiella pneumoniae
atggaaaagcgccgtaagtggaccaagcccgagatgcagttcgtccgtgataacgccgggaaaattcccgtgcagcaaatcgcagatcatctgaatcgtacgcggtcggcagtgttgtctcaggctacacgctgggggttatcaatcaaaatagaatcggccagtgagcatgaccggtggttatgtcgtgagctttataaagagggtctgactattccggttattgccgaaaagatggaattaagtcgccgtgttgtttcgaatattgttttttcagaatgctattaa

SEQ ID NO: 245557 - DNA, 225 bp, Klebsiella pneumoniae
atgcgagatattgagcacctgaaacgggatcgtgctcagaacccaaacatcgtagttagtaacaacaacaacaataataacggcaatggttataataacggctatatcttaccaaaaagtttccctcatctactgcattttgttcttacattctttactgctggcctttggattattgtctgggtgtttcactatatctttcgtgacaaagaaaaatatcgatag

SEQ ID NO: 245558 - DNA, 1641 bp, Klebsiella pneumoniae
atgaaaatatctcacatagcactcatcgtatcattagtttgcttcggtaaaacagttgcggcagcgtcgttcgattgtaacaaggcaacaacttatatcgagcagaccatctgtttgacgcccgagttatctactctggatgatcaattgaacctcttgtacaaaaaaacaatccaaaataacgctgaaaacaaaggttctcttaaacaagaacaattaacttggctgaaaaacatcaggaacaaagcgacgtcagagcaagggataagagatgcttatatgaatcgtattagtagtcttaatatagatttaaacaagggggtagcaattcaggaggcaggaaagaaagatcaaccgcagacagcacaaacacagatagcgtcactaccaacgcatcctgtatacataaaatatactcctggaacacatgtaaagtatcttaacgccgctatcactggcccttgtatggatgagcatcaaaaattcgacagtcttgattttaacctcaagatgaattttagtaaaatgagcgatacccaaatcgctcaagaaactacagaacttaaaaatgcagaacgtgtacgctggatttgcatagaaaacgagttgaacaaaaaaaatatcactctagatctaaaatcactatttgaaaaaagggatttagggtctattgaagcaactgtacaaccacaagcacaacctcacttagctcaaaaacacttagacccggttccatctacacagtccaaaatccccaagcctgtagacgtagtagttgctgatgcgggtttttatcagcaattagatgatttttctcagacttcaacggctgaaacactatccgcagggttatcccaagaagaactcaagcaggcagcacacgaaataaacgaagatattaagaatttcatcaactacactccttctgaatactattctacacttcagtatacaaacgatggcctagcgtctattgctcgtggacgtaatgatactaaagcgacaacatattttattgcaaaggatattcttgcagggaagggcactgagtttaaggccatgcaaaatttaggtgtaagctatttgtatggaagagatgcattggtgaaagatgataaaaaagcccgtttgatacttgggtttgttgcttccaatggttatcactatgctagatacatcatatcaaatgattatttgttccgtaataatgcagcatctaaatctcaacttcaatacattagtcgtttaatgaacaatactccatggtatgctgagtatgaagctttgaagaaagctgctgaatttagggttgcgaattatgatggttattatataaaggtaacctgcgtggctaacaacacagtgaaaacacctctaaacattagtaagtgtgcgaagccatatacgatacatttaaaagatgacaaggggacaggatacgatttgtctgatcattttgcacctgtatggagagattataatggaactagcatattatacactccagaacacttttccttctccaccaagaatggagagggaaatacgctattacttgttgaggtatttaaagttggaactctatcaccagagaagagttatcaagtagaatcatatcaagaaatatcttttactctttga

SEQ ID NO: 245559 - DNA, 231 bp, Klebsiella pneumoniae
atgagcggtaagtgttatcccgaagagtttgaaattgaagcagtcaaacaggttgttgatcgaggttattctgtttccagctttgcaatacgtcttgatatcaccacccacagctttcacgcttggataaagaagtacggtccggattctttcactaataaagaacagtcagatgctcaggctgagctccgctggctccagaaagagcggaagcgggttactgaggcgtga

SEQ ID NO: 245560 - DNA, 561 bp, Klebsiella pneumoniae
atggcacatatcgcatacatccgcgtttcatcactccagcagtgcaccgaccgccagttggttgatactggtattcagttcgataagaccttcacagagaaggcgagtgccaaggacaccaaccgtgaggcgtttactgtgatgatggaatacatcagagaaggtgacaccctgcatgtacatgatatttcacgtctgtgccgtagtacttctgacctgttgagtacggttgaaacactgacaaaacgcggtgtaaccattcactttcacaaggaaggaattactacaggagagaacagcccgactggtaatctcgttctgactctcctggctggcatttcccagatggagagagaacagctgttactacgtcaacgtgagggttataacgcagcccgtgctgctggacgcattacaggccggggtaatgggagagacattgaccgtactggtattgttgctgcattgggtgctggcggctctgtccgttcagttgctgtcgaattcagcgtcagtactaacacaataagtcggatcaagaaagaaatggcaggaacctaa

SEQ ID NO: 245561 - DNA, 1518 bp, Klebsiella pneumoniae
atggtattaattttaaacaaaaaagccagtactgaactgtatattcagtactggcacataaacggcaatgatgccacttctaactacaaggaacgtaaaatgcttaaacataccattccccttctcgaatatattcagggcgattgtggatcgtctaaaaccaaaaaaattctagaaatgatgaaacgctctgatcaccagtatttattggtgcaatctgagctacagctattgagacaatcagcaaaaacactaggtgatatttgcaagattataacttcggaaacaacatcgaatgttgaggaagaagttaatcagtttctaatgaacccgacacatcggattctaactattactgaacgtgcatttctgagaattcatgatctgactctattgaagaactggaaaatatacctagacgatgtagttaattttcattgtttcaaggtcatcaatactgagaaaaagcatgaagtacataaacaactgtttaccggttttaccggtcttgataagcagtactgtactgcagttccaatacgtaccttcacagatgacctggtttcacaactaagtcaatgctttaggtttgttgaactgtatgattatttcctaatgaacaataattttttcagtactaaaatccaagacggtcatgaagtttaccgggatgactgcaaccagttatcgatcatggcctgggtcaatattcaaaaatacgttgatgctggcctagatatgactttcattgccaacaaattcacagagtcactattgtaccgttcgaaccctagtctgtttacagaagtcaaaatgtcattacagcagcgtgcagtgcccgtaagtgaacggcttaaggtgttctactttctggatcagaagcgattcaccagtactttcagaactgaataccctaatgcactgcctatcattgcacagtacatagagcaaaacatgagtgggcagtactactatacgtcgaatagttcaactaaaggcgacatgagtaagattctcatatcaggccagtacatttcacctaatagccgtggcatgaacgcgtaccagagctacacaacagcggtttggctcgccagcatgaagcctagtccagttgaagtggtgctgtgtcgtgagcagttcggcattacgggccaggatttggtgcaggccagggagtttgagaacctatatcagttcatcaaccgttcgaatctgcgtgattacgattctcagtctgagattgtggtctacgttgcagatagagaacaggctgagtcattgggtactcctaacatccatcatatcgatctgggtctggaagatgacagtactgagaagttgaaaccaggccgcccggtcgtgttcagtgaagatgacaaagtgatcaggaaaaaattcagtacgttcctatctaactgtaagggggatgtcagtactgagcagttcgacaagtggtgcaggaaacgtgcactgacagagcgacaaatagcaatgttgcgtgaaatgaagaagtaa

SEQ ID NO: 245562 - DNA, 147 bp, Klebsiella pneumoniae
atgaaagaagaaaagaaagagctgatcagtttgcgtcttaacgaaaggcagcttgctgtgctggatagaatgatttctgatggtattgcacaaaatcgttcagccgcaattcagtaccttattaatcacaaacaaattatgggctaa

SEQ ID NO: 245563 - DNA, 594 bp, Klebsiella pneumoniae
atgtttggatctttcggtaagaaaaaagttgattatgaaaaaatattttcatcggcggctgatacgcgacaatacatatacagtgatagatccaaaacagtttctatcttaggagataatgattttattgacgcttggctttctagtaaaaatattggaatcgtaacccaagttatcagagaagaagcgataaaaaacaaccttccttcaatcaagcagatgatttggttgtacagcctatactttcagaacgtggaaaattttgcgtccacaaagaatgagcaaacgcaactccagattacttttttaaaagaaagagttttattttgcgaaagggcaataaacctcgggcttactggacaatcttattatgcaatgatttcttccgctaatctatactctatcctatcagggcttggaagtaacatcagcgataatgacgcgataaatgcattaaacggcataattaaatttgctaaaatcttcctagcttcaggagagaatgatcaagagctaattgatgatgcgaatgccctacttaagaaatatagtgccttgtctcaaatttccaatatgctcaacgaacatcagtaa

SEQ ID NO: 245564 - DNA, 1173 bp, Klebsiella pneumoniae
atggcgcaagactatcaccacggcgtgcgtgttgttgaggttaacgacggcacccgctctatcacgacggtgagcacggcgattgtaggcatggtatgcaccggcgatgatgccgatgcctctgtgttcccgctcaataagccggttctgcttaccgatgtactgaccgccagcggcaaagcgggcgagtccggcacgctggcccgctcactggacgccatcgcagaccaggcaaaacccgttaccgtagtggtgcgtgttgcccagggcgaaaccgaagcggaaaccacctccaatattatcggcggcgtaaccgctgacggtaagaaaacgggcatcaaagcgctgctttcggcgcagtcgcagctgggtgtgaagccgcgcattcttggggtgccgggccatgacacgcaggctgtttccactgaactgttaagcgtggcgcagagcctgcgcggctttgcgtatctgtctgcctatggttgtaaaactgtggaagaagcgattgcctaccgcgaaaatttcagtcagcgagaagggatgctgatctggcctgatttcatcaactttgacaccgtgctgcaggcggatgcaactgcctacgccactgcccgcgcgctgggtctgcgtgcaaaaatcgacgagcagaccggctggcacaaaaccctgtctaacgtgggcgtcaacggcgtgaccggcttgtctgcggatgtgttctgggatctgcaggacccggcaaccgatgccggactgctgaaccagaacgacgtcaccaccttgatccgtaaggatggtttccgcttctggggttcccgctgcctcagcgatgacccgttattccagtttgaaaactacacccgtaccgcgcaggtgctggcagacaccatggcggaggcgcatatgtgggcggtggacatgccgcttaacccttcgctggctcgcgacattatcgaaggtatccgcgccaaaatgcgcagcatggtaaatcagggctacctcatcggcggtgattgctggattgatgacagtgtgaatgacaaagacacgctgaaagccgggaaactctggatcgactacgactatacgccagtgccgccactggaaaacctgatgctgcgccagcgcatcactgaccgttacctggtggatttcaccacccgcgtaagcgcataa

SEQ ID NO: 245565 - DNA, 594 bp, Klebsiella pneumoniae
atgttactggtagtattcaagtttataaatgcccctgcaccagtaacctctacagggcagttaagtatcgatgtaccaggcatagctatggcaaagttggcgcattctaaaagaattggcgcacctttagtatcgtatattttgcaatcattaaaacttacactttcacctgagtccaaaagaccggaaggaaagtgcatggcatgtgttgttccggttaattccgtggtaaatccgcaatcagtgaatttatatcgccatgtcgagtttgtagccaataataatttatcaaagttcttgaaactgcaatatattacgttgcaatcgccgttatatgttccatttgcgttattattcttatttcctgtgattatgcctgcttgccctgttcctttaaggctgccgactactgacacgccgcgcataatgttagaatgcacccgataccctaaggaatatggagcggatgagtgcacccatatcgcggcgtcaccagtgaacccagtcgcgtcgataccagcacgcccaaaagcgcacccgaaagaaaaataccctaaatcgatatcaagacctaccgatccggtgagaacatag

SEQ ID NO: 245566 - DNA, 123 bp, Klebsiella pneumoniae
atgaccctcgatcacttcatccagtaccaggcggaaagcgttaagcgcgccagcatgccgccagtagcgaaacataaccgtaccaaaaccaatcagccacagaaagcaggggaatcattgtga

SEQ ID NO: 245567 - DNA, 351 bp, Klebsiella pneumoniae; identical to SEQ ID NO: 146911

SEQ ID NO: 245568 - DNA, 2406 bp, Klebsiella pneumoniae
gtgagccatcacgacgttaaaaactacggcggcgcagatgatgccgccgctgcttttgtctggaataccccgaaaaaagcggttaacccatacacggacccggcggaagttgcgccggtatctgcgctttcaaacctgatcgctctctacgccagcgacaacgagcaggagcagctgcggcgtgaggcgatgagcgatgaggtctgggaacgctatttcttcaatgaatcccgtgatcctgtccagcgtgaaatggagcaggactggctgattagccatgccaaaatggcgcgcgagcagcagcgttttaatcccgatctggttattctggctgatgttaacgccatgccgtcccatatcagcaagcctctgctggagcggattaaatatttccatagtctgggcagagcaaaagcctattctcgctacctgcgtgaaaccatcaggccgtgccttgatcgcctggagcgcgtgcgcgccagccaggtttctgcgtcattccggtttatggcgagccacgacgggctggagggcctgctggttctgccggaaatgaaccaggagcaggttaagcgtttatcaaccctggtggcggcacacatgagcatgtgtctggatgctgcctgcggtgagctgtttacggatgaagacgttacgccagaagagatccgccggtcatgggaaagggtggccgctgaggccatgcgccttgatgttatcccgcctgccttcgagaagctgcgccgcaaaaagcaccgccgtaacccggtaccatacgaacttattccgggttcgcttgcccgtatgctctgtgctgactggtggtatcgcaagctgtggcagatgcggtgtgaatggcgggaagaacagctgcgcgccgtctgcctggttaacaaaaaggcgtccccgtatgtcagctatgaggccgtgatccataaacgcgaacagcgccgcaaatcgctggagttcttccgctcgcatgagctgaccaatgagcagggcgatacgctggatatggaagacgtggtaaacgccagtagcagcaatccggcgcaccgtcgtaatgaaatgatggcctgtgttaaggggctggagttaatcgcggaaatgcgcggagactgcgcggtgttctataccatcacctgcccgtcacgctttcacgcaacgctcaataacggcaggccaaacccgaaatggaccagtgcaacggtccggcagagcagcgactatctggtgcatacgttcgccgctttccgcaaggcgatgcacaaagccgggctgcgctggtatggcgtccgcgttgctgagccacaccatgacggcaccgtgcactggcacctgctttgcttcatgcgcaaaaaagaccgcaagtccatcactgcgctgctgcgtaaatttgccatccgtgaggaccgcgaggagctgggcaacaataccggcccgcgttttaagtctgagctgatcaacccgcgcaagggtacgccgaccagctacatcgcgaagtacatcagtaagaacatcgacgggcgtggcctggctaacgaaatcagcaaagaaaccggcagatcactgcgggacaatgccgaacatgtcaatgcctgggcttcgctgcatcgcgtccagcaattccgctttttcggtataccgggccgccaggcttatcgcgagctgcgtttgctggcgggccaggccgcgcgacagcaggccgataaaaaagcaggtgcgccggtactggataacccgcgtctggatgccgtgctggcggcagccgatgccgggtgttttgccacctacatcatgaaacagggcggcgtactggttccgcgtaaacatcacctggtccgcacggcttatgaactcaatgacgagccatcagcctatggcgatcacagcatccgtatttatggcatttggtccccgattattgagggccggatttgcacgcatgcgatgaagtggaaaatggttcgtaaggccgttgacgttcaggaggcgccagccgaccagggcgcttgcgccccttggactcgtggcaataactgtccccctgtggaaaaaatgaacgaaaacgaggccgtaagcggacaggatttaacggatattgcgggtatggatgagcgggagctgcaggagtatctccatagcgtgagcaaaaaggagctgagggagctaaacgcacggcttcgcatggttaagcctaagcgccggaaagggtacaagcaggatgtggataatcagcagcgcctgcagctggagtatgaacttaaatcgagaggctttgatggttcgaaggcggagatcgatctgcttttgcgcggtggcagtattccatccggtgcaggtctacgtgtcttttaccggaaccaaaggctgcaggaagatgacaaatggcgccaatggtactga

SEQ ID NO: 245569 - DNA, 972 bp, Klebsiella pneumoniae
atgagcgaaataatggatttagtcgtcatcgagaaaaagaacgcgatggcggttttcaccaataacgaccaactcgatccgcttatcgaagcgatcgaaaaagaggctcgcagtctggtgccggacgtgaccaccaaaaaaggccgcgacgccatcgcatccatggctcacaaggtcgcgcgctctaaaacgtacatcgacaacgcaggtaaaggcctggtcgctgagctgaaggctctgccaaagcaaatcgacgaaagccgccgcgttgtccgtgaacgtcttgatgcgttgaaagatgaagtgcgtcgcccgctgactgaatgggaagccgagcaggaacgcattaaggctgaagaagccataaacgcactgcatgccgaagcgctggtgatgaacgagaacatcgatctgcagcgtgcggttcagttcgaagctgaccacgaaatggccctgctgatgaatgacgctttcgaccgagagcaggcagataaagcagctgaggctgagcgccagcgcattgcccatgaagaagaaattaagcgaatggcagccgccgcagcagcccgagaagttgagcagcgcgcacagcgtgaacgtgaagaagcggcgctccgggaagctgcgttgaaagcacaagccgagcaggcagagcgtgatcgaattgcagccgagcagaaagcagaggctgacaaaaaggccgctgtggaagcagaacgccgcaaagcacaggaagaagccgatcgcatccgtcgcgaggcagagcagcgcgaacaggcccgcctggcggaggagaagcgcaaagcagatgagcaggcgcgccgcgaagccgacgttaagcaccgcaaggctgtaggcactgaaatagtcaaagctctcctggccagtaccagccttacccgggatcaggctatcgaggtgctcaccgcggttaaagacggctgcattcctcataccggtatcagttactga

SEQ ID NO: 245570 - DNA, 972 bp, Klebsiella pneumoniae
atgagcgaaataatggatttaaccgtcattgaaataaaaccagaacaggcgccgaccctgtaccgggctggcggtcttgacgcttacctggagcagattcgccaggccgtgaacgaggttccggacctgaccaccaagaaaggtcgtgaccgtgtcgcttctctggcggcgcaggtatcacgaagcaagacggcaatcgaaaaaccgggccgcgagtacctgaaacgccttaaagaggcggtgcgccctgctgaggcggaaattaagcgcttcgttgatgcatgtgacgaactgcgcgatgagacgcgtaagccgctgaccgaatgggaagccgaacaggaacgcattaaggctgaagaagccatgaacgcactgcatgccgaagcgctagtgatgaacgaaaacatcgatctgcagcgcgcgattcagttcgaaactgaccacgaaatggctctgctgatgaatgacgctttcgaccgtgagcaggccgagaagaaggcagaagccgaacgccagcgcattttccgggaagaggagatggttcgtcgggcggaagagaaagcgaagcgtgaagcagcagagcaagcgcagcgtgaaattgacgccgctgcagccagagagcgtgaggcgattttggcgaaagagcgagccgaacgtgagcagcgagaattggctgagcgtgcggagcgcgaaaagcaggccgctgtagaagcggagcgccgcaaagcccaggaagaagccgatcgcatccgccgtgaggcagagcagcgcgaacaggcccgcctggccgaagagaagcgcaaagccgatgagcaggcgcgccgcgaagccgatgttaagcatcgcaaaactgtcggtactgacatcgtcaaagccctggtggccaataccagcattacccgggatcaggctatcgaggtgctcaccgcggttaaagacggccgcattcctcataccggtatcagttactga

SEQ ID NO: 245571 - DNA, 267 bp, Klebsiella pneumoniae
atggttggtgcggccattggttttttgatttgccaggcaattaatgcattattaagttatttctttttacttaagccagtgctagggaattgtattgttgactatataaatagtttttttattccgttcgttcatacactacctatgattttattattgttggtatgtgatatttatattgataaaatctcattaacattttttatcctgaaaatagtaataggtgggggcgtttatatctttcgtcaattgctcttaaagagataa

SEQ ID NO: 245572 - DNA, 801 bp, Klebsiella pneumoniae
atggctgaacgcatgacctttccgatgtatgccatccaccgtcaacagacccaggccctgtggcaggcggtgcagtcgctgttggccgaacgcggcgtgatggtggcgggggaccctccggcggctgaccccggggatctgctggctcactggcgccagccgacgctgttgctgagccagacctgtggctacccgctggtgacccaattgccggaggtgcagacggtgggctgcttccactacgctgcgcccggttgcgaagggcgccgctatcgcagcctgctggtggtccgcgaagcggatagccaccggatgctgggggactttttgggccgtcgggcggtgtgcaatgccgagcactcgcagtccggctacaacgtactgcgtaaaatggtcgcgccgctctcccgggaggggcgttttttttcagcggtgatgttcagcggcagccatcggcagtcgctgcgtgagctgcagcaggaaaacgccgatatcgccgccatcgactgcgtgacctacgcgctgctgcagcgctatcagccgcaggctctggctggcctggtggcgatcggctggagcccggccgcgccagggctgccgctgatcaccgccggcgtcaccccggcggcaacgctgaatagcctgcgcgaggcgctccagcagttagtgagcgatgcgcgctatcgttccctgtgcgacgccttgctgatctgcggctatagcgatatgtcgcgggaggcctatgcgccgctgctggcgtggcgggatgaggccgcggcgctgggggtcagccagctatag

SEQ ID NO: 245573 - DNA, 600 bp, Klebsiella pneumoniae
atgatacttaaaaatcggccagaggccctgtcattcctggctattgtgattgccctggcatcgatcggctacgcggcgtgcatagtgggctaccaagtctggactactgatgctgactacagcttcgggttacaggttatgctgccccgcttagggctaatcatcagcggctttatgggagcatgtggtgcattcgctagtgcgaataaatataaccagcaatcgaaaaaactcggcaccgtgtatacgcaggtgtcgctcatactgttagctattggtactgctctacttgtgtacgggctatggaactggagaaccaattaccagttaatctacagcacacttgggccagcatttgtgggaaatggaatgttcatacttatgcacaggctcaattgggcaacaagtaagattgctacagtggtcatcacagcaggtctactgatatcagcctttgtagtggcaagcattggtagaccttcaccttttgacgtatggcagtttgtcgttgtgttaaatggtgggactggtttgttcatcctgatggcagcactgggaggcagttttgtgatgaacggtctaatgaagcaactgacttga

SEQ ID NO: 245574 - DNA, 351 bp, Klebsiella pneumoniae; identical to SEQ ID NO: 167836

SEQ ID NO: 245575 - DNA, 549 bp, Klebsiella pneumoniae
atggcaactatcggttacgcccgagtatctactgccgggcaaagtcttgacgcacaactggctgcgctatctagctgcgagaaaatctttcaggagaaaatcagcggagctaagaatgatcgccctgaacttcaggcaatgttggaatgggttcgggaaggagacactgtacagattacgaaacttgatcgcctcgcccgcaacacccgccatctattggaagtatcagaatttctgcaaggaaaaggtgtggcactaaatattcttaacattggtattaacacggctacaccaaccggaaagctgatgctgacgatgattggggctatcgccacattcgaacgggaaatgatgttggagcgtcaagctgaagggatcgcactggcgaaactcaaaggcaaatataaaggcagaaaggccacggcacgcagcaaatctcaggaagttctggacatgttggagcaaggactgaacaagccagagatatcccgtcgactaggaatcggaatcaccagcatttataggatcgttaaaaacaagccaagttaa

SEQ ID NO: 245576 - DNA, 432 bp, Klebsiella pneumoniae; identical to SEQ ID NO: 167837

SEQ ID NO: 245577 - DNA, 1107 bp, Klebsiella pneumoniae
atgatttttttccaaaaatgtatttacatgcttattaattggtttacgcggcagcgtaagcctccttttatctttcttgcgactggattggccattttaaaattaggtggaggactctcttggcaggtaatactaagttacaaagattatggagttaaggcatcatctcctgaaggtagttttattacggagatacttgttccgcttttaggaatagtgctttgtatcatcggagcagtgtgggcagtatgtagtgcaattacagactggcgacaaaattctaagaagagtatcttggtcattaggggggagggattaagaagggtagctggtagtaatatagactcgcagatctataaacggcactcaggcagattgaattatttggatgtcaacatcacccagaatatacgagacggttatgtgattcatcctgcagatgtatttcgtaattatgtacagcctttaagtcggaatctgaatcaatatttcggcgcaacggcattgaatgatattcaagtagtctatgcaggtatgctgcctgttcccttccttttctggattggtaacgtacttgatgataagggtgtcgttactttaattgactggaatcgtgcgagtgagacttggcaggtaatttcagataatacaccggatgatggggattcttttaatcaagaaactataatggaaggaaatgttgaggatgttgttattgccatatccttttcctatcatgcagatctaacttgtattaagaaaagctttaccggattgcgtatcgagcatctttatctaaagcatatcaatttcgataatcattggtcgattgaaaaacagcaaagactttctttacagttcattgagtttgtaaaaaaactgcagcaacaaggagctaaacgtatacatctaattttagttgcgccgagtagtgtcgtggttagttttggacgacgttatgatagccgtaatctacctgaactgatcgtctatcagtatgagaaatctgatgatgatacctatccgtggggagtatacgcgatttctcacggtagagaagaaggcggctttgtattacgaacagaggctcttaaagttcgtttttaa

SEQ ID NO: 245578 - DNA, 579 bp, Klebsiella pneumoniae; identical to SEQ ID NO: 167839

SEQ ID NO: 245579 - DNA, 486 bp, Klebsiella pneumoniae
atgaataaattcacttctcctcctgcgctttcactaagcgtacaattttactcccttaagaaccgctttcgtgaaggctctgggcgtattactaatcggaatcgcacacttgtttggcagagtgaaatatctcctggtcctttctgtagaaaatataagatcctcttgcgttacacgaaaggttttgcgccagaatgcattgtactttcgcctgatttggacgagttggctggcggtaaaaaaattcctcatacgtatgggtacgatagtgccacaggtcatagaaaactctgcctttttttacctaaatcgaaaacacttgatggtctatctgagtggcggcctcagctaaaactaagtgatacaattattccttgggcttcactctggctgctatattttgaagagtggttgtttagtggtgaatggaagggggggggagctcatccttcagatgatgaaaatggaatttattttgatgaatga

SEQ ID NO: 245580 - DNA, 1275 bp, Klebsiella pneumoniae
atgcaaaatccagatcctatacgtctcctttcaataaccgagaaacagtatattgccgatattctaaaggctctgactgagaccttagatttaacggatacacaatatcagcagattcgccaagcttaccgaggagtaggaacttggcttgcagaaagtgatgatccacttttacaagatacacgcatttactctcaaggtagtgtacgtttgaacacaaccgtcaaacctggtccagatgagccttttgatatagatttagtgtgttatcttcctcatgcagggactggaagtggtagtgaggttcttaatgcggtagagcagcgcttgattggtcatgagcgttacaagactatgtttgaacggcttccacgaggttttagaattaactatgcgggttcgtatcatcttgatatcacgcccggaactgattacagcagtgaggattttgaaggtcacccactttgggtcactgaccgtaatacagagtggaaagaatcaaatcctgatggatacgcgatttggtttgatgctatcactgagaaaaaaccgcttcggctgcaagcaagttttgagtcttacgcttctgattctgctctcaacaaatcgcttgccccgcttcccgatcatacatctaaaaagctgctcaaccgcattgttcagatcctcaagcggcatcgtgacgaatggattgcaagccagaataaggatgtataccaatacaagcccatttcggcgattatcactacacttgctgcccatgcttaccagaagataattgatgaccgtcttgcttatgataatgatcttgacatcattatcgatgtaattgagtttatgccgaatttcattcaaacaagttcggagggtttgcaggttcttaatcctgcaatgcctttagaaaactttgcagaaaaatggaatgtcatcgacgggaataaaggccaaaatctatatgcctccttcaaaaagtggcatgaggctgtgttgcagagtttcaaggctattagtgcttctgtcgggcaggacaatcttttagaaaatatcagtaataatttcggtgcagaaccggttaacattgttcgtgatcatatgttaaacaatcttggagaacttcgtcgtactggtaagttaggtatagctggtggggcggctacacttatcacaggaaaggctaatgctattcagccgagtcctgtgcctagcaatacattttatggttcagactcttccactgtcgttccagttccggctaatacgttcttcggggattaa

SEQ ID NO: 245581 - DNA, 2613 bp, Klebsiella pneumoniae
atgaatattgaagagcataatgaaaaggcattaattggggcgttacagctcgcaatagaacatggcattgccgcagaggatactgaattaaaagcaatagatacagattaccctcggtttaaagatgctgatgataagcatggtcgggcaagtggctggttaaatccatatattaatgaggaaggtaagattctcagagtatatatcaatagttaccatgaaaatttaggtagcgcgatatgggatcatgatggtctgcattcattgccaccagaagaactacaggagattgataatgaactgaaagcattaaaggagaaacgaatacaggaaaaggatagcctacttgctagtaatagaatggagttggagagaagtttaaaaacacttccatctgtatcacagcatccttacttatcaaggaagcaagtttcaggtaatgatatttttgtggatggaaatgcattaattatccctattcattattatggcggtgagtttgttaatgctcagcgtatttttcctgatggaactaaatgtttttttaaggattgcggtaagaaagctgcctgccacgttattcaaggtgatgacagtacgatattagtagcagaaggatatgctacagcagcatcctgctttgatgcgacaggatatacttcagtcatggcgatcgactgtgggaatatttacccggttgtcgagtctattcgcttacataccaaggctccaatcatcattgttgccgataacgataagtacaaggagaaaaacgcaggagttgaggctgcgaaaaaggtcgcaaaaacaattgaaggggtgtctattttcatccctgagtttcaggatgagacgagtcagcccacggatgccaacgatttgatgctgctggagggaatggacgagttgaagaggcaactggagcccgttatcgctcatgccagaatggggattccacccagtttcttcttctcaaatggatggctgtgtcagaagcgtgagtcgggtagcgcaaagattagtacggctatttacccggtcgcgttgtcacgtgataaggcgagtgaagactggggattggtccttcagtttgcggatatggatgaccatacgcaccagtttgcattgccgagggcggctttaattaaagaaccttcgttgatgctggagccgttagtttcacgtggtttgcattatgatcccggtgaactcagggtactccagagttacatcaacacggttcagcctgtaggaagagctaggagcgtatcgcagacaggatggtttggcgatgtttatgtgctccccgatgaagctattggtgcaacaagcgaggatgtaatttatcagtctatttccggggctcctcctggttacgagcagtcaggtagccttgaggactggcagaaaaatatctctgctaaatgtatcggtaacagtcggttaattctgatggttgctgccggatttgccgggccattgctggaactggacagttcacttgaatcaggtgggtttcacatccgtagtgaaagcagccgagggaagtcgacaggtcttcgcgtttgtaaatctgtctggggagccccagataagctcgtaacgtggcgtgctacttcgaacgggcttgaaggtgtttgctttgcacataacgatgcgacgttagtgatagatgagttgggccagatggcagatgaaaaccccacagaggcggctcagaccgtctacatggttgctaatggggcgagtaagcagcgggcaaaccggaagggaggtgcagcagcgattaaaacgtggcgtttgatcttcatgtctgcgggcgaggtatcgctgtcgaacctgatggagcagcatggtaagaaggttaaagctggtcaggaagtccgttttatcgatattccggcggatgctggaaaggggctggggctgttcgaggaactccatggtcacattgatggtgccagcttcgcagaggctctgaaccgtgacagtaagagtttctacggtacggctgcccgtgcattcctgcggcaacttacggcggataaggctggattggcagtcaggctcaagtctctgatggctgaattccttgttcatgtgccggaaggtgctgacggtcagattaaacgtgccgctaaccgctttgctcttgtggctgctgctggggaactggcgcgggaggtcactggttggcctgatggggaatcattccgtggagtcaaggcttgttttaatagttggctggcaggacgtggggaaggttctcatgagtctaatcaagctattgaatccgttaaagctcaattactaacatggggagattcacgttttggacaggcgatgaatagccctgtatggggggtaaaagttggtggtgatttttgggtttaccctgctgcgtttagggaagaattatgtcgagggctggaccatagaaatgtagctagggtgttgcatgagagtgattttcttccaagtagtgcggcggtaacaaaacgaatacctggcggagagtctcgtaaagtttatgttatttcagggaagcttctgggggatgatccagagacaccagaaccagtactgtgcgacgactcactatactctgtgtga

SEQ ID NO: 245582 - DNA, 246 bp, Klebsiella pneumoniae
atgatctgtaataatgaaagcttcatgcagaaggctgctacctttagccagttaacctctgttgaagataaatgcgaatacgtctatgagttgcttgaaagtatctgtcacattgaagatgggcatgtaacttacagtgaagagcatgactgctatcagtttttctccgggggggactgctgtagcatgcgccttgtcatgagtccttacggagatatcgaacacttcgaattcggctgtaactaa

SEQ ID NO: 245583 - DNA, 771 bp, Klebsiella pneumoniae
atgaatttaatcgagaaaaacaatgtgaatagcgaaaattgtgatatagaatcacttaaagaggagttcattgtctgtcttaaaaaaataaaatataaaacaaataaggtaagtgatagtgaacttggtgctgttaaagttatttcaggtggtagtatctatgttgaaatatctgaactgtcatttatgcctcctgaagacaatactgtaatgggatgggaaatccccaaaggtgttgctgaaagagcaattgaaatcatggtaactttcttgaattgtgggtatgaactaaccaaggaaatgagagagtatttatctgctgggctgcaatcttcaatctctgaaaatggtatggatttacaagattcgtttaacctacgatctcacaataaaacatacgaaaaggaaaagcttaaagcaagaattggaacatatattttttatcgaaaacaattaaatgaggcaataaagaaagttactaattcaggctacacacatacaggacatcttaacgagatgctgtatggtgagataaaaacactctttggtatctccatttctgatcataaaactcttgcaaggtatgaggcaaaaaaaacagagagtagttttttctataattctctttctcacatgattcagcagaatccaaccaaaacattaatgtataaacattgtttaaaacttgagatagaaaaagagagtaatgtcacaataaaaaagttcaagtctaaaatcttggatctcttggaaaagtcaacgttaaattga

SEQ ID NO: 245584 - DNA, 1695 bp, Klebsiella pneumoniae
gtgagaagtcccaaagcttattcctatgttcgtttcagtacccctaaacaagcccagggggatagctatcgccgccaacttcagcaggctcgggactattgcacgactcacaatcttgtgttggatgacaagaccattgaggactttggagttagtgcttttcgtggtagcaaccgtactgatggtgcattgggtcgcttcattgatgccgtgaaaagtggggaaatcgagaagggatcttatctcttgattgaatcggtggatcggctgagcaggcaagcgattgaagaagctctaacgcagttcttggaaatagtcagagaaggcattgtgattgtcactctttcagataatcaggtctttcgcagtggtgaagtggatttcacaaagctgattgtttcgattgtctatatggctcgtgccaacgatgaatctgaaatgaaaagccgccgcagccgtgctgcatggtccaatggacgccaacaagcgagagaaaataacaaagtgatagctaactctcgccttccttcatggttgacgcttgagggggacaagatcgttcctatccctgaaagggttgctattgtgaacgagatgtttcaaatggctcggtctggccaaggttatcaacagattgctaaggcattcagagataaagattacaagacatttgggcagggtaaagcatggcgtccagctggcatccaatcagtggtcaagagcagagccgtaatcggtgaatttcagcctcatatcatttatgaagggaagcgagtgccagatggtgatccactttttggctattatccaaccgttgtttcacctgcaatttttgcagaggtacaacatattgtggataagaggaacaaccatagcggctcttacagaaaaggcctctataacaacctgttcagcggggttatccgttgtcagtgtggtgaattgctacgcttccataataaaggtagcaagggacaagttcgtaattatcttgtatgcccaatggaaggtgttaccggatgcgagttgccgtatttgccatacaacagaattgaaccgcaattactacaggctctgagtcggctatccagcgttatggagcaaaggcaacctaagactggcagagtatcagcgttgaaagacgatctagctgtgttacaaaatgagctggaagcagaaggtaaaaagagggtgaaggcggcccagttagtgctggattttgatgatgatgctgctttccgagttttatttgaagagtctaagaatgcctgccatgcactggaggaaaaaattgtgcaaattgagggggagattatggcccttgaactctctaccaggacaattgctcgctttctgagccctgaggatttaaacagtacggagcagcgtcaacagttcaacagtcagctaaagtcagctatcacaatagaatttattcatgagaatgctgggcttgttgccgtaatcaaaaacatggaaggtcaagtcatgttggagcaagcatttggtcccaaattaatgagcagtattgtccatgattatgaaggccatatctgtgttagaaccatcgcggaagctccctatgttgatcctgtctgggttgaagaagaaagagtggagtatgaaaaagggaagcttgtcgaatttgatgaatgtggcgattatagtgtcgacaatctgaataaaatttcttga

SEQ ID NO: 245585 - DNA, 717 bp, Klebsiella pneumoniae
atgtacaatggtacacctactgaagtagaagaaaaactcagaacatgtcaagtggaaagtattagtatagctgcaaaatattttagatcgcactcatctgggtcatgtcttataagcttgccgacaggcgcagggaaaagtggtgttatatgttgtctaagtcaattcagtaaatataaaaatatattaattgttacatatcgaagagctgtttgtgatcagttgtataaacagattaaaggtgatttttttactaaactaacagacgctggaaaatctaaatcacttacaattaaagatgtgcataatgacatcaacaaagaaagtaaaaatgggatattttgcactaccttccaaaaattgctgaaaatcaacattgatgagatcaataaaatctgtgatgaatttgagttaatcattattgatgaggggcattccgaaccatcgccagaatggggagggattattcgtaagtttaaagcaaaaaaaataatagtcactgccacaccataccgaaacgacttatttagttttgatattaacacagatcactcatatatatatacatacaaaaatgccatagaagagggcataatatcagaacctgttttttcaaaagcaaaaaaagaagatttagtcaatgtagtaagggattacttaagtaaaaatagtgatacattgtgtattgttaagtgtgatgattttaaaaacatatga

SEQ ID NO: 245586 - DNA, 597 bp, Klebsiella pneumoniae
atggctaaaattctggtgctttattattccatgtatggacacattgaaaccatggctcacgccgtcgccgatggggcgaaccgggtggacggcgttgaggtggttgtgaagcgcgtgccggaaaccatgcaggctgaagcattcgccaaagcaggcgggaaaacgcaaaacgcgcccgtcgccacgccgcaggagctggcagagtatgacgccatcatctttggtaccccgacgcgcttcggcaacatgtccggtcagatgcgtactttcctcgatcaaaccggcggtctgtgggcgtccggcgctctgtatggcaaaatcgccagcgtatttagctcaaccggtaccggcggcggccaggaacaaaccattacctcgacctggacgacgctggcccaccacggcatgatcatcgtcccgatcggctatggcgcccaggagcttttcgatatctcccaggtacgcggcggtaccccttatggcgcaaccaccatcgccggcggcgacggctcgcggcagccgagcgaggaagagttagccatcgcccgctatcagggtgaacatgtcgccaaactggccgttaaactgcacggctaa

SEQ ID NO: 245587 - DNA, 645 bp, Klebsiella pneumoniae
atgattaaacacaccacagcagaaagagaaatcaacacttcagctaagctgaatgagtaccagttgaaccttctgaaaaggattaacaacctcgctatttccctgatgcctgaatttgaagacaaaaatcaggctatggatgctatcacgctggatgacggttctctgatgcaattgctctataccgttcaactcgagcagaagacacgcgtcaacgactacgaaatgcgtaaagtgcgccgtcgtcgcgaaaatctggaaagattttatcgtgagcttcaggaattgggcggtacgcttaaggtgaacgacgtggtcgatatccttggtatcacacgccaggcgatcaacattcgcgttaagaagaacaagcttttagcattcaaacaaaacggggattttattttcccgaaatttcagttcgctgataatgggctaattcccggctttgaagacgtgatggcggcattcgaagaggatacacatccaatgttgcggttgggtgtgctgaaatcaccgatagaggttaatagtgaaggcctacaaaagacgccgattcaaatcatgctggacggtgctaaaaagtgtgaacttagtctggccatacgtgcagctaaacagttcggaaatcaagtagccagttaa

SEQ ID NO: 245588 - DNA, 711 bp, Klebsiella pneumoniae
atgaccaaatggacatttgaaaaaactgttgttgcacaagggattgctgcacaaaacaattctggacgtattccggcgattgacattcaacaaggccctggtcttttgaagcgtcatcaaaggaagttgtataaaagcgcaatcaacttcagcgcgccaattgagaaagacgactgtgggcgatacaaccctctcgggggaagtgtggcggtatggtatgcttctgactcggcgttaacggcggcggcggaagcatacgggcgtttgttccatctcaaaggaacgatttcttatcctgaatcggtactttcacaacattatatgtgctctgtggatgtcgcgagaacggtgaaagtgattgatgttgtggcactctgtgagttgttacatatccctttggatagcttagagaacgaagattacacctttcctcagtggctaatggaacatctttatacgcatttcgggcgtgactatgacgggattgcctatacctcaagacataagcgctataagcgttgttatgccttttgggaacgaccgggtagtacaccagcctttaccgatacccctcaggggatgtggccttatgctagttacgtcgaaactgacgaaggcatgttccctaaggggtggcacaaaggaacgatgtcaggtgaagagatgttcgaagaattgcttggattcgaaattacgccagaaccaatgtaa

SEQ ID NO: 245589 - DNA, 1410 bp, Klebsiella pneumoniae
atgaagttttctgaagcttttaatatggaatttcagcaatcaaatttagattttattgatatccctttggatactgatttacaattttttatagatcccacctctattcgagcgttaaaaacagattggggagatagtcttgagaaattaattcaggattatttcgcagatgttatggctagtataaaaaacggagaccttaaaagagcaggagtattattatcttcattgaaagaatccaattcatttcatcttggatattcttctaaaaaatcctctggcaaagccttaggagttaaaacggcagagctaattttagagtcattgaaaaatagtaaagcagctcaaacaggattactgcatgatcttgaggatacagcattaactattgacgggattgcatctgacaggatttctgattctgtatgtaatatacttaagcttccgtttatagaatatacacaaaagatttgtgaattttataatgtggatatgtcagatgtttctggtattcgtttgtgggatccgaatagtgggcgatgggggaagagaacattcaagctccctgtttacaatggtgaagaaattatacttatcccaaaggtactggctagagaaaagatagcttattcacactccaaattttatcggaaatatataattccagagattagagcagaacatcttaaagcagggtctgcgcttgtaactcttttaagagggaagcaaacagtaacagctacaaagattatcgaagaatttgggcagtctaaggagtttattgaggaacagatagtaaaatatcctgatgcaataaagcaatacaaagaagaactattgctttcaccgccaccgcctcttccccataaaagctttgatgattcaacaggggctgtaactggtccactatcatcagatgttgagaatctcaagcttgcaataaaagaaaatgatgagcaattgtatattgaaagccttaaaaaaatatttctgactatattttatccttctcttttttatccgtgcttgataaagagaaatatgcatggttatagctttacaatgttaaatgaatctcgtgcgggattcttttttgatttttcggtttttgacattccggctgataaaattttagttaatattgtgatgtcaagctctcatattagtgagggttatctggaaaacctagttcaagaaatggatgttattaaaacatcagtttgtttgttgtcctgctgtgaagcaacaaacgaactgcaaaaagacaagataaaggcgttggcaaaaagtaaaggtaagtatgtttttattataaatagtgcggttattaatggtattttagacgagtattataaaattggtgagcagcatttcagtatgttgcgtgataaattcaaagaatttaattaa

SEQ ID NO: 245590 - DNA, 1740 bp, Klebsiella pneumoniae
atgtcatggagccaatggttaggaggaaatcgattccgtctcttccacgcgcgtaagctactcgatggagcagcaattcatcatgaagcatatgaagacttcatcagttcaattgtggctggaaaagagaacaccatgtcgttgctaacagatatggcagacattcttcctgtgatctgtgagtcgccagactggcccgccgtctggtctatcctggcagagcagatgtctttcactcgcgaacaccgtattggcgaacttttcgaatttggaaatgaaaatatgaccgacgaagagttgcttgcggaattgctccatttttcattacgattgcctatcaccgaagctcgacgacacgctgagaaaactgcactaaatcttgcggtacattcaacaggagggcaaatcgtatttgagaacaccataacacgactcctgaccggcaaccttgatgaaccattccaggcattgcaaattttacttttgctaaaacagacccactttgctgctaaatttggtgatttagtttctggccttacgaatcatcgtgatgtagctgttgcagaagctgcgtgcttgttagcacaatattggcagctacctgtatcgcttgattttcatccgttgccgttaacctatcgattggcactcgacggagaccctgatcatgaaaatgctctgttagatcctgtgagtggggcaatgcgtattgaagtcgacttaggatggacacaaatgcttcgtcccgttgcacggagacttgcagagttggctgattgtgaggaaatgaacatacgccagcgtgccgcaacgtttattcagcaatggggagggctggcagcttttggccctagagcaacaaaaaaaatcgaatctcagttacgcacactatcaatgcaaatcacctatcttaagccccatgcttacattggcatactggcacttcgtcatgtcgctggagagctgagcttggcaggcttgctctcgccaagggataaaccatcgcttctggaacaaatggatgcagtacttccgccaactcctcgccctgaaatgcaaatccggccaactggcattaggcgaccgcttaaagtcaagggtgccccctggcgtgaagctgaagaaatgtggacaaatttggttgacgaggatgttaaaccctggattgatcgtgccgacgaattcgtaatagccgaggtttcacaattcaaaatgcatgatacccggcgtgctgaatatcaggtctatcgtattagcgcacctcaaattcatatttctgttgccaaattcatggcatggtatcaaagtttgcccgctgtcgtttggctgggtaagatgatcccactcgacgaagacctcgcaccgacaatagtcagacgtgtagtaagctccatcgggacaatgtcttcgccgggatatgccattacattatgtcctaatatccagatgcttctgggatggcatgaatccagcgagatgcctaatatttataccgacaaggactcaacaatcgtagcaagattagtgaactggcgagacgctgggccagtggatattgatgatgattatatatggggggaaggttgctatctgacgctttccaaagcaggcctgatacaaatcaagactctgttcggcgaattcaccgtgcgtaatttcgcaagcagggctgttcggcaattgcgacaaggcgaagcgcaaatgataaagacagctcagaatcagttcccgataccgtag

SEQ ID NO: 245591 - DNA, 2826 bp, Klebsiella pneumoniae
atgactttaaatgaaaagtccgattcatcaatgaagattgtgaaaacaaaaaccttgcccccagcagagggcgagcgccgggcaatgcgtggctatatgggccaatatgaaagagccggcgcagccatttatgctgaattagagcgtgggcaattggagtggataggcgtggcggaccgcagtgcgggtatcgttgatgatttagtacttggatttcatggtcttatcgttgggcaccagttcaaaacgtcccgtttccctggtacatttacagtacagacactcttagtagggtctgatggtctgcttaagccattagtttgcgcctggcaaaatctttgtagtgctaacccaacgtctcacgtagaaattcgtttagttgtcaacgactatccatcagttaacgacgcccccggattggaagatccagctcatagtgctgccttccttgatgagtttgaacattatcccaaacgcacgcttgaggaatggcgccacagtaactggggcggtttagtcgaaatattatttcaacatacctgcctagatgacgatggtttcgagagattttttcatgcattgcgcataattcatggctctgcagcagattttatacaatttcataaactcagtgcagaacaagcgagactggcgtctgagatagcaaaaatattacctcgtctggtctccgataaacgagatagggaccgatggtcctgtgaagaactattatatgaactagggtggaaagatccgaccaaaacacgccacatacatcgctttcctatcggtgctcacgtccaacgcaaccgcgatacggaactacaacttctccagacaatacgcaacacaatccagggctatgtggcattgattgggcctccaggttcgggaaaatcgaccttgctacagacaaccctggctaccgaatataacactcgggtcgtgcgctatctggcttttataccgggagctgcgcaaggtgtagggcgcggggaagctgatgatttcttcgaagacatttctgcccagttacgcagcagcgggctgcctggacttcgccttcgagacagcagccaatttgaaaggcgcgaacaattcggtgaactgctcaaacaagctggcgagcgttatcaacgtgatacagtaagaaccatcattattgttgatgggctggatcatattccccgcgaagaactaccagcccattcgctgttagccgaattgccgctgcctgcagccatccctttgggcgtgacatttatacttggcacccagcgactggaactcaagcatctcaaacccgcagtacaggaacaggctgggcatccggatcgtctcgtcacaatgcatccacttgagagagtggcggtcgccaggatggcagacgttttgggtcttgatccaaacatttcgcgtgtaaaactttatgaacttagccgcggtcatccgctggcggccaattatctcattaaggcactgttatcggcagatgaacaggaaatatcatgcttcctcgccggagggatggaatttaatggcaatattgaatcagtttacgcatccgcctggagagaaatcgcaaacgaccctgatgttatgcatgttctgggtttcattgcccgtatcgaagctccgatgccgctgaaattgctggcaacaatcgtagatgctcaggcgatagagcgtaccttaaagaccgtccggcatttactcaaggaaacctcaaaggggtggactgtattccataacagcttccgtctatttgttctctccaaaccaaagataacactgggcagtatagataaaacctattcacaacatatttatcgtgaattagctgaactatctcggcatgcaccagagcattcattacagtcctggctaacactgcgctatctcgcccggtcaggagagcgtgatgaacttctggcactcgcaacgccagcatattttcgacaccagtttacacatggacgttcctgttcagagattgatgcggacatccacttggctctgattgctgcgcgttccacatatgatggtgtaattgccacacggttgctactttgccgtgatgagatatccagacgaactcaagtgctggagtatgccaatgaacttccgcgcgcgatgttaaaagttggcgatattgatgcggcgatctctttcgtccaggactttcccaatgcgggctatgaagttgttgacctgcttttggaacagggtgattttgaccgcgcgaaagaactgtttgaacaccttgagccattgtctcaattgcatacccccagattcgagcactatggggattcgcataatctacaagaattcaaaaaatgggcaaaacgagtttttcacttccgtgacgctgagcaaattaagcaggcaattgactatttgaccgttgaggggttaaaagacgccacaagtgtatcaaacgatgaaaatattacctctattcgcgaacagttaaagtggacagtggtcgaggcaatcgctaactggcaagcagacgttaatattcaggacacctgcaatcagtacggcattcatgagcaagaaataccgattttgatgactcaggctggatttactgctagagacagaggaaataataccttagcattggaattatttaagactgccatggcattgtctgattttaatgatgtttctaatggggggcgaagatcgattgcattattttatgccacctcaggctgcaccgatctggcttcaacattattcgaaaacctttttgcacctgcaatttcgatgggagacaatgagcacgttgtcgttttttggttgcagagcggctag

SEQ ID NO: 245592 - DNA, 234 bp, Klebsiella pneumoniae
atggcgggtgaaatgaatcaacttacggagagagaacagattatactgtcattaatgaacttgttgaatatggacacagacctgacaacgcaggcagttgagtttattggtgacagcatcctgaactaccaactgtttattagatacttcagcgccagtgaattggctgataatgtctccaaattaacggaagcaatcggtaaggctaccgaagcaaaagtgttgtttgaataa

SEQ ID NO: 245593 - DNA, 567 bp, Klebsiella pneumoniae
atgaagtatgtttacgttatgcagtccgcaacagggctggtaaaaattggagtatcaaaaagcgtacggcaaagaagaaagcatttagagaatcaatccggtgtaggagttaaggttattgcaacatttggaccatttaacgccgcaacgagattggaacgtatggtccacgatctcttctctgcaactagggagtcaggcgagtggttcactataaaggcaaaagatgctgtcgaagcgataaataaaattgcgtccacattcgaggattcgaagtcttgccaaaaagatgatctaagaggggagataagcgcggcagaacggcatttgctatgcatggatgatgctgatctaattatcaatactgtcgcatatttgcgggcgaatgtgatgattgaggaaagcgaaaagctgcatagcctgttcatggctggtagcttaagtaccagagactttttgcatgaatgccaattgtctatcatggatagacgattccatgatctacttgcgatacataacgatttaaaagacaaggttcaaatgtacctctcaggatttgaggcgtga

SEQ ID NO: 245594 - DNA, 486 bp, Klebsiella pneumoniae
atgattcccgcgggacctgataataaaaaagcccgcaaaaaggcgggcaataagcatgagggtaatagcaatgtcggtgatgaccgaaaataccctggctgggtctggcggcctgcggcgttgcggcaacaacgccccgatggattggattatgagcccgtcatcaggtcaggccattatctggtgctggttgaaccaacaatctggttcagggctcttgcgcggcgggtgtcgacgtgtcgtgcagcacgtttctacccaagagccctgaccggatcgcacaaccacactctcgcagtggccgcgctcatgcccttgagaccttgtcgcacatcgccgctcataaccggtgcgcgtctggcgttcgcgctgctttaccgtcatacccttttcctcgattaccctgaccagcggtatgtcgcagtttggacctgcgtctggctccctcaaggagactcggggccacatcatgactgtggcttgtaa

SEQ ID NO: 245595 - DNA, 369 bp, Klebsiella pneumoniae
atgactgatatcaccgaactggcgcagagcctgaaagcggcagcagagaaagctcagattgaagaggggttgacctggtttagcgaagatcaattatcccatgaagatggaatcgctctccataaggctgatgccgagttcatcgccatggctaaccctgccaacatcctcgcgctggtagaggcgctggagaaggcgcagcagcggatttctcagatggagtcccgcaccgtcaccgtgaagcttccagagcctccagggccaatgtctgtaggagcgcgtactgtttacttcggaattgtagctgatgttgttggcgcttttcaggatggactcaacgccgctggcatcaaggtggaggttgagtga

SEQ ID NO: 245596 - DNA, 861 bp, Klebsiella pneumoniae
atggatatttcagaactcgataacttcaggaagcaacttatcaataatgattctataacaggtccgctggaaatactgacatttaaatcattatttatcgagatgtattttgatgaacaaaaacttagttcaggaacagcttttcttgctgcaaatgatagggagtcgcattgcgcgctgatcactaatcggcataatgttacaggaagaaatcaagaaacaaacgaatgtcttagcaagacgtgtgccacacccaataacatagtcatatattttcataagaatcacgccgttggcgaatggctcaaaataaaacttcctctataccgtaaagatgaaactccatgttggattgaggatccagtgctaggcgcgaaagctgatgttattgctttaaatcttaaatggggaagtgatgtatctagagttccattttatataaagaccaatttggatcgagataatttgtatgtagggccgggagatactgtcagtgtgataggttttccatttggtgttagtagttttggcaaatttccagtttgggctaccggcttcctagctcaggagctattattaatgacagatgaaaatccagtctttttaatcgattgcagagcgagacaaggccaatctggttctcctgttgtagcttatcgaattggtggatatagacaacatcaggatggcaaaatatcgtcagtaatgtctgccactccaaaatgggaatttttaggaatctacagcggaagagttaatattgagtcagatctcggaagagtatggcatgtttcagttattgaaagagttttgaacgcagcagaaaaagattacaatgaaagtataagtaaaaataaatga

SEQ ID NO: 245597 - DNA, 258 bp, Klebsiella pneumoniae
gtggcaacgaaagacgatttcttcaatatcaaaaaaatcagcgccaccgacctgctcgacgctcaccgcatcccgttccagttgatgggcggcaagccggaaaacgtcggttcgctcggcgatatcgagaaggtggcaaaggtgtttgtccgtaacgagctcatcccgctacaagaccggatgcgcgaggtcaacgcgtgggccggtcaggaggtgatccggttcaaaagttacatccttgacaccgaaagtgactga

SEQ ID NO: 245598 - DNA, 1467 bp, Klebsiella pneumoniae
atgactgtacatgataattacccgattgaatattttagaatgactggtgttcacggttataaagatataaccatgaaaatgaaaggcaagacaacagttttcgtatccgagaacggcgcaggaaaaacaacaatacttaatgctataagacttcttcttgagcaggattttacaaacctgatgagaattgatttcaaatcaatattcatcaagatttttgagcatgatgaagttgaaattaaaaacgaaagagcatctttaatacccttcagtgaaataaaatcattcctcaatgaaagattttctcttgccgattcattttgggatgatcgtgatattaccaagtttgcaaagactttaatggactcgaagcaaaatgaattcaatgatgatgctttagtcaatgaattatataacaccgtgaaattcccaaaagattatataaatcatttcctaagagaattaaaagacaacatagttaataaaatgaagtctaaagagcagcatagttttaaaatgcattactcaaaaaacaataaatttaggttaattgccgaagctcttagggatttagatgttatattcctaccaacatatcgaagggtagaaaaaagtttcgagacgactcctagggaagaaagagaaagtcttcaccctcgcatttttggtagaaaaagggggatgaaactgcaacgtgatggcatttcatatggattaaaggatgtcgaagatgccttaaaaggcctaactttagagatcgaaagaacatcaaaccttggctatagatctttaagtgccaaaatgcttgaagatttgattaaatatggtaacaatgatcggatagctaaagaacagaatgcattaccatctatagaagatttggaaagattccttaatcgagttgaggacacaggtacaaatccccgagaaagaagagaatctgaatcaaaaaagaattctttaattggctctcttaaaagattatataacgataatacaataaaagatattacatacttaaaatacttcctaactcaattaaactcagttatacaagaaactaaagagcaagagtcaaaaattgaaaggttcgttgcagtctgtgataaatacctttcatcagcaggtgattcaaaatctctaaaatttgatcctcaaagtttagaagttattgttaaagatacttatacaggagatcgcatatctctcaatgatttatcttcaggggaaaaacaagttatttcgctaatggctacgatttatcttaatgataatactcctaaaataattttgattgatgaaccggaactttcgttatctatagattggcaacgaatgattttaccagatttgaatgctggagaaaatgttaggcaagtaattgctataacgcattcaccattcatatttgacaatgatttagatccttatgcaacagctatgaaagtacggaagggtaatttctga

SEQ ID NO: 245599 - DNA, 855 bp, Klebsiella pneumoniae
atgagcaataatctcctgcacgttatgaaaaaagaagctttgtcgagaaacccgttaaagcaagagatattactaaaaacatcatcgtttgataaaatttttgtttttgaaggtgttgatgattatcctgtatacgatgagtggatgaaacgcaacccaatatatattaatgcaggccatctggttgcaaaaggtaaaaaacagattattgagctatacgaacatgctattcaacatgacgatcaagaaatattaacaagctgttatttttttgtagatcatgactttgatatctttgaacataactctgataatattgtcacactttcatgctactcaattgaaaattatatcataaactcttactcaacaaaaagttacttaaaagatgagtttaagatggatatcacacgctctgatttattagaacgtatcaaaaaggattttgagtccgactttcattcattccaacgcttagcaaaagaattgtgcaaacctctatttgtaaatcataacgcaaacgacaaagcaaaattctatgataaaatctcttcggttataaatattgaatataaaaatatcacaattaaggaaaatgctaagctgataggttatgaagttaatgaagactcggaaaatgtaaaagcgttgatttcaatgtttgataacttaccatacgaaagagctataaaggggaaatatgtttttgaattcattaaaaactggttgtcatccttgaaattacatttatcaactaataaagatttaaaaattactaaagaccccttaatgttagaaagacgacgattagcttgtgcaaccccaataccccaagagatgttaagatttgcttaa

SEQ ID NO: 245600 - DNA, 774 bp, Klebsiella pneumoniae
atgattgaagttcaacatctcaacctcgcgtttggcgagggggagaagcgtaaccaggtgctgtatgacgtcagtttccacgttaagcccggcgagatctacggtctggtaggagagtccggttccggtaaaacgacggtgctcaagtgcctggcggggctgtttacccactggcagggggaactgaccatcgatgctcagcccttagggcatgaaattagccgcgagcgctgccgtcaggtgcagatggtatttcaggacccctacggatcgctgcatccccgtcacaccattggcgatatcctcgaagagccgctgcagatccatcgtatcaacgaccgcgaccggcggatcaatgtgctgctggataaagttggcctcaaccgcgcctttcgcgagcgctatccgcatcagctctccggcgggcagcggcagcgcgtggcgatagccagagcgctgattcttgagcctcaggtgctgctgctggatgagccgacgtcggcgctggatgtgtcggtgcaggctgagatccttaacctgctggcggaactgcagcgggaggctaagctcacttacctgatggtcacccacgatcttggggttattgcccacttatgccagaaagtggcggtgatgcagtacgggaagatcctcgaaaccctgacggtcgatgcgttggtcagcggcgaggcgcggacggcctatacgcagatgctggttaacgccagtcggcaatatacgcgcgaaatggcgcgcgaggtggcggagtactaa

SEQ ID NO: 245601 - DNA, 315 bp, Klebsiella pneumoniae
gtgcgtctgcagggcgcttcatcggcccgcgtcctctggcgccatatcgtgccgctgtgtctgccctcggtcattatccgtatcaccatgaatatggccgggatcattctgaccgcggccggcctcggctttctcggcctcggcgcgcagccgccagagccggagtggggagcgatgatctccagcgggcgcacttatatgatggagtgctggtgggtcgtaaccattccggggctggcgattctgatcaatagcttagcgttcaacttcttaggagatggcctacgtgacatcctcgatccccgtagtgaataa

SEQ ID NO: 245602 - DNA, 990 bp, Klebsiella pneumoniae
atggctagtgcaaatcaaataaaattactcgttaaaaactttatagccaaagatgaaaggaaatttctatcaattgtcttacaaatcgctgcgcatgaagctcagatcggccatgctaaattagcagatgaactcaggatgctagtcgaaaaagcaaaactagtacgtagcaacgaaagtgatgataaatatccgcatgtagtttcttcaagttcagtagcatttaatcattctgcaaatgatttgttcacagtatctcaccccaccgtcgcactgactgaaattatcctttccaaaaatgtcaaaagcaaaattttacgtttcttggatgaaaacaaaagtgcaaaaaaaatacgccagtatggattagttcctcgtaggcatattttgttatatgggccacccggaacaggaaaaacgcttacagcgagcgtcattgcccatgaacttcatctaccgctatttactgtaagaatggattctttaattacaaaattcatgggagaaacatctgtcaagttaagaggtatttttgattatatttctcataacagaggcgtttatctttttgatgagtttgattctattggttcaaaaaggaccatggataatgatgttggtgaaataagaagggttttaaatacattccttcaacttatggatgagcacatctctgatagcttgattattagcgccacaaatcataaagatatcttagataatgcactttaccgtagatttgatgatgtcattgaatatgaacttccacaaaaagaccatttagcggagctaataaaaagtaaattctcaacatttaagatagacattcatgatttaaattcgctcatcaacgcttcaaatggccttagctactccgaggttgctaaaagttgcgatgacgctatcaaactagccattattaacaataagaaaactacaacacaattcgatctcgaagcaatactgaatgaaagaaaaaactataaataa

SEQ ID NO: 245603 - DNA, 2445 bp, Klebsiella pneumoniae
atgaatggtcatataaaagtaacgccatcctatagattaattgatttctctctggtattacctcctgtaattattaagagaaagccggtgaaccggaacgcgcattttgcacaattaaatcaatcatttaattcagcaatcgcagagttcaaaaagtctgatgaatttactgatttcattttatcggaagatcaaaaacctaagcacttagtccttacattcaaagaaaatattgatattgatgagaggatcgccatatcaaccctaagttcccatggaatgacccttttgtccgtaaataaaattgagggacgaactattgcaaacgtatcaattccaattgagaaactagggaaaatcgatgagatatttaatgaatatgcaagtaaagaaacaccgtctcacgagccaaaacacaggaaattcgtagaatcaatctcggacattgaatttggtaatatcacgtccctctggattagcagtgaacctccaccaacagacctccaaaaagttatcaatgtagaattatggtttgattacagtgcatacggaaaagagaaaaccatttctaaaatcaatgagagagcagcaatattaggcataacattaaaacaacacactttattttttaaagatcgggtagtaaaaatagcatgtacctctttatcaaaactatatgaattacaattactacttgaaaatcttgctgaaatcaggccagcacaaactatcagtaatatatttttggacatgaaaaaaaatgaggcatatgattggattgactctattaaaactaaaaaaagtaacaacccaatcccaatatgtatattagatactggtgttaacgcattccatccattgctgatagatttcacgaatcaagaaaccattataagtgcagaaccagaatggacggcaaacgatataatagggcacggcacagccgtagcaggcttggtgctttatggggatctgaaaatatcaattcaaaatgatttaactgatataacgtccacagttgagtccgtaaaaatcattccagatcaaggaggaaatgatcccgagttgtatggagcaattataatggatgcggtatataacattgaagcaatacgaccaaatcctaagagaatcttcacaatggctgtgacttctggttataaacttaggggaattccttctagttgttcggcagtaattgatggtctggccagtgggaatccagatgataatatgaaaagaatattcattatatccgcaggaaacatggatcctgcctacttgaaatattatccagaatcaaattttacatcaactattgaagacccagcaaactcttacaactcaattactgtaggttactgggctagtgaagataatattattgagcaaggttatagattactagcggagctcactgacttaggtccttcgtcgaccacctctatgagttggataacatcttcgccattcaaaccagatatcatttttgagggtgggaattacgggtttgatgaagaatatgagttcgcagcaaaccttgaagagctgagcctactaactacatcaaataaatttcttgatggcgcccccttttcatcatttattgaaactagtgcagcaacggcccttgcttcaaacttcatctctaaattatggtcacaatatcctgattatcgtccagaaacaatcagggcgctgatgatacatagcgcatcatggcctcaaaaaattattgataggtttcaaccactggaaaataaacaatctgtttcaaatctattaagaatagctggttatggacagcctgatctttccaaagcccttacaagtggcgataggtcagtaaatcttgtagttgaaggtcaaatacagccgtataccccagaagggaccatgaataaaatggttttatatagtttaccatggcctacagatgagcttgagaaactaggggatcaaaaagtcaagctgagagtcacattatcttattttatagaacccaatccaggagaaagagggtgggagaataaattcaaatacacttcacatggacttcgctttgaccttaattgtgctggcgaggaatcaggagagtttgtcgcgcgaattaataaaaaatatagaactacaaatcctgacttggacgtgggtgatagtgattcttccaggtggctgctaggaccaacattacgcaatagaggttcgattcacagtgatatttggacaggcaccgcagtagagcttgcggataaaaagcacattgcagtttatcctgtcagtggctggtggaaagagcttaaaaaagaaaaaaggcagtctagtgttgcgcagttcagcttaatagtttcaatagaaacacctgaaaataatttagagctacataataaaatctgccaaatacttaacatagatacatcaattcaaagtatcataactatatga

SEQ ID NO: 245604 - DNA, 264 bp, Klebsiella pneumoniae
atggacattaagtctttcaaccgctgggatgaatataccgctgcccgcgacgccatgttcgccgccaccgataccgcctgggcgccgtggttcgtcgcccgctcagaggataaaaagcgcgtgcgtcttaatatcatcacccatctgctgtcgcagatcccctatgaagctttaccggtggagcctgtgacgctgccgaagcgcaaaattggcaaaatgaaacagactaattttcctttccgcttcattccagagaagttttga

SEQ ID NO: 245605 - DNA, 1230 bp, Klebsiella pneumoniae
atgagtgagctgagttatctggaaaagttactggatggggttgaaattgagtggttgccgattggagaaattgctgatatttatggtggacttaccggcaagaccaaggctgattttgaaaatggcaatgcgaaatatgtttcatacaaaaatatatttagcaatataaatattgatgaaccaccaacagattttgttaatgtcaaaaatggtgagcaacagcacgctgttaggtatggtgatgtgctttttactggctcatctgaaactgctgaggaagctggcatttcgtccgcaatcacatctcgttttgatgagcccgtttatttaaatagtttttcattcggtattcggttcaatcaaaaggttaaaatcaaaccagaattctcaaaataccttttcagaaccaatttaatgcgtgcggagatagctaaaaccgcaagcggtgtaactcgtttcaacatatcaaagtctcgattcaaaaaagttttgattcctgttattagccccgaaaatccggaaaagtcccttgctatccaagctgaaatcgtccggattcttgataaatttactgcgcttaccgctgagcttaccgctgagcttaccgctgagcttaccatgcgcaaaaagcagtacaattactatcgtgaccagttgctgagttttgaagagggtggggttgagtggaagacattgggtgagattgtgaagatgcgtgcagggcagcatatttcggcgagaaatatagtagatgggaaagaaggagattttgtatatccttgttttggcggaaacggtattcgtggttacgttaaagaaaaaagtcatgatggggaacatctattaatagggcgacaaggtgctctgtgtggcaatgtccaaagaatgaaaggtcagttctacgctacagaacatgcagttgtagtctcagccatgcaggggattgatattgactgggcatttcatatgttaacaacaatgaatctaaatcaatatgcgtcgaaatctgcacagccgggtcttgctgtggggaaattgcaggaattgaaattattagtgccttccatagagcgtcagaaatatattgctaaaatgctggacaaatttgacacattgacgggttcaatcacagaaggcctccggcgcgaaatcgagctgcgccagaaacagtacgagtactatcgtgatttactgttcagcttcccgaaaccagaaaccgccagcaactga

SEQ ID NO: 245606 - DNA, 957 bp, Klebsiella pneumoniae
atgaccaaatcaaccataaccagagagcgcgcacagcaaattttccttggaaatggaccagagccgatcgcatcagaagaacgagagctggctcgcatggcgctggccgcaatggacagcgagtcttggcgtttgcctatcgactacttacagggacacaaagacggtatggagtgggccgctagactggcagaggccaaccaccctgaaaccggagactggctttacgatgaccctatcgaactggcaaaagctattcgcaaaggtccagatatgccgacagtgcagccggtagcggacagcgagccggtggcgtggacatggcactatcgtgagcaatggcacgtcactaatgacgagggacgcgcaagggatttggcgtgggatggcgtcaaggttgatccgctctatcgccacgcgcagccagcggtggaacgtgaccaggtacgcatcgcgcatgccgagtggtcgcaggcaactttcggcaatgtcggcccggttggccctctgaagcacctacgaagagaagtgctggaaaccatcgctaagccgcatgatctgatcgagtgggctgatatgcaattcctgttgtgggatgcgcaacgccgtgccggtatcactgacgagcagattacccaggcgatgatcgataagctggcggtaaacaaacagcgctcatggccggagccgaaagatggagagccgcggttgcacatcaaagtgcagccagcgccggtagtgccgggatggattccggtaagcgagcagatgccgccaagtcgtcatgaggtattggtcgggcgttggtggggagagaagccgcggtggtgttgtaaatgggcaacgtatatccctggccaccctgatgcgcagagtagcggctggttaatccctggcgcgtcatggacgccaactcactggatgccgctgccagccgccccgcaggaggtgaaatga

SEQ ID NO: 245607 - DNA, 192 bp, Klebsiella pneumoniae
atggattggctagctaaaaatgcagattgggttttttctgggattggtgttcgtgcattagatgttgtctatgctcttatagttgcaattataggcgcttttttcatccgaaagaaaataaagccattcaccaaaaaaatagctagagtcttcatcataggctctaagaacaaaaccaatataaaacagtaa

SEQ ID NO: 245608 - DNA, 174 bp, Klebsiella pneumoniae
atggccgtacaacagaataaaccaacccgttccaaacgtggcatgcgtcgttcccatgacgcgctgaccgcagtcaccagcctgtctgtagacaaaacttctggtgagaaacacctgcgtcaccacatcactgccgacggtttctaccgcggtcgcaaggttatcactaagtaa

SEQ ID NO: 245609 - DNA, 861 bp, Klebsiella pneumoniae
atgttaattgaaactccagaatataaatcagcccccggacaggaagtcgttaaacctcaactacggatggttgatctcaatctgcttaccgtttttgatgcggttatgcaagagcagaatattactcgtgccgcccatacgctcggcatgtcacaacccgcggtgagcaatgcggtttcacgactgaaagtgatgtttaatgacgagctttttgtgcgctatggccgcggtattcagccgacggcgcgcgcctatcagctgtttggctcggtacgccaggcgctgcagctggtccaaaacgaattgccaggctccggttttgaaccgctgagcagtgagcgcgtgttccatctgtgcgtctgcagcccgctggataacatcctgacgtcggttatttttaataaagttgcagagatagcacccaatattcatttagtctttaagtctgcgctgaatcaaaatacggaacatcagctacgttatcaggaaacagaattcgtaatcggttatgaagagttccgtcgccctgagtttgcctgcgttccgttatttaaagacgaaatggtcctggtcgccagtcgcaaccatccgcgtatttccgggccgatgatggaggcggatatttatcgcgaggagcatgccgccgttgctcttgaccggtatgcctcatttagtttgccgtggtatgacacggccgataaacaagcgcgtattgcctatcagggtaatgcgatggtcagcgtattaaacgtagtatcgcaaacccagatggtggccattgccccgcgctggctggcagatgaatttgctgacaagcttgccctgcaaatattacctttgccgttgaaggggctttgttga

SEQ ID NO: 245610 - DNA, 1350 bp, Klebsiella pneumoniae
atgaacttaaccccatatacaaatggcgttcattctctagccgaagggctaaagtgtttacatcaattcattgagaatgaccaagatccttatcttatgaaagaagtcgtaattaagatccatcatgggatggaaactttattaaaagatcttctttttcaaaggaaccctattttcttgctaggagagaaaacgacagtttctcaaataattgaatattacaaaggtttttatgaaggtaaaaatgactatctttttgatgatgcaaaaactataacccctgaagaaacgatcagaagaattaatgaattgaaaatagcgtcaggcatcagcagtaaagattatcaacagttaactgagtcatttaaatcattaaacgccactagaaataagttacagcactttacagtgaaagctaacgccgatgaaataattaaagtactggcaaatcttattcctagtacagtcgatctactgaaaagattctactcaagaaatgagttaagctattatcaacaaaggattgatcaaatcccacacctaccattactcggaatggagcaactctttgatgagaagcatgatatcgaaaatgatctaaatggtatctatgcagagtcaactaatgtaattcgccagattgaggctaaatatggtcgtctacttaatgaagcaataggaaaactgcaaggttctaccacggaaaaaattcaactgactttcaaactagaggatcatggacatgtaggcgctccaccatatataccgacaatcgttcttgaagggtggttgagggaaagatttgaatcttacagaaatgctacatctgcgcgaatgtttactttaaggggggatagtgaaataaccgcagtgtataactcaagtttaagcatttctcaacctgaagtgataaaggcggcagaggaatggcatcaggatacagtttcaaaaataaatattagctgtgattcttcgatagatgtattgaattctagtattttcaatataccagatttaaatgaatatatttcgtttcttaaatcaccgaaaataaacatcttattgcaaatcgagtgcactttaagtggcatgttcaatagttctcattttgatattagtaagattattgaattgaaaggttcattgatggttgaaattacttcttatatatatggcgactcggaaaaaatgccatcggttaaaggggtttatgagttggggcttaataaaaaaaatacggcattaagctttcatgcttttgtgatttcaaacggtcaggttggtgatcatcattcattggaaataaaaatagatgatgtagcaaatcttgtgtttgagaaaaaaaagtaa

SEQ ID NO: 245611 - DNA, 501 bp, Klebsiella pneumoniae
atgagccactttgacgatctgtgtcagttaagttttgcggttgaagaaaagaagaaagatgtagagcgcctcattaaacgtgaggcaacacggctggtatcattttacaagggctggttgggcctgccagctgagcactggatcgatgaacgcggcgagcgtcgtccgtatgttgatgttggttttattgggagtggcggcacctttcagcccgctcgcattaatgagatgccaatgcaaaccgatggtaccctgcaaatggttctgcgtactgcgacgggtagcgacagggatttgcctgctgttaccgttccggtcaagctgcaggtgatgtctgcgggaggcgatgggattgatgtcgcgatcagtgtggatgaagataagcccattccggtttttgttatgggtactgatgaatactcttattcagaggtggcattgaagattaaaagccacatccagaaagccattcaaaagcggtaccccgtctcacttaagtaa

SEQ ID NO: 245612 - DNA, 255 bp, Klebsiella pneumoniae; identical to SEQ ID NO: 107193

SEQ ID NO: 245613 - DNA, 192 bp, Klebsiella pneumoniae
gtggttgataagaaagacgcaggagaccttctccccgacgatggtgatgtactgataacgtgtgaaaatggcaagattaagaagaccagaattgtccattccgatgaacacgtagcgacacttaacgcgttgtttgaattagctaaattgactggttataccattatcaaaccagacggcaatatgctataa

SEQ ID NO: 245614 - DNA, 315 bp, Klebsiella pneumoniae
ttgcccgttgccctctttttcagacaacgggcgggacatatcctttacgccatcacgttgcaacgggcaacgttaacgaaacaactgaccaagattatgaacatgaaaactgtatcgactattttttccgcagccgcactttcactttttgcctttaccgcatccgcgcatagcgtgactgcgaccagtaatacgcttgactccgctgaagcgatgattgccaaaaaagcgaaagagctgaatgcaactgattataaaatcaccagcgcccatatggggaataaggtgacgatgagcgctgtgttagataagtaa

SEQ ID NO: 245615 - DNA, 732 bp, Klebsiella pneumoniae
atgagtaatcaggcaacaggcaagcaaaaggtttttctttatgtaacccttttaataataagcgcggcggttgcattctcaactattcattatatttggaaaatgcaaaataagaaagatatgttgttgtctgtaccattttctccatctcctgattttgatttatctatccttcctccatttattaattatgacttcaatgggaaatttatatttataaaaggtgcgttaacggaagaggatgaaagtaaaatactctcagtttttagttctaatggtaatatcagtacggagagtagtgcctcatttctgaaatttaagtctgcgatagtattgatagttgagaaatcagacgaattaaaaaatgagctgtctacattaatattttatgtcgctttattaggtggagcattaggctctacgttgaggatttttcttgattttgttggtaatgcttcctataaggatgaattgaattttcaacgttggtggccactttactttacgagacccgttacaggggctttgttaggcttgatagtaattatacttttgaaatcaaatattatgtcattaacgttaaactctaatcactctgattcactatggtggttagggttggctatactttctgggtttggaacaatagatgctacagagagattaagattgacctcaaaagcaatttttggtgatagtaaaagtcaatcgaagggggataataaacaataa

SEQ ID NO: 245616 - DNA, 816 bp, Klebsiella pneumoniae
atgcgggtttatccacatggcagagaagatattcttggagcagaaattgaaataataactcgctgtagggaaataaaactaccagttcctaatgttatagcgacatcattagatgggccaaagattgggttgagttattttgtttatgacaaaatagaaggaatgatgctttcagattatcttgataaagttaacagtccaaatgttgattatgttagtgaccaattgattgatttatttaaaaaaatctcatcactggatattaaaaaatatggtgagttagaaagcggttataaagcggtttgctcaagctggagtgagtttgtatcgaattcaataactcaagggaggaagggtgtcatcagtagtaatatccttccaatacataaaataaaaaaaatagaaaggcttgttttgtcaaatttaaactctctggataaggtaagtggtaaattgctatggggggatgtaagtgttgataatatactggtcaccgaaaatggcgagatatcaggtattatagacttcgaaagttgtttgtcaggtccgggtgattgtacgattgggtattttttgaatacactatctcctaaatcagtcacacatgcctcattgtttcatgatttatcaagaaaatgtaatacctttaatgatgatgtatattctttctgttttctaagagcgtatagactggctagatttattgattgttctccacctgcgggggaaaaaagagatatgttgattgatatatttccagggttagagtgggcgatatgtttctttaatgacagaatcaatgaggtgagtatatga

SEQ ID NO: 245617 - DNA, 696 bp, Klebsiella pneumoniae
atgattgatgatggggaagtaattgaaagcaccttgtcccgactagtttcttggggcgggtatccgatattcaaagagttgtttttggatggcggagagggttctgtttatttgtctggcggtgtagttagaaactcgataatgaaatctgattacaaggagaaagactatgatttctttattgatattagttgttttaatgataaagtaaaaactcttgaaaaatatggaaaaattcaatgtaccccatatggagcacctaggtggttccctgaaaattgtaatgaatatgctgatataatgccgatacaacttttctctcctggtttatggccttgttttgatattattgacgttctcaatcagtttgacttcacaatgaattcgattgcgttggatctaaaaaaaggtaagttattcaatcctgttaatggagtgagagatgcatcgtgtaagatcctaaaaatggtgaggtttgattacccttcgggaccatttattcatgggggagggatagatagaaatgctattttgtggatccggggaatgcattatgcaagtaaatacaatttgaatgttgaaccaattacattatcttggatgagaaaacataatcatttcaaatctaatatatcattttttactgaaaatttttttaagccggagcaaggttttttacttaaagaggggttgtag

SEQ ID NO: 245618 - DNA, 912 bp, Klebsiella pneumoniae
atgaataattcacctgtattgaatttgcaggaaatggctagttcaagttcagttgatatagaaaccttgttatcaagggctaaaatgatttctgtaaaattagggttgcaggatatatcagattggctcgattacgaaatgaaaggttatccatcacatgaccttcttccagaatatagaattattctcgatgctcaagtgatggcattcaacccttattctggttgggttccttatcagattgccaacactacgggggaaaacaaagaggtttatgattcgttgacaactatcaacatcaacaaccctatatcaatgcttgtagaacacgcaaaaagtgagtcagtccttcattctgacctcccaggatttatgacggaattacttcaagaaatggctggctgtaggtatcgtatggcgtggtgcatttatccagcacagcttataaatatcatctcaagtgtgagagttaaaatcctagattggtcactgctccttgaatccaagggaattttaggtgaggggcttcttttctccaaagaagagaaaagagaagcttatgggatgacaattaacaatattaataatttcaatgctagtgttaacaactctggtgcaataggtgcaggtaataatggtgatataactcaaactaacacggttaatacttttaactttgatagtctgtcaaatcaattaaaggtgttaggtgttgcgactgacgacgtagcggcattaaaaaaattaatagtaagtgcatctcatccaaaggcatcgggaagttttgacccagtaattggtaaatggatgggtaatgtaatgggaaaagcttattcaggtgagcttaatgtctctggcactgaagcatctgtattaattgtaaaggctctatcctcttactatggtttttaa

SEQ ID NO: 245619 - DNA, 909 bp, Klebsiella pneumoniae
atgagtaactcaccagttttagaattgcaagctttggctggagacccatcttcagatattgtcgcggttttattaaaagctaagatgatagctgttaaattaaatttgaatgaccttagtgaatggcttgaatatgaaattgaaggttatccaacaggtaatgatattccaaagtatcgagtaggtcgagggatagtcaaggcgttcaatccttaccatggttggtttcctgttgatttcagtaatgtaccgccagatttcattgagagtgcttctgagtttaggattaccgaatcaatatcgtcaatgaaaaaaggcgaatcaaaagatggtatgctgcgtatcacaatgcctcctaaaatggtaaatctcttattcggctcgcacgatattccccctgaagtttgttggttttttagtgcaaacaaactcaatcatatagtgacaaccgtaagaaacaagattctcacatggtctctggaattagaaaaacaagggattatgggggatggtttattattcacccaaaaagaaaaggatgcagcaccaatgacaatcacaaataacaatacgaataattttcacgctcctgtaaacaatgctggcgcaattggagcgggcaacactggtgacattaatcagcaaaactctatctcagtaggtgacattgcatcccttgagcgtgaactaaagagtcacgggcttgatgataatgatgttgctgaattaaaactgcttgttgagcaatcacctaaaccagcttcaaaagaagaggttgaaaaaggttttggggcgtggattggtaagatgactggtaaggcttttacaggtgcgttaaaggtcgctggtgcggcggctcctgccgttcttactaacgcaatctgctgctacttcgggatccctgtttaa

SEQ ID NO: 245620 - DNA, 252 bp, Klebsiella pneumoniae
atgtatattgtgatttttaatttaaatgttactgaaatacataaaataggcgatcatttgttttatgatgcaagtaaagcgatgataaatgatgttttattaaccggtatctcgcgagttgaaattaagagtgatggtggggatttattacatgtaataaatgcaccggaatgtgatgataaagtattgtttaaaggtaatttcaattatggccaagagattgattttaatatagtgcggttaaatgaatga

SEQ ID NO: 245621 - DNA, 234 bp, Klebsiella pneumoniae
atgacaggtgaaatgaaacaattaacagagcgcagccaaattactctatcaataatgaatctccttggcatgaatgccgagctaaccaaaatggcaatgacatttattggtgatgatattttaaattaccaattgtttgtgaggtgttttaatattagcgctattgttgatattaaaagtcgtgtaattagtgctattgagcaggcaaataaagggttggaaattttttattag

SEQ ID NO: 245622 - DNA, 795 bp, Klebsiella pneumoniae
atgagcgatgcaaaacccgtaattttcatatctcatatagctgaagaagcggagatagcagtaaatctaaaggcactgatcgaaaaatcatttcttaactttatcaatgtttttgtctcttcagatgctcatagcagtagtattggtgacgggtggctaagccaaatacaggcaaatctatcagaatctatttatacgatagtaatatgtagcccaaaatctataggcaggccatggataaattttgaagctggtgcatcatggataaaaaatataaagatagctcccttatgtcattctggattatcaccagaaaaattaccaatcccgttaacaaactttaacggaacttgcctagataataacaatggcctagaaaatctatttttttcaattgctaaggaagtaaagctattacagcccaatgttgacttttctggttttattagattcatatcagaatttcaagaaaagtatttgatagatgataaattaatcgaaatatttaataagtttgagcaattcactcctagctttctcaaaacattattagacaataaagaatcaattctttttgccccattatctgaagagacgtatgtaacatcatccctaacattcttagaaaataataatgttgtaaaaagcaaattattatcttcgaatgttaacattacaaatatcggtcaaagcgggtcaaccaaaatacctacgcaaataaaatacaaaatcactccacatgataattttatagatttactatgcagatgcaagctaattagacttaaagagtaa

SEQ ID NO: 245623 - DNA, 336 bp, Klebsiella pneumoniae
atggaaaaagcaaaataccgcgtcctgcgcttatcgcatattcacaataacctctggccggaaggggctgagattgaatatgacggtgagcctggatcggcactggaaccactgaacgacgcagcaaaagcggcgaaagcgaaggcaaaacacaagggtgatactcctactgctgttgggcctattcagctgagcgaaggcgatggtggcgatgacgagctggataagctccgcgaagagtacgagctgctctttaacgagaagcctcatcacaacaccaaagccgaaacgctgcgcgagaagatcgccgaaaagcgaaaagatttaggcgtctga

SEQ ID NO: 245624 - DNA, 987 bp, Klebsiella pneumoniae
atggctgttaaaggcttaactgcgctgacgctggctgactggggtaagcgcttagatccaaacgggaagatcgataagattatcgaactgctcggccagactaacccaatcctggaagacatgctgatagttgaaggcaaccttccaaccggtcaccgcaccaccatccgctccggtctgccgcaggcaacctggcgtttgctgaactacggggtgcagccaagcaaatccaccactgttcaggttaccgatgctgtcggcatgctggaaacctacgctgaggtggataaatctctggctgacctgaacggtaataccgcagaattccgcctgtcagaagaccgcgccttcatcgaaggcatgaaccagcagatggctcaaacccttttttatggcgattccagcgttaacccgcagcagttcatgggtctgtcatcccgctactccagcaaatccgcaggtaacggccagaacattatcgacgctggcggtaccggcaccgataacacctccatctggcttgttgtgtggggcgaaaacactgttcacggtatcttcccgaaaggtcagaaagcaggtctgcagatggaagataaaggccagcagactctgaaagatgccagcggaggccagtatgagggctaccgcacccactataagtgggataacggcctgtctctgcgcgactggcgttacgtcgtgcgcatcgccaacatcgatgtgagcgatctgtcggtgcctggctctgctgcaaacatcgtcagcctgctggtgaaagctctgcaccgcatccctaaccgcggcatgggtaaaccggtcttctacatgaaccgcaccgtggcgcaagcgctcgacctgcagtctctggataaggcttctctggccctgaccgtcaaacagactgagggtgaatggtggacctccttccgcggcgttccaatccgcgaaactgacgcgatcctcgaaaccgaagcgcgcgttgtttaa

SEQ ID NO: 245625 - DNA, 243 bp, Klebsiella pneumoniae
atgagcgacaattactatcatggcatgacatgggttcccgtggataagcgcatgcctgaacctatgtatccagataaataccttacgttgctactttgtttaaattctagaacatttgtctgcggcggcattcaagatggcaagttctggctagatggcacggagttagacaatgtaacgcactggcaatacataccgctaacacctgaaagaggcggcattgtcgaggaagatgaaagttaa

SEQ ID NO: 245626 - DNA, 684 bp, Klebsiella pneumoniae
gtggggcggctggcgctgctgatatcaacaatgctgcttatttgtccagtacgggcggattcatggtatatcggtattttgtcgattcgcggcgatttttttgctcgcagcagctggaagccgttagaatcatttcttaatcagcagttgcccgatcagcagtttcatattcgtccgctggatttgcatcagatgcaagaagcggttaaaaacggtagcgtgcagtttgtcgtgactcatccggggcagtttgttcaattaaataaccatttacccctacgctggctggcttcattgcgcgcttcccatggcataaaaaacgttattggtagcgtgatcctgacccgtcgcgacagcgagattaagacgcctgcggatctgattggaaaaacggtcggggccgtcgatccgatggcatttggcggttatctgctggggtacaaagcgctgagtgatgcgggattgatgccagaccgcgatcttcatctgcgcttcactggatttcccgccgatgcgcttatatatctgctgcgcgaaaatgccgtgcaggcagcgattgtaccggtttgtctgctggagatgatggatgaagagggactgattcataaagacgactttgttgcgctattaaagcgtcctgcacccataccctgcgtaaccagtactcgtctttaccatggctga

SEQ ID NO: 245627 - DNA, 870 bp, Klebsiella pneumoniae
atgattagactgggtatttatgggtatgaatgcacgaaggaatataaatttaatgattttaaaatcacccctttatataagaggcactctgaatcttataaattagctaaagataaagatgcatatcacctcacagcttttgtagagtacattaacggaaacacaaaaaaattaaacatcatgaatctcaggagtgaaattcatgacctcgaagctgttctgtcatttatagatcatagagatgttattatatcaaatgagctaagagaacatgaaacttatgataatctcgacatggattacccacgaaaaataatatcacatcaacgaaaaaatggaggtggatgcgttatcataaatgatgcttttagctcagattctcgcgagacattcatagcactaacaatgaaacaattacaatcagaaagtaatcccataaatgaatcattccgaaaagcttttttcaaaactatagaagtgttcagggccagagaaagctttattgatatttcttattatttattgttctcagcactggagtctttatgtcgtgcaaaacagaatgattacaaatctaagtgtagtgcaacacctattaaaaatgttttaaccgaatatggcttcgacatcaaacaagaaaataaaaaagaaccatgcaaatcaatcatgacttatgtccacttaagaaatgcactctttcacaacggtgaattaacagcaaagacaaatgatggtgatatctttgagatgaaagattattacccagcacttcaccgattattacctctaattttgataaagcacattgggtttgacgacaatagaataaactggaactcatggttggatagaataccttttaaaagttaa

SEQ ID NO: 245628 - DNA, 135 bp, Klebsiella pneumoniae
atggtggaggttatacagcggtatggcctgagcgccagccgtggcgcgggttcgttaaatttgtctgccgatatcatggctcgcctgttcatcgcggtgctaaaccagattcactcactacgcaaattccgttga

SEQ ID NO: 245629 - DNA, 966 bp, Klebsiella pneumoniae
atgagagcaaaaaaaactaaagtgccgcaggcaacagctaaacggacacctccgccggacgaaccatacaccaacattgaaatgcgtctggtttgcgcgagcaaaatcaaaattgtgaatggtgaacatgccggaacggtaatcaactgggattctgacatgctccgcctctacctctatatgttcaatcaggtaaaaggttttgagagtcgccacggggagttctaccaatcccaggataggatcaagctgagcgtaggactggggaaaacaaaacttaacgagtcgttggatgcgttaaaaatgctgggattgatccgcaaaacaggcataaaaacagtaaaaggtgcgccccgaggtctgattaaatatacagcagtgcgccttatggaggtgattggaaacctggagatcatattcgcagaggatgacggcgagcctgtttgggatcacgaacgtgccagcgggaacgcggccaaaaaatccgaggagaagcaggaaaatggtaatggtcatgaagaagccgaaacaccgcaggcagaacaggcagcagccactgctacatcatctactgatgcgccaacaggcgaatccgctgatcagagtcgtgacctggcctctgagcctgccgcgtctactgttggacagcgcgatagcgtggaatctgacaatgacggcagcagcgatgatcgcgccgctggtaatcatgcagtaagccagagagcgcaggaatataaagatgatgcggtgtttccatctgagaagcgagagccagaagaaaccgcaggccgggttatagccccgcttgatgaccttcgctactggtcgtgtgttggcgatgatggcagggacgactacggcgtaatgtggggtgaatcaggcgctggccttgataatctgattggtgaacacctcaagatcagagaagcagaagctgaaaaaaactttttaaatcgtagaggataa

SEQ ID NO: 245630 - DNA, 369 bp, Klebsiella pneumoniae
atgaaaaacttactcaaaaccgttcgcgattccatagccgcagccatgaacgggcgcaccatcgaacagatggaaaccgaacagcggcaggacgctgtaaaaagcgccgttgatgactatctgatccgccatccagactggaaaccaacaacagcgcccgcagttgcgccagtgaccgacagcaaaatcaaaatgcgccgcattatgaagacactgggtgcaggggcgggaggttttactccgcacgaaatagatcctgaaatgcttcgcttggcgagggagaaatgccgccaggttgtcgccgccgatccggcagcgtactcatacattatcgaatcggcacctctccgtgaccatgagatggcttga

SEQ ID NO: 245631 - DNA, 285 bp, Klebsiella pneumoniae
atgcaattgaagattctgggtgtgggcaacgtcccgcttctgtccgcacgtatcaaaacattggacgatgcagggttgctgaacgtttcagcgctcgccaggctgctggggtgtgctcgatcaaccttcctgagcaaggttgcctctgtggggctggaagctgcaattttgcattacactgcgatcaaaaagcagcgggatgtgctcgccactctgtcagagaaagatgcaacagcgtttcttacagcctgtgatgccaataacgcaagtggtaaggtattttga

SEQ ID NO: 245632 - DNA, 159 bp, Klebsiella pneumoniae
atggctattacaagtagtatgttcggtcgcaccatcctgactggtaaagacgctgagcaaatgctcaaacaaatgagtcaatctaagccaaacgagaacgctaaacgctcgttacagaatgctcgtgcgttacgtcagaaaatgtctaaacgcggctaa

SEQ ID NO: 245633 - DNA, 579 bp, Klebsiella pneumoniae
atggatgaagtgatacaacctgacctacaaatcctacctttaaaccaattccataatccaaaacgatttagtagcggtgccgaagagtttcagccgcttaaaacgttccttcaacaagatgcgctgttgttccaggatgggtgcatagcccagacttatgttgttgttgatgacaacacgagagtagataaaagtatccctcaagataggttttcgtacaaaattttgggatatattacactaacttgtagtcaggttaacttaaaagagtacgatttaggcaactgtgcccgagcagaaaggtacaaatttctacccgctgtaaaaattgcacgtttggctgttgactcaaaattgagagccagtggtataggttccatgctatttggatatgctctattaatggcattggacgatattaggccgatggttgggtgtaggtttttaataactgatgcaaaacggggcgctatggatttttaccataaacaagggatggaattgcttgataccgaagaaaatcaagtagcagaccatcccatcatgttcattgatctcttcacgttacttgaaaattaa

SEQ ID NO: 245634 - DNA, 1218 bp, Klebsiella pneumoniae
atggcgatcaacaacaatcaatacctttttcagaacaaaaccgggctgtggattttccagatcttcgtacctaagtacatgcgccacgtattcggagataagcgcgcctggcgtaagtcaacaggtacaaaagacatcattaaagcccggcaattcagaaaccatcttctgattgaattcaataagttgaaggaacaattaaagccggatactgaggagaaacgcatctcaggggctattgcgtccctctatcaggaggtgagcactaacaatgaggtcgaggacagacgcaggccgtcagtcgaggataaaaccacgtcacctaccctctgcaagatccgcgatgagtacagcgaaaactacaaatcacgtcgttcctactccactctgagcaaatcagcccgcgccgtggaggtctttcttgccaccatccaggaaacagacatcaagatcgacctgatcgggcggcgcttggtgacgcagttcatcagaacacaacaagagcgggttgctggtcagactttacagaactggctaacctgcctgggcagtctctacgagttcgcgttaagaacttacgacgccatccccgagggcaaccccttccacaatcataatctggaagcgcggcgcacaattgaaagttacgaaccattcgagccaacccagataaaagcgctgcttgacggtgcggatgaggtgatccgggatttgatcttgatgggcctttattccggctgccgtctcgatgaactggcaagcctacgtaaggatgagattgttgtgattgagggtatccgctgcttttacatcagcaagtcgaagacaaaggcggggattcgctatgttccaatccatagcttacttgttgggatcgtcgataaatacctgagccagaactatggcgactacctactaccgccgtcaaaccggattatcaggaaggacgggaaaaaaggcccgtggtatagccagaagttcacgcgcttgcgtgatagcgttttacctactgctacagctcgccaatgcttccacagcttgcggggaatgtttatcacctgcttagaccgcgccggggttagcgagaccaggatcggcagcattacgggccacacagagcagaaggcgaaaaccgaagcattccgtacctacagccagggggccagcatgaaggaactatcaaaatatatcgagattgttaattttcaagtaacgtga

SEQ ID NO: 245635 - DNA, 255 bp, Klebsiella pneumoniae; identical to SEQ ID NO: 191353

SEQ ID NO: 245636 - DNA, 876 bp, Klebsiella pneumoniae
atgatgactcagagcattcgccgctcaatgttaacggtgatggcgacgctacccctgctatttagcagcgcaacgctgcatgcgcaggcgaacagcgtgcaacagcagctggaagccctggagaaaagttcgggaggtcggcttggcgttgcgctgattaacaccgccgataattcgcagattctctaccgtgccgatgaacgttttgcgatgtgcagtaccagtaaggtgatggcggccgcggcggtgcttaaacagagcgagagcgataagcacctgctaaatcagcgcgttgaaatcaagaagagcgacctggttaactacaatcccattgcggagaaacacgttaacggcacgatgacgctggctgagcttggcgcagcggcgctgcagtatagcgacaatactgccatgaataagctgattgcccatctgggtggtcccgataaagtgacggcgtttgctcgctcgttgggtgatgagaccttccgtctggacagaaccgagcccacgctcaataccgccattccaggcgacccgcgtgataccaccacgccgctcgcgatggcgcagaccctgaaaaatctgacgctgggtaaagcgctggcggaaactcagcgggcacagttggtgacgtggcttaagggcaatactaccggtagcgcgagcattcgggcgggtctgccgaaatcatgggtagtgggcgataaaaccggcagcggagattatggcaccaccaacgatatcgcggttatctggccggaaaaccacgcaccgctggttctggtgacctactttacccaaccggagcagaaggcggaaagccgtcgggatattctggctgcggcggcgaaaatcgtaacccacggtttctga

SEQ ID NO: 245637 - DNA, 264 bp, Klebsiella pneumoniae; identical to SEQ ID NO: 94215

SEQ ID NO: 245638 - DNA, 345 bp, Klebsiella pneumoniae
ttgacctcaacgccaatgctgccaacatttgcagccccgaccgatacggaacgcgcgaccctctccgcgatcctgaatgacaacggcctccgcgccactactccaagaattaacgttcttcactttctgaatatcgcagatgtaccagtgacagcagaggcagtcagccgctgcgttgacctgccgctatcgactgcgtacaggacgctcacggtgctggaagtcacccaccttgccggagtgaccttcgcgcgtggtgatgtcacacgctggttcaggtttacaccggatacaccgcaacattgcccggcctgcgggcagagtttttacggcgaatacgcctga

SEQ ID NO: 245639 - DNA, 507 bp, Klebsiella pneumoniae
atgactacaaaaagacaggctcagagagccactgagagcgatttacaggcattcatgaacgatgccgccgaccggttcaaaccagacgccgccgtgctggccgcgcggatcgataccgccgtacaacgttacgaagtaacgagcaccacacaacgtttcaacgccccggcaccactggcaatgcagcaactacaggaacgaatccttgaaggttggaggtacgatatcggcatcccgcagtcggtctacctcgccggtacgggaaacatgagtatcacgcttcgcaaaccggctgagctggtggagcaggagatcaccgacctgaaacggcaggttgaagattcataccacaacgagctggccaccgcgatcgagagagaagtggacaagctggtacaggacgcagcagacgaagcccaacgccgtgcagaggaagccgcagccgcagaacgcgatgccatgcgccagcgtctcaaggatatgctgctgaccggggcgacagcatga

SEQ ID NO: 245640 - DNA, 156 bp, Klebsiella pneumoniae
atggccgcgtgtccgggctgcgagaatattatcctcgacggtcgccgcgaaagcatcggcccgaacggctctgaccttgatactacgctgacggtttaccccactggcgtgtgcagccgcaatattgtcactccacgtttgcaccttttgttgtga

SEQ ID NO: 245641 - DNA, 435 bp, Klebsiella pneumoniae
atggagttgaaacttatctgccgtgggcatagtggcaactttaatgcagggcaactgctctaccagtgtggcgatatccaacaccgaccgactcaggcgatccagtttagccaccagcaaacacgccccagtgcgcttacacaactctatggcctggcgcagtccattacgttgcattggttccagcgaaccactgaccccctcatcggtgaactcatcaatgatctcccaaccatgttggcggacagcgtgagcgatgtagtcagtctgagcctcaagccccaaaccagagcgcccctgacgctcagtagatacccgacgatacgtaacaacctgcatattcacccctccaaaaggatcgtgaacgaactgtatcataaatttaccgaacggcaaacaaatgataaaaaacacaaaaagaacataattaattga

SEQ ID NO: 245642 - DNA, 231 bp, Klebsiella pneumoniae; identical to SEQ ID NO: 134313

SEQ ID NO: 245643 - DNA, 759 bp, Klebsiella pneumoniae
atgaaaattcgctcaaccgtacttgctcttgggatcgcagcaaccctcaccggatgtcagaacatggactccaacggtctgctcagctcaggcgccgaagccttccaggcatactctctcagcgacgcgcaggtgaaaaccttaagcgaccaggcctgtaaagagatggacgccaaagcgaaaatcgccccggccaacagtgaatacagccagcggctgaacaaaatcgcggctgcgctgggcgataacatcaatggtcagcccgtgaactacaaggtctatgagaccaaggatgtcaacgccttcgccatggccaacggctgcatccgcgtctacagcgggctgatggatctgatgaacgataatgaagtcgaggcggtgatcggccacgaaatgggccacgtcgcgctgggccacgtgaagaaaggcatgcaggtcgccctgggtaccaacgccgtgcgtgcggcggcggcctccgcgggcggtatcgtcggtagcctgtcgcagtctcagttgggcgatctgggcgaaaaactggtgaactcgcagttctcccagcgtcaggaatcggaagcggatgactactcttacgacctgctgcgtaagcgcggtatcaatccgtcgggactggccaccagcttcgagaaactggccaagctggaagccggtcgtcagagttcgatgtttgacgatcacccggcctcagaagcgcgcgcccagcatattcgcgatcgcatgaaggccgacgggattaaataa

SEQ ID NO: 245644 - DNA, 876 bp, Klebsiella pneumoniae; identical to SEQ ID NO: 216438

SEQ ID NO: 245645 - DNA, 828 bp, Klebsiella pneumoniae
gtggtgacgccatctgcccgcagggagatggcgaccaaggctgtggctcattacgccatttctatccgtctggcttgccaggtgttcaaggtgagcgagggttgctaccgttatcagcccgtgctggctgatgaaaaccaggagattgccgactggctactgcgcctcaccgccaaccagcgcaactggggtttcggactgtgcttcctgtacctgcgtaacgtcaaaggctttggctggaaccacaagcgggtctaccggatctatcgggcgctagagctcaatctgcggataaaacccaaaaagcggctagtacgcgccaagccggagccgttggcagtccctgaccaaccgaatcactgttggtcgatggactttatgcatgaccagctcagcgatggtcgttcggtgcggttgtttaatgtgatcgatgacttcaatcgcgaagcactgtgcatcgaggtggatttttccttgcctgcctcgcgagtcaaacgggtgctggagcaggtcatcgagtggcggggcaaaccagccgcaatccgctgtgataatggtccggaatacatcagcgaagagctcaagcaatgggcgcagcagaagaggattgcgctgaggtatatccagccaggcaacccgcagcagaatgcctacatagagcgatttaaccgcactgtgcgttacgactggttgggccattacctgtttgagtcactgaatgagttacaggaatttgccacgaactggctgtgggtttataaccatgagcggcccaatatggcgctgggcggctacacgccgaaacagcgcttggcacaggccgcatga

SEQ ID NO: 245646 - DNA, 267 bp, Klebsiella pneumoniae; identical to SEQ ID NO: 151866

SEQ ID NO: 245647 - DNA, 780 bp, Klebsiella pneumoniae; identical to SEQ ID NO: 54032

SEQ ID NO: 245648 - DNA, 933 bp, Klebsiella pneumoniae; identical to SEQ ID NO: 132729

SEQ ID NO: 245649 - DNA, 291 bp, Klebsiella pneumoniae
atgctgagcaagcgggttagcatcatcatgaggaatttgtcttccatacgcacacactacacgttcatccttaaatacatcaataattttttcgaggaatcccatttgtggtattgcatcttgtgtcaagaaaatgaccagttcatattgactatgatgcatttcaacagccaaattccgcgttcctccatggttaaaatcgcggcctgggatactcagcagctcaaaacctgcattgagagcaacactgtcggtaccatcggtgctactcgagtcgataacctgtactag

SEQ ID NO: 245650 - DNA, 558 bp, Klebsiella pneumoniae
atgctgttaattcctctgggcagcgctttgctcttaaccgggtgtgcgggcacagagaccgaatttcaatgtaatgccacgacgtcggatacctgtatgacgatggaacaggcaaatgaaaaagctaagctgaaagaggaacgcagtgacgcaaagccggctgcggccggattgccacgactggctgacggaaatttcagaacgacgtcgccaaactcatatccgctgccgccacagccagtaattaatccagggcgtaatacagcgccatctgtgacggtgagtaataaacccgggttcctgaatacggtaccggtcaattatgatgacgtcctgagaacacggactgctccggtatatatcaggccagttagtcttagtacttatacttctccggcgacaattccgggtaattatccccgaccattaagaaacggggaggagacaacgtcattgtggatagcgccgtatgtggatgcagatgatgtatatcaccagccggcaacggttctttttgtcgtaaaaccatcggcgtggggacaacctcgccttaattga

SEQ ID NO: 245651 - DNA, 435 bp, Klebsiella pneumoniae
atggaaaagaaaaaccgcccagtacagcaggcggctaactcagatattcgcggtactgatgttacgccaccagcgccccccacacaagcgccacgccgcacaccgaagaaacaccgcgcccgcgtctatatgctgcgcactggcgtagagggatggacagaaaatgacattctgcgttattgccgtctttcatctgggcggaactacgcaagcgaaattgagcgccgtcttgatattcagcttgagcgtatcgacgagaaaaacccggatggtatcggcgcacacctgcgctaccgcttttcctgccgtggcgacgttctcaaggtgatccaacttgtgaaccataatgccgccattggcctttattccggtttatctcaacaggatattgccgacattctgaacctctacccggacgcgtttaacgccgcataa

SEQ ID NO: 245652 - DNA, 564 bp, Klebsiella pneumoniae
atgtttagcgaagaaaaagtagctcaaatggctgcttacctactgtcgaaggacggtgggcgcatggcatacctaaagcttatcaaactgctttatctttctgatcgtcagtctatgggcgtttatggagaatctataagcggagatagatttgtcgctatgaagcacggtcctgttctctcacaaacctatgaccttgtcaaaaatggcggggagctagaaagcggctggaatcactggatacgaggcgcggagaattatgaagttgcgcttaaaccaatggccgtttctgttgaagatttagatgaacttagcgaagctgatatcgaaattctcgatagcataatggctgagtttggtcatatgtcaaaataccagattcgtgattttactcatgaccattgtgcggagtggcaagaccccggttgcacttctgtggctatacctcattcagccacttttgcagcgttaggcaagcccccagaaacggcgtcagcgcttcaggatcgccttttcgaacgtgagcaactagatcggacattgtctgtatacaaatttaggtag

SEQ ID NO: 245653 - DNA, 438 bp, Klebsiella pneumoniae
atggatgagtgtgaccgcaacatccagcgagagctactccagtacctctgcgacatttacccagattctgccgatagcagcttctcaaagacattttccgaaaaatttggaggtactaatacctttactgccaacatactttatcttgctgatcacggactcattgaggcaagactgagtaatgaaatagatagacgacttccctctgtaatggactctttcacgaaaattacgagcaagggtatagattttattcgtgacgacggcggtttgagtgccatcctaaacgtccagacaatcaagtttcaccgtgatgctgttgtcgtcctcgaagacctcttcacgatttcaaacatgaacgataagcagaaggaaaaggccaaatcaactctcgacgaaatgacgaaggaagcacttaaaaaagtggtaaagccgtga

SEQ ID NO: 245654 - DNA, 507 bp, Klebsiella pneumoniae
atgttaatgagtaaagccgagtatgcacgtcatcgcggggtaagccggcagacggtatatgactgggtagcgaaaggcgaggtcgtggtctctggcacgaaaatcgatgtagaagcgacggaacgtagtttgcagaaggaagagcaaaccccggacgaacgccatcctcgcgtgttggaaatgacgtgggggcaattctgggcggcggttaaggcattagacggaaaatcccctgcacctcgtactgaagacgagataaagcaacgtgtcttgcatgcggcgagagagttgaactggacagttgagtttatcgaagatggtggaatttacatgtgtgacggcgatactgagttttacctcacaacgtataaccaactcattcaaaatgcagacatagcaatccggcttatccgctgtgatgtttgttataccgcctctgagtgccctaatgatgaagatgaatggagtaaagaagggatggcagcgctggccgagtgggcaagctaa

SEQ ID NO: 245655 - DNA, 558 bp, Klebsiella pneumoniae; identical to SEQ ID NO: 86309

SEQ ID NO: 245656 - DNA, 309 bp, Klebsiella pneumoniae; identical to SEQ ID NO: 86308

SEQ ID NO: 245657 - DNA, 174 bp, Klebsiella pneumoniae; identical to SEQ ID NO: 16562

SEQ ID NO: 245658 - DNA, 1500 bp, Klebsiella pneumoniae; identical to SEQ ID NO: 86306

SEQ ID NO: 245659 - DNA, 864 bp, Klebsiella pneumoniae
atgtcaattgcggttacaggtgctactggcccactcggtgggcttgtgattcaacatttgctcaaaaaagttcccgccagtcaaatcattgccatcgtgcgtaatgttgaaaaagcctctactcttgccgatcaaggcgtggaagttcgccatggcgactataatcaaccggaatctcttcaaaaggcttttgcaggtgtctccaagctgctctttatctcaggtccgcattatgataatacgcttcttatcgttcaacatgcaaatgtcgtaaaagctgccagagatgcgggagtcaaacatattgcttacacaggatatgcctttgctgaggaatcaataattccccttgcacacgtacatttagcaacggaatatgccatccgtacgaccaatatcccgtatactttcctgcgtaatgccttatatacggacttttttgtaaatgaggggctgcgcgcatccatagagtctggagcaattgttacgaatgcgggaagcgggatcgttaattcagtaacacgcaatgaacttgctttggctgccgcaacggttcttacagaggaagggcatgaaaacaaaacgtataaccttgtttccaatcaaccgtggacctttgatgaacttgcccaaattctctccgaggtttccggcaaaaaagtcgtgcatcagcctgtctcattcgaagaagagaaaaatttcctcgtaaacgctggtgtccctgagccgtttgctgaaattacggcagcgatctatgacgcgatttccaaaggagaagcgtccaaaacatcagatgatctgcaaaaactgatcggatccttgacccctctgaaggaaaccgtaaaacaagccctgaaaatgtaa

SEQ ID NO: 245660 - DNA, 291 bp, Klebsiella pneumoniae
atgtctgcgatggacgagttgttcgataaagtttggtacaaccgccatatgaacatgatgtatcacctagataatggtgacatagagatcgtccccgctggcacaaaacgctacggcaatgatgtgattcacgaagatatcctcggccaagcagaaattgcagctcaacgggtcagggataaatatgaagatactgggccttggagcgactttgaatgggggatgctcaatgggaagctctctgccctgcgatgggtcttgggggatgagtgggacatgctcgacacgtaa

SEQ ID NO: 245661 - DNA, 132 bp, Klebsiella pneumoniae
atgattagctataatgtagccgttaatcattcccactcaattattaaaatctataaaaattccttatacatcaatagcttaattactagacggtttcacaataccatgaataatgccatgtcgcgcatctaa

SEQ ID NO: 245662 - DNA, 675 bp, Klebsiella pneumoniae
atgaaagaacgcggagtgatttttaacggggagatggtgcgcgccatcctccatggccggaagacgcagacacggcggattgttaaagggactgacggcgccgtgaagttctgcaaggaatgggacatcaacggagaagaaattttcgttgttctcggcgaaaaagaccatacaggaatgaatcctgttttgggtgctctctcatgcccgttcggagcagtcggcgatcgcatctgggtgcgggaggcttttcgggtgcatagcctggctacagacgtcgcaaccctggcatacaaagccagcgagcgaaattcatggactgagcaaacccaccgtgtacccgtagctgtctgcaataaaccggcaacgcctgagaagtggacaccatcgctgcatatgccgcgctgggccagccgcattctactggaaataaccgacgtgcgggtcgagcggctgaacgctatcagcgaggaagatgcgcgagcagaaggcattattgacggtggctgtcttaattgcggggaacctgagccatgcggatgcgccaatccagagcctgacgctaccgatgcttttgcctacctgtggcaatcgatctacgggcaggaaagctggaatgctgacccttgggtttgggttatcgagttcaagcgcgttgaaggtggtgcagcatga

SEQ ID NO: 245663 - DNA, 663 bp, Klebsiella pneumoniae
atgttagaatcacttaaagaattcacgacatcgacattcaacacagcaatgaatcgcgttaagaaccctgcattcggcgctttcgcaatttcatggtgcgcatttaactggaagcaaatactttatttgttttttgctgataacggaatttattacaaaatagaatatatttctcaaaatagcagttggtggagcgtaattattttacctgcattctcgtcacttgttttatgtgttggtttaccatgggttaataatgctataacgaaatggcaaagcaagcctcttgacaatgcagattcaattgagaatttcaaacaggcgcgcatgattcaacgctccacgcgattgcagcgcctgaaggccaagcatgacgtgacttacgacagagttattcaaaatcttaaatcaaatattgaggacgcaaattcaattatcactgagaagaatgagcgcattagccagcttgaaaactcaagagaatctttattggcacaattcaatcttgatattgcatcacagcacaatcgacagcaatcggctcctttgcaaccgttagatctatatgacagcatcaaaacaaaaattgacaattcactcttaaaaaatgatgagataaataaaaaatatattatcaaagataacaaaaacagaaaggattaa

SEQ ID NO: 245664 - DNA, 771 bp, Klebsiella pneumoniae
atgagcaagggaaccattatctgcctgtgcgatatcactggcgtcatggctgagccatgggtcgaagcaggttatcgcgccgtcctggtggacccgcagcaccctgaaacttcgatcgacggtcctgttgagcgcatatcggcaaccatccttgaggcgatgccgaggctatctcagattatccgctctgaaaacgtcgtcatcgtcatcggcttcccaccatgcacggacgtggctgtttccgggtcccgctggttcgagtccaagcgcgccaaagacccgcatttccagggcaaggccgcgctggtcgctgagcaatgccggatggttggcttggcggctggctgcccgtgggcattcgaaaacccggtgagcgtgttcagtagcatcttcggctcggccgattacacgttccatccgtaccagttcactgggctgtgcgcggatgacaactacacgaagcagacatgcctctggacgggtaacggcttcaaggcgccggcagagaatatgcacccgatggttgaagcggctatcgacgccgtgaagctggcctgcggccgcatgatgccgaagaaaaaggcgatcgagtccatatccggaacgtcctttgccggattggtgactgactggtacccggacaaccgtattcacgaatgcccacccagcgacgagcgcgccaacattcgcagcgcaacgcctcttggatttgcaagggcggttttcctttcgaatgcaccccatctcaacaagaagtgggaggcagcatga

SEQ ID NO: 245665 - DNA, 252 bp, Klebsiella pneumoniae
atgagcaggcatgacttcagacgaccgatagctgatcacatctcaaacattcgctcagagctggcaaaagtaccagcagaaaagcgtcttcacgtcatagctgaggctttgtacgacatgaacccgacaggagccgatgaggttcttagggcgtcctgtggctgctatgagtgggatatcagcatggactaccgcagcgccgacgttcgttatgcagataaaaacaaacatgaggcgccgcatgacaactga

SEQ ID NO: 245666 - DNA, 270 bp, Klebsiella pneumoniae; identical to SEQ ID NO: 235366

SEQ ID NO: 245667 - DNA, 897 bp, Klebsiella pneumoniae
atgaatatggcgaatttgaaagcggttattccggtcgcaggactaggcatgcatatgctgccggccacaaaggcaattccaaaggagatgctgccgatcgttgataagccaatgattcagtacatcgttgacgaaatcgtcgccgccgggatcaaagagattgttctggtgacgcactcctcgaagaacgcggtggaaaaccacttcgacacatcctacgagctggaagccctgctggaacagcgcgtgaagcgccagctgctggcggaagtgcaggccatttgcccgccgggcgtgaccatcatgaacgtgcgtcaggcgcagccgctgggcctgggccactccatcctctgcgcccgcccggtagtcggcgacaacccatttgtggtggtcctgccggatatcatccttgacggcggcaccgctgacccgctgcgctataacctcgccgctatgatcgcccgctttaacgagaccggccgcagccaggtgctggcgaaacgcatgccgggcgatctttccgaatactccgtcatccagaccaaagagccgatggtggctgaaggccaggtggcgcgtatcgtcgagtttattgaaaaaccggacgagccgcagactctggactccgatctgatggcggtggggcgctacgtgctgtcggcggatatctgggccgaactggaacgtaccgagccgggcgcatggggccgtatccagctgaccgacgccattgccgaactggcgaagaagcagtccgtcgacgcgatgctgatgaccggcgaaagctacgactgcgggaagaaaatgggctacatgcaggccttcgtcacctacgggatgcgtaacctgaaagaaggcgccaaattccgcgaaagcattaaaaaactgctggcctga

SEQ ID NO: 245668 - DNA, 249 bp, Klebsiella pneumoniae
atgattggattggtgtacttcgagagtgctggaaagatctgccgcaggattgtactccgctctacccgttacaattgcgtagcgaaacacttcagaacaacgctgacgcactttccgcattttctccaacgcaccacgtttctcaattttacgcagtacgttcagcaactccagcggtttaatctctcccactttccttgttccaacataagggaaaatgttgtttttaaaagcttctatgatatctga

SEQ ID NO: 245669 - DNA, 1701 bp, Klebsiella pneumoniae
atgtacattgataatgtttatataaaaggatttaggaattattcggatagttttattaagcttaatcgttcgacgcttattataggaagcaatgatgttggcaaaacgaatcttttatatgcattaagaatgttattggataaaagtttttctgatatggatatagagcctaaaaatagtgattttcatataaatagtaaaggcgaacaatccgatcattttgaaattatattaaattttagagatgtaaaggaagatgctgttatatctaagctaggtggttacattagtgatgatgaacagacgtatataaagtatcaggcaaaaaggagcacgttggattacaagttattcatagggcataaaatgtcagatatggatgagataaatgggcgtttttatttgaagcatcttaatttaaggtatgttaattcacatagggatcttacaaagtatatctcgactgagaaaaggcatttactcaaactcgcacaggaaatgagagactcagatcacgtcgagaaagatgaggaaaccttaagggaacttggtgaattactggtaaatgttaacgataaagtaaaagaaattagttatgtgtcggctgcaacagatgaactaaatactgaattaagcaaactctcttataacaatgataaaatgtctgtaatgcttgattcaggggctataggaatagatcaatttattgaaaaattagagctaagttcaagctcaaatgggaaaaaggtcatgctaggaggggatggcttcaataatcaaatattacttgcgctctggaaggcaaaaagcgtaagagaacatgatgttgataacgaagtcgttatttattgcgtagaagagcctgagtcacatttatatcctcaccaacagagaaaactttctgagtatctcattaataagctcccaggtcagtccttagttacttctcactcaccgcaaattgcagttaattactccccggattcaataataaaaatatgctcatcagatggcgaatcttatgctgcgagcgaaggatgttcaaactgtataagcgaagcatggtcagatatggggtacagaatcagtatattaccagcagaagctttcttcgccaaggtgttttttttagttgaaggcccatcggagatgttattttatcgagccttggcgagggttaatgatattgatttggattattacaatataagcttgctttctgttgatggtgttcaatttgaagtttacaggaaaattttagacgcatttgaaattaagtgggttgcaagaactgataatgacgtatcgaaggttcctaaaaaagatgagtggcagtatgcgggtctaaacagggcattggcattgtgtggtagaaaagtaatagataatgaaaataaagaaattacacgcgcaatgcgaaatcagatgcatgatgcgtatagaaaaatacttcaagataataatatttatatttcctatgatgatttagaaggggatgtaagtaaagaactaagtaaacaattaaaagattatgctggagttgaaactgaaagcgatgcagcgcaatttttacgcggtaaaaaagcaattaggatgagggcatttttagaggagtattctcaagatttgagaagtatttcaacaggagaattgattaaaccactttttacagcggtttctttagctaaggatgacgtatga

SEQ ID NO: 245670 - DNA, 1629 bp, Klebsiella pneumoniae
atgaagataaactttactgatgagcaaaaagaagcgattgcttatcctaaaagcatggtcttaactgcgtgtcctggcagtgggaaaactgctgtgattgtcgagaaaatagtgagagatttaaggccctgcaaggattatcaaggggtaattgctatttcatatactaataaggcaagtgaagaacttaaacgaagatgcgttaaaaatgtaacatctactaaatcaagtttttttgggactatagataaattctatttaaatgaaatagttttccagtatattcatcagatatggggtcgagctgaaaagttgaaattgattaaattttcagatttaccccaagaatctaaacaacgattggcaatttacaaagatattgaggacgtttgcgctaaaattgatgcttacgactttgtcgaactaaagataatatacgataaaggttttgttatattagaatttatccctttgcttgcatattttgtgcttgttaaagcatcttctagtcgtagatatctctcaaccaaatataaatcagtatacattgatgaatatcaggatgcgggttttattcaacatctcatttttatcttgttgtccaccattggcataaaatctgtagctgttggtgatatcgatcaatccatctattcgtacgctggaaagagctcaaaatatctaactgcattactaagtaaagatagtggttttgaaccttttgaaataaccataaatcaccgttcacatccttcgataataaattatgcatcgcgattacttaatgaaaaagctgaattgataccctgcgaagatatccgtgtttttcgaacaacagttaacggtacacagcgagatatttctgcatggatcgatgcggaaattttcaatatgctgaaattttataatgttaaaaaagagagcaaggttgctatattgcttgcaacaaatacttctgtgtcgttagtttcaagttttgttaaaactaaatgccgagcatatttagatgatgaattatctaaggttgggggagcggcttccattttgttgaagtcactactaacgtttagatataataaatctgcgacagcacaatcaattattgacgaactgcctcataaatctattggatctaacgccctcagaagtatgagacgtgttattaaggaggttaggcttgttgatgatttagagttgattccttccttgagaaaggctgtgaaaatgcttatagacgaagatctttctgctcagcatattgatgctattagttcaataactggcaatagaatgatgttgaataattatatgccaatcagcgatgatgaacttcaaataatgaccttgcacaaggctaaaggtttggagttcgatatagtctttcatttagatctttacgattggattttacctcgcagggaatttataaaagattgctatgacgaagttttttcaaactatgagcaatgccttaatttacattatgtaggaatcactagagcaaaaaaagcaattatgctagttaactctactcaacgctttaattataaaaaagaagtgaagcaagcgaaaccgtcccaatttttttcacgtaaagggctgtgtggactttataaagcgattaaatag

SEQ ID NO: 245671 - DNA, 1113 bp, Klebsiella pneumoniae
atgaaaactatcttagaaccgtacaagacccaaccgatatccccgacagaactgctcttggatcctaagaatccaagactctacaacgggaagagttttggcgataacacagatccccatgaactggtgaaagctttagctgacactgcagatttagaagaattaattaaatcaatatctgaaaacggttacatgtcgattgaacccttaattgtcatgcagcgaagggataaatatgtcgtacttgaagggaatcgacgtttagctgctataaaattactcactgaggaaggtcttgcgagaaaatgccgtgtggtcgttcctcgtgaactgacaccaaatgtcattgaaagtctacgcgaagtagcagtgtatttagtaaaaaacgaatccgaagccagatctttcattggtttcaaacacgtcaatggcccacataaatgggactcatttgctaaagcacaattcgcctataaatggtttgtgaatgaacggcacactggattgacaatagacgatatcacaaaaaaattaggtgacagcaataatacagttcgttctattgttagtgctatgtttgttttagaacaggctaaaaaccaagaaatatacgacatccatgcagaccgaatgtctccaaaattttcattttcacacttatatactgcattgaatcgtacagaatataaggatttcctaggcttagagcgcgactggaacgttacgcttcaggataatcctgttccgagtcaaaacgcagaaaagttaagggatgttttagttggcttgtatggaagcaaaaaggacaaacgagcttcacttatttcatcgcaaaatcctgatctaaaatatttcggtgaggttttggttaatgatgcatcttacggagcctttaaagccgggggcgaaagtctttccgagctatacaaacaagcaggtgatcccttacagcatattaaggatgcttttttagagatcaataagcaacttgacacaatatcttctgttttagatagaactgaattacttgatgaaacaactaaaaattacattgagcaatttaagaaaaaggtcaaaaaagtcacgtttcaaatagaagaccttgagggttaa

SEQ ID NO: 245672 - DNA, 1020 bp, Klebsiella pneumoniae
atgcaattgctgacctatcctgaaagccatccgattcaagtaaaacttgattggctggaacttctgtgcttatccaaaccttattttgttttgcgtatttcagaacttagaaatacacttgaaaatctggagtcattcacatcaactgatattggagaggaagatgctgaggtagaaaatgaaatacaacggcttataaatcaatatcaacaacgaagccaaatactccaagatagttatccttttacatatgaagaggactcgcagtgtttagtattgaaaggtgataacttagaagatttatccgcagataaacatatctacctttattgcctttatttttctcatatgtccgcatcacgcttgtttagtggcttatcgggtccaactaaccagcaaagggactttatgcaagttgcagcaactatagctttcgcaggttacttacaaggtcatagcatatcttttggctggccaaggcctgatagttcaacattctacgaagcatttaaaagagctataaggttaataggtgaaggtcatttaaaacctttcgaacaagtcaatagatacttgcaaaccattgaccataaggatgctggaatagacgttattgcatggaaaaattgtaaccctcatgataacttccctggtggtaaaataatttattttgcacaagtagctagtggcaataattggcgttctaaggcagtaaaagaagacatagcaagaatccaaaatcattggctttcacaacgaatctatagaataactgatgcaatagtaattccttttgattttgagagtgatgatgaatctgtgaatcacgatcagatatcattatatgcagatgaattcggagcgattttacatcgtttgagaataccaacatattttcgacaaggactgcaattgttaacaaacaaccctgaattgttaattgagcgtggagatgatgttaataatattcgtcaatacgtaatgttaacaacaagtacacttcaagcagaggcggcctaa

SEQ ID NO: 245673 - DNA, 1008 bp, Klebsiella pneumoniae
atggataaaagaatcctcgaacatgaagcaattaaacaacttagcaaaaaatctgtacgtaagttgttcggggttcatgatatccctagggcaagttctcctttccgctacccgggggggaaagataaacttacctcttttttagctatatttcttacgcataataagttaagtggtgctaggtttattgagccgttttgtggtggggcaggggcttctctttctttgctttttgggggatatgttagcgaagttcatctaaatgataaaaactacgctttgtattgtttttgggagcaattattaaacaatactgaaaatttattagatatggtttatcagaacgtgccaacaattgatggctggcataaacaaaaagagatttaccaatcgagcattctcacaccccataaatataccaaacttgagtttggctttagtgctttttatctgaatagagcaaaccgatcaggtattctcggcgctgggccaattggtggtttggatcagtcagggaaatacaaaattgactgccgttataccgtatccacgttaattaagaaacttgagaaaattgcggagatgcgagactcaatatatgtatacaatgagcactgcattgactttcttaagaggtttgataataaagaattttataataaagattttatatatttggacccaccatacgttaaagaaggtaagaatatatactctaaaaatttctgttttgatgaaattcaacacagggagttgaaaagctatatatcaacttattccaatcgctggttgatatcgtatgatgaccatccattggtccacgaactttactctaaacatggcactagggctgtagagtttagctatgtaatgaaccaagctaaggttgggaaagagcttatgatagctgattctagactaagaatgcctgagtcattattttctgttgatgttctacctattgaagatgattccgcaaacttcaaaaaaaacataaggacggcctaa

SEQ ID NO: 245674 - DNA, 156 bp, Klebsiella pneumoniae
atgcagaagaaatgcggttactgccgtaaagcaatcgagggaaaaccagtggtaagcaccctgttgtacctccaggggaaccagctcgcacggaaagaaaaagagtattgctcagaacgttgcgcctctcacgaccagatggctcacgagagctaa

SEQ ID NO: 245675 - DNA, 540 bp, Klebsiella pneumoniae
atgaaatatttgatagaacggttattaacttttactgattggcgtaaaggctgcttcctgaccctgatttatacaggtgctcgctggggtgaaatggtggctatccgtaaggagcatatacgcaaggatgaggaatcggggcgctattacatcttcattgagggtggtaaaactgagcatgcacagcggcaaactcctcttagtaagaagatagaagcgctgctattggcatgtattaagcctcttaaatctgctggtcttgtgtttggagacttgccaacgtatgaacatattgctttccagtggagtagcctaatggaagagtgcagcatccctaaatacaacgaatttggacagaagcgcgttatccgtgccttgcgtcgcactttcatatctgaggctatagctaaaactggtagtgctgcattggtgcagtttgtagtagggcacagtcgtacgcagtcactaggcataacggcacgatatgcgcataaacaaaaattaaagggcttacttcctgttgttgattgtaatcaatag

SEQ ID NO: 245676 - DNA, 753 bp, Klebsiella pneumoniae
atgggtattactcttttcactaataatgcgttttcgtctgtttcagaccctgacgaatattcgccaggttttgatacaacatctctccgccgggctgaaatatttacttatacagggattggtaaaaaccttatgccgggggaaggcggccccactgtagttggcactccgacgtttatcaccgattcgccctttgttcagttctcaaataacgcgaatgtggcacatttgaacctgggaattaatgatgccgcccaacaaacctggtttttgctctttgatccgaataatgactcgacgcaacgaattatcgcaggaagcttttcgggaacagctgcatctacacctcctggggtatctgtgattgtagatgaatcaggagctctggcagccatgcagggtgtgcactacacggacactaatacttacggaacggcgcgcgcaactctgagtgcgttcaataaaacaaagccgatgctgatctgccttacccttgacggtcagaccaccaggctgaccgacatgaccaacaatgtttcagcatctcttaccctggcagcaggtcgcgagcgagcaccgactaccattcgcatcggcaagggaggcgtcacgtactggggaccaacctcagcaactagtcgcatcggcgcctacatggttttcgaccgcgtattatctgatgctgagaaaggttctgttcgtgactatttgctccgttgcatacaggcaaaatatccgtcattgattttctga

SEQ ID NO: 245677 - DNA, 153 bp, Klebsiella pneumoniae
atgataattcccgggggcttgcgcgccagattcaaaaccagaaagatcgactttttctgtccctggattatccagttcaaccagttctgggttaaaaaaatcgcgactatagctattttgtgtattaccgaagagcgcgatggttatcaataa

SEQ ID NO: 245678 - DNA, 753 bp, Klebsiella pneumoniae
atgggtattactcttttcactaataatgcgttttcgtctgtttcagaccctgacgaatattctccaggttttgatacaacatctctccgccgggctgaaatatttacttatacagggattggtaaaaaccttatgccgggggaaggcggccccactgtagttggcaccccgacgtttatcaccgactcgccctttgttcagttctcaaataacgcgaatgtggcgcatttgagcctgggaattaatgattccgcccaacaaacctggtttttgctttttgatccgaataatgattccacgcagagaattatcgctggtagcttttcgggaaccggtgccactaccccgccagggacatctgtaatagttgatgaggcgggggcgctggctgtcatgcagggtatccactacgccgacaccgatacttacggaaccgcgcgcgcaactctaagtgcgttcaataagacaaagccgatgctcctttgtcttacccttgacggccagaccaccaggttgaccgacatgaccaacaatatttcagcgtctctcaccctggctacaggtcgtgagcgagccccggccccccttcgcatcggtaaaggaggagttacatactggggatcaacctctgcaaccagccgacttggggcttatatggttttcgatcgcgtattatctgatgctgagaaaattactgttcgtgactatttgctccgttgcatacaggcaaaatatccgtcattgattttctga

SEQ ID NO: 245679 - DNA, 321 bp, Klebsiella pneumoniae
atggaaacccaaccgaactggctgatcagacatatcaacctcattaccaccgcggtcgccctctatccgtggttgctgttgattttggtgctctgggacaaccagcgccatcatcagaatggctatgccgcgcttggcgccgccgtggcggtattatttctgctggccgtgtcatccgggattaatctcctcatctcctcgctggtgatttttattgcccgcagttcctcttcaccgctggccagcggcgcggcggcccgctttttcgctatgaactcgatctcggcgctctggcttatccctctgttcttcagttactga

SEQ ID NO: 245680 - DNA, 579 bp, Klebsiella pneumoniae
atggagtcggtacaagcaggtatacttcctgccaatgaagagctaacccatgagctaatctattctgaggcaatcgcggatgccatgatttccattgctgcgaagtttagtagccaattgccggttgatgaaattaaattgggtcatatctattatgaagactcagatgaggctagtaggagttggcgtctgccagaaaaacggcagtacattgacttcaactggaaccaagaaagacgtaatcagaccaaacgcattgatgtgagtattcgatgccgcgattttctttgtgggttgatgcttggtagacgttctaaaaatcgactttgtataacccttcgttacctcgaaggaaatccacataaccatcctttgaaaggttttgtcatgccgattgcgctcatcatttcagagagtttcgctgatgcatatggtatcagacaggtcaatataagtcggccggataagaagctcattgaaagatatgcatcttttggctattccctgaacgccgcagacaaagctcgagtgaagcggaacaattcgccccgcgctaagctcttgacaaagctgctctga

SEQ ID NO: 245681 - DNA, 777 bp, Klebsiella pneumoniae
atggacattaaagaaatcagacgccgcaacttgcaggcactactaaacgaatatctcttccgcaaaccaaaggcaggcaaagctaggttcgcggaggagattggcatacctccatcacagctaagtcagctaaccagtgatagagagataagaaacattggtgacgtcatggcacggaggattgaaagcaatctgaagttgagtcacggttggatggatactcagcaatggggccccagctccaattcaccgatgctaagcaaagcaattgattttccaaatgaaaacttcacacttcgtagcgaaagcactgccaaagccgaacccaataacagtactgataaaaaatacatattagaagtttttgacaccgaatttagttgtggagaggggagacttactcctgactatcctgaaataatccgttcgatagaacttgatcctgaagaagcaaaaagaatgtttggtggccggcaagcatcatcactcaagatagcaacagctatgggtgacagtatgctgggaagcatttctccaggcgagcttgttgttcttgacgtcacggtaaaacggtttgtaagtgatgggatttatgcatttgtctatggtgataatctgcatatcaaacgcttacagttgttaaaggataggcttatagtcattagtgacaacacttcttatgaccgatgggaagttaccagcgaagacgaggagcttttccacattcaaggatttgtcgtcgggaaatggcatatgtcttacacccgcctgggttaa

SEQ ID NO: 245682 - DNA, 246 bp, Klebsiella pneumoniae
atgagcaaccaattactgcaatggcgaaaatcttccacctcagatgagtggaaggagttggcttttaaatctggcacgacacccgggtacttgaaccttgttgcttatggctacaggaatgcatccccgagacttgctcagtccattgaattggcgagcaagtgctttccctgcaagcaggttatttctaaagagtctctcgtttttgcgcagcattcaagtgcgaatcctgcagcagaggtgtga

SEQ ID NO: 245683 - DNA, 1041 bp, Klebsiella pneumoniae
atgagtgatgcgatccgggtggggctggtgggctatggctatgccagcaaaacgtttcacgcgccattaatcagcggcacgccgggcctggcgctgacgacggtctccagcagcgacgcggccaaagttcatgccgactggcctggcgcgaaggtggttagtgcggcgggtgaattgctgaacgacccggagatcgatctggtggtcatcgccacgccgaacgacacccacttcccactggcgaaagcggcgctggaggccggtaagcacgtggtggtggataaaccctttaccgtgacactgtcacaggctcgtgagctggagagcctggcgaagcactgtggccgggtgctgtcggtatttcacaatcggcgctgggacagtgatttcttaacggtcagaacgttaatcgacgaaggcctgctgggagaggtgtgttacttcgaatcccatttcgaccgcttccgcccgcaggtacgccagcgctggcgggaacaggcgggccccgggagtggaatttggtatgatctcggaccgcatctgctcgaccaggcggtggtgctgtttggtctgccggtgagcatcacggtggatctcgctcaacttcggcccggcgcgcaatccaccgactattttcacgcggtgctggcctatccacagcggcgggtggtgctgcacggcacattgctcgccgccgcggagagcgcgcgctttatcgtccacggctcgcgggccagctttatcaagtacggtctcgacccgcaggaggagcggctgaaaaatggcgagcgtttgccgcaggaggactgggggtatgatatgcgtgacggtaccctgacccgcgccgaaggcgacgaacgtagcgaggagacatggctgacgctaccgggcaattatcccgcttactatgccgctatccgcgatgcgctcaatggggtgggagaaaacccggttccggccagcgaggcgattcaaatcatgaccctgcttgagctcggtatcgagtcggcccggcatcgcgccacgctcagccttgtgtaa

SEQ ID NO: 245684 - DNA, 438 bp, Klebsiella pneumoniae
atgaccttgaagaatattggcgatgtatcatcgcaagtgaaaagctttggcgagcctctaagaaatgacaccgagggtttgctaagaagcctcaaagaacattggcagaaacgtgattattttcatgatttcattataatttcagagaaaaattcttctttgcgcatagaaatgcctgaatttaaattctggtgtgaatctaagcagaggtttgtatttttagaccgagacttggtttgtgagatagccttttatacatgtaaagaagaaaaagaaatcccgattttcacatgttttttgcgtcctggaggcgagttgtccttcgatactccagagtctgaagaaacttttaacatctactatgccagaaatgtagaatcagcaatgattgacaagattatccaaaacgcctcaattaaaaaattcatttcattgtaa

SEQ ID NO: 245685 - DNA, 201 bp, Klebsiella pneumoniae
atgcgcaaaacaccattaatggtctgcgtcgggatgttgattctggcgctaaacggctgcgcatcgccgcaacctgccctggagtgtcaaaagccacctccgccaccggcgtggatgatgcaggagcccccgaacttactccagacgctcaacggaattatttcgatctccgggacggaatcgcaaccgctgacaagatga

SEQ ID NO: 245686 - DNA, 618 bp, Klebsiella pneumoniae
gtgcgagattacgatcgcttttggaatcagtcaagaaggattagactccaaggggaatcaatggattttaatagtggcgggcgtaaagccatagaaaggttggtagaagcatatggttttcatacaagacaggctctagctgatcatcttggggtatcaaaaagcactttggccacaagatatatgagagatattttcccttctgactgggtaattacatgtgccctgcaaacaggtgcatctctagcttggctcgttgaagggaaagggccaatgttcgatatcgggaaaacggatattctgaggctaaaaaaggaaaaagtaattggtggaaatttactagattccggaactgtttattttgataaaactatattacctctcaacataacttctccaattattttggaagaagataacaacttatatgttgctgataaatcattcaatgaaatagtagatggacaatggcttattagcatcgatggtaaatacagtattcgaactgtttctcgcatccctaacaacaacattcgcgtaacaaaaggcgaaataacttttgactgcccaatcgatgatctgcactttaccgccatcataaaaaaatcctttatatga

SEQ ID NO: 245687 - DNA, 222 bp, Klebsiella pneumoniae
atgaaccaacacatttcaatctcaatcgcaactcctcatgtgaccattgaacgctatagcgaacttacagggctgtctgtagaaaccataaatgacatgctggctgatggacgcctaataagacatcgtcttcgcaaagataaaaagcgtgaaaaagtaatgattaacatcgcagcaatgactgtcgacgcgctctcaaatagcaacgtagttatctcttag

SEQ ID NO: 245688 - DNA, 783 bp, Klebsiella pneumoniae
gtggattcaattgaaacgaaattatttggaagaatcaaaacgcccaagaatttagggcaactaattgaaataacagaagaacatgcagctaaccgaatgaatgtttatatgtggagagggcagggaaacgttgattgggcgattcacagtgctgcttatagacggttgaagtttactcaccgtaatgtctctgagcgaagaatgagaaactacgaggttgagttgttaagaaaagctcgccacaagggttatgggtatgaagagggaagacgtctagctgatttcgaagtacttgctaagcttcaacaccatggtgcagctactcgtttaatagatttttcaaggaatatgctggttgcattgtggttcgcttgccaatcagaaagaggaaagccagggttgctgtttgggattcattcagattctatatatgggcaggaaggagaaacagaggagcgcaactatgatcagatatttgagaaagggataagcaatggtggtgctacaacatgggagcctccagcggtaactaaaagaattgcagctcaaagtgcgcaatttatgtatagcatcgtaagtgatgacccaatgggaagtctcgattttgatcactcagaagaggcctatcttccaattgctatcacggcaagtatgaaagaagagtttttaaggcttctagaaggtacttttgatgttcgtcagcttactctcttccctgatcttgatggattctgccatgccaatacagaaaagaatgggcgctgggacaacgaacgatggtaa

SEQ ID NO: 245689 - DNA, 693 bp, Klebsiella pneumoniae
atgtaccaggacttacggccttccttgtatagaggtattgattctgactcagcaaaatataatcgtgaaaccagattgaatgctaagatcaatgaatatagggaagcatgtagcatcttttcaagatttggtgattatgcagccgaaccactcttacagcattatggactacaaacgacctggcttgatatagttgataatatatgggttgcattatggtttgcatgctatgaggcaaagtgtacccgagatggctattatttacattttcaaaagagaatagttaatgataagaataaatatgcatatatttatcttgtaggtacagatttagattatcgctcaaagaataaaccgggatattggaatggtcaaaacactgagttagttgatttaagaatagctgcgccatcgtattttttaagaccgcacgcccagcatggcttgttgtttcgttgtaaaggttttgaaggtgttgggcggccattggattattctcgacaaatcaggggtattgtaagaataccactagaaaaagcattcgattggttagggaatgggcatactgtaggtattcactccctgtttcctccagcattttatgataatggttataaaattcttctccagtgtggtgttacatttgatcctcgagataaagtaattggcgtggttcattccgtgggagcttaa

SEQ ID NO: 245690 - DNA, 831 bp, Klebsiella pneumoniae
atgaacaaccaaatcaagcatccggctattcgataccacggcggtaaattccgtctggcgccgtggattatcgagcagatgccggagcatatctgttatgtcgaaccgttcggcggtgctgctggcgtattactccagaagccgcgcagctattcagaggtgtacaacgacctcgacggcgaggtagttaacctgtttcgtgtactgcgtgaccctgcattaaaccagcgcctgcaggatgcctgctgcctaaccccgtactcacgagatgagttctgtcatgctcaggagccagcgacagattctatcgaacgcgcccgccgcatggtggttcgtgcctgtatggggttcggctctgcagcaggcgtcggcggtcaatccggtttccgcagcgacagcaaacgcaaatacgctacggcggcacatctttgggagcgttacccgagcaacctcgccgctgtctgccagcgtctgcagggagtcattattgagaacaaagacgctctggcggtaatgcgcgcccacgacgcagaaacgaccctgcattacatcgatccgccatatgtaccggacactcgcgtgcaaggcaatcgttactacgcgcatgaaatgaccgttgaagggcatgagcaattactcgctgtggccagaacgatggcggggatggtgatgattagcggttacgacactgaggtctacaacgacatgctgaccggctgggtaaaaacggagaaaacctcacgcatcagcgcagggagaggtacgaaagtacgcactgaatgcctctggcttaacccggctgcacagcagaaacaggagtgtgcagcatga

SEQ ID NO: 245691 - DNA, 498 bp, Klebsiella pneumoniae
atgactgagcgaggaatgaaattctccaaattcactgagctggtagcccgcatctggtcaaacccaactacgcagcgtcgcgacccggagattaccatcgtcgtccactcacctggcagcatcgggccgtctccatccgtcgaggtcgaggctattcacgcaggcttcgactgggatgcggggcaggtgatgatctacccggcccagccactgaccacgctgacgcctgagcaggtagcggacatcaccaccagcgtgcgcaaaggccagtcctggcacgcctttgaggcttacaagaagcacaaagcccagttggaaaacgcagcgcttgagtatgggaaagttgccgggcagcgcgataagctgctgaaagctctgaccgacgcgctggaatggatcgacgcggtgccgtccgaaacagccctaccagccatgcctggcttcgaccgtgacgaggtgaacaacctcatttccagcatcaaaggcggtgccgaatga

SEQ ID NO: 245692 - DNA, 129 bp, Klebsiella pneumoniae
atgataagccatgaaacagtcacgccgttaaattaccggacggccgttccggccggatccgactttttacgtttagcgaagtttccggaagtgtaccacggccagggaataagcaaagcgtccttttag

SEQ ID NO: 245693 - DNA, 351 bp, Klebsiella pneumoniae
atgaaaaaagagatctcccgcaacccctctttcacgccttcgcctaagctgcgagcacatctgaactcccacagggaaggggtgactgaaaggctgaataatatctttgatcgctatgcgcatctggttcgcgcctgtgcccttactctcgatgacgacgaaacacaggttctgcttaatgtgctgaatggctccgttgtggaacccgcctttattgaatatctggctcaggaaattcgggactcggatgattatctggaagggatacccgcagctaaatcactgtacgaaaagtgtcagtcagcgacctatccgcaattgctggccaccgtcgaacgcctggaacgataa

SEQ ID NO: 245694 - DNA, 2754 bp, Klebsiella pneumoniae
atgcagcaaataggttcaaaatggtggaagtttgatttccatacgcacactcccgcctcaatggactatggcaagggtgatcatgaaatcaaaaagaatatgacaccgagaaattggctattagactatattaataaaggaatagaatgtatagcagtaaccgaccataactcaggagcatggattgaccaattaaagattgagtccatgaaattaagagaggaaggacactcaatttatatttttccttcagtagaaataacatctcatggcaacatacatattttagggatttttgacccaaatagaactacaagttttatttcacaaataataggcgcagcaaaatacactggttccgaaggagatagtgatgccgttacacaatgtagtcctcaagaggtcatcgatctgattattgagcgtggaggagttgcaatacctgctcatattgacaaagctagcggcctatgtagagtacacgcttcaggctctacgctacgacagatattaactaatgcatccgctgttgaggtaattagaacacataaagagtatgaagctaaccaacccggcacaagcccgttgaaaggttatatctccttgcaaaccggtttacctgaagttattggttctgactctcatcatcctgatacagttggcagggcatttacttggataaaaatgggtactccttcaatagatggattaaaacttgcattatttgatggagcagactcattaaaaaggtctgataatttcccggattcaccaaatatctacgccgaaaatagaataacaaaaataaagattaacaaaactaaatattgtggacgcaataatgaattctcgatcgactttcatccttggctaaactgcataattggtggcaggggaagcggtaaatcaactattttagaattcattagaaccgcattaggcagggagcgagaacttgaacaactcccctctaatcaagagatgtatgcagcctatcaaaaactcgcgaaaaaagctaagaatcgagaagatgatggagtattccttgacgatagcaatatacagattgaatatttaaaaggggataacaaatacctcttacattggtcattctcagatcaaaatgtatcaattaatcgcttcgaaaatgaaattctaataccggaagaaggtgaagtatcctcgcgattcccagttaaaatatttagtcaaaaacaaatatacgagatatcaagatctcctaattatcttttgaatctcatagatgaaccaaatacagttaacttcaatgagtggcaatattcatgggaaaatgaagttaatatactttctcaattaagaagggaaacaaaagaacttagaagtaatatagccacaaaaacagtgctaacaggacaattgaatgatgtaaatcaaaaaatcgcatcaattgaaaaatccagtcatgccgctatattagccaattaccaaaaatcaattaaccaagaaggcattgtaaaactggtatcatcaaggaacattgacttcttcaagcaattaataaaaaatatttctaacaataaacctgacgcttttaatacagacactttacttttcagtagcactcatgagattgaagtacaagacagattattagaaattcaaataaaggttgaagatgctataaagactgcaactgatagcgcaacctctttgattgaagaaattgaaagctttagtaattggtaccaactgtgtgacctcaaaaaaacaatgatctttaatcaaacccaatatgcaaatttggtatcttcacttaaagcaaatggtgttaacaatccaaatgagtatgaatctttaattaactctagaaagcaattgactgaaagattagccaaaatagctatcgatgaaaaaaatattgatgttaaaaaagcagaaacatctgcaagctataagcgtttaattgaattacggaaagaacttacttcaagaagaaggaaattcttggtagcaattaacgatgacaatgctaacttcaaggttaatgtggatttttgcgccgataatcaattcttagaaagtagtttcagaagtgctattgataaaaaagactcgacttttagcaatgaaatctacaatgaagatgaaaacggatttctaaacatattaacaaaccaaatcagagaattatctgagaacatggatgagataataaagaaaattgagcagttaaaaaattgcttctttgataagagcagtaactctatatttgatgtgaaattaagcaaaagatttattgacttcaagaatgatttaattgatgaggttataacctctttaatttgctggttccctaatgatgcaataaccgtaaaatataatgatggaagaagattcaaggatctttcacagggttcagcaggtcagaaagcagcaacagtattggcttttttactgtcttatggcgatgaccctatcattttagaccaaccagaggatgatttagacaatcaattagtatatgagttaatagtaagaaagataaaggaaagtaaaaataaaagacaaataatcatcataacgcacaatccaaacattgttgttaatggcgattcagagttagttgtatctctaagccaacaaactggtacaactgattttctgtcattaggcggtttacaagaccgagatgtaaggcaaacaatttgtgatattatggaaggtggtagagatgcatttagccagcgttacaggaggattgtaactgcttga

SEQ ID NO: 245695 - DNA, 606 bp, Klebsiella pneumoniae
atgaacagaagcaacgatctttaccagaaagtcaccgatgaaattatcgccgcgctggagaaaggagtgatcccctgggttcgcccaaggcgggaaagggaacctgtagtgccgatgaatgccctatccgggcggttttatcatggcatcaatattcctctgctctggaacagcgcagaacgacagggatatgagagcgatcgctggctgaccttcacacaaattcgcaacccgggcggtaacgttcgtaaaggcgaaaaatttaaactggccgcccagcagcgcgaggttgtggacagctacgggaacacggttcttgatgctaacggcaaccctaaagtggcgtcttacgccgtggtacgcgagttcgggctgttcaatattcagcaatgtgaagatttgccgcaggcattctcgcagcctgtcgtgatggtcgatgatcccattgccgctgctgaacagattgcccgacaaagcgtggtgacgatcactcaccggcgccaggaccgggcgtattattcaccagggcgcgactgcatcatctgctgcaccctgagcagctcgcttcacgtgaggattattacggcacgctattgcatgagctga

SEQ ID NO: 245696 - DNA, 780 bp, Klebsiella pneumoniae
atgagacataacaagatcagtggtggttattacgtcgaaccctacgctgggggcgcaggtgcagctctatacttgcttttaaatggctatgtaaatcatattattataaatgatgcagaccctattatttatgcattttggtggtcggttcttaataaaaataaagaatttattgaactaatcaataatacagaagttacaatggatgtttggatcagacagaaagaaattattaataattctgttggtgtagatttattaacacttgggtttgcgacattttttttaaatagaacaaatcgctcaggtatattatctggtggagtcattggtggaaaaaatcagactggtaattataaaatagatgcaagatataataaagtaaaactcacccagaggataaaaaaaataggtgagatgaaaaattatatcgatatttataatttagatgccctagctttaataaaaaaaatagacaaggagcttcccaaagaatgtctagtttattttgatcctccttattttcacaaaggtagtcagctatatcgcaatcactacaaatcaggcgatcatcttgaaatagctaatgctatacaaaaattagaccgcccgtgtgtcgtgacatatgataattgtgaggaaattaaatcattatatcttaatgagaatagcattgaattttctttacattattctacccatatgactcgacctaaggttactgaaataatgttttataaaaatatagaactacacaagccacctcaaatgacaaaataa

SEQ ID NO: 245697 - DNA, 1356 bp, Klebsiella pneumoniae
atgagcagaaaagactttgtttttaaaactgacgtaccaatacatgatattttacttgatactgagaatgcaaggattagaactggaagcgaccaaaggaattgcatatccagaatattaagaaaagaaaaacaaatgttggttttaatagaggatattgcaaagaatgggctaactactatgccaatattaattatgcctacacagaataacaaatggatagtaaaggatgggaacagaagaataacagcattgaagctattgaacgctccggaaatttgcccagagccccaacttatttctaagataatgagcatagcggaaaaatacaaagataacataagtccttatgttgattgcttatgtagtgaaaaccctaaagctatttttgacgaaattgttgctaggcattcaggagctagggaaggagcaggtcaatatgattggtttgcctatatgcgcactatatatctattaaataatggacaccctactgattataaaagggccgggcaatatatgagctgggcagaaaaagaaggagttgatgttgaggatgattttcctataagtacaactgcacgtttctttaataaagagaatttaaaacttcttggattcgatatagaaaatgataaattaaagcctatcttatctaaagaaaaaatactcaaaatggcatcgatgatcaatgatgacttctcatccaaaaaagtagatgtgaacgatgttttcaaaccagaacatgcccttttgtacataaagaaactaagggaaaaatccggtctttacgatatagatcaggttgaagatattcaaaataataatacatactccaattttagatcgactaaagagccagataacagcgaaaattccagcgctaacaaaactactcgtggttatacacctaaaaaaataccagcagaacgtaaccgcctattcgggcgagcaaaaataggtatatcagttcctgatgacgcaactaaagttagaatgataattactgagttaaggcaattagatattaggaaaacgactttagcagcaaccgttttattaagagcattacttgaactcagtgacagagaatatagaacgattcattcaataaaagataaagggggtctttcaaaaaacatagcacttgcagccgatcatatgttaaataatggtaaaatatcatcatctgaacataatattattatggcatatactcgaggtgaacaaggagttttacacatagaaacattacaaaagtttcttcataaagaatcacatcatccagattatcaaactataaatatattttgggataatattggatgttttgtaagggcgtgctggaaggattag

SEQ ID NO: 245698 - DNA, 753 bp, Klebsiella pneumoniae
atgggtattactcttttcactaataatgcgttttcgtctgtttcagaccctgacgaatattcgccaggttttgatacaacatctctccgccgggctgaaatatttacttatacagggattggtaaaaaccttatgccgggggaaggcgaccccactgtagttggcaccccgacgtttatcaccgattcgccatttgttcagttctcaaataacgcgaatgtggcacatttgaacctgggaattaatgatgccgcccaacaaacctggtttttgctctttgatccgaataatgactcgacgcaacgaattatcgcaggaagcttttcgggaacagctgcatctacacctcctggggtatctgtgattgtagatgaatcaggagcgctggcagccatgcagggtgtgcactacacggacactaatacttacggaacggcgcgcgcaactctgagtgcgttcaataaaacaaagccgatgctgatctgccttacccttgacggccagaccaccaggctgaccgacatgaccaacaatgtttcagcatctctcaccctggcgtcaggtcgcgagcgagcgccgactaccattcgcatcggcaagggaggcgttacgtactggggctcaacctcagcaactagtcgcatcggagcctacatggttttcgatcgcgtattatctgatgctgagaaaggttctgttcatgactatttactccgttgcatacaggcgaagtatccatcattgattttctga

SEQ ID NO: 245699 - DNA, 1623 bp, Klebsiella pneumoniae
gtggccattgtactgaaagatgagctattaaccactctaccagcagccattattttacagtcacctgagcagcttaaagggcgtcttttaccccatatcaatatggggtggtacctgtgctatgttgaggagaaagaagcaacctgggatccgaatgatcttgagggcttattgagaagtgttgacatccagataggattaactctcaataattcggtaaatgctgttgaaacgggattggcggttgatgcggagatggaaggtgagttttcttcttactggttagccaggcataccgcatatctggttgcagatgtcactcagcaaaaagaattcaattgcttcgttgctggaacgaagaatgcgcataaaactgaatatcaggagtgggttgtttgtgatgacacaactcttaaagaacgtgatgcatggctgagccaacgaaaactggaacttcatgactcgcgggggattattacccgccgtataagaattaagccttcacaattgagtggtgtgacatggccacccaaaaccttcagggctgtgctggactggcttgctgaggttgataatgtagcatggctgcatctccttgagcattttatacaacatcctgtgaaacgccatatgatactgatggatgttcttcatcaggacatggtcggattccgggtggatcttgatttgggagcactggctctcagttcgtaccagtcatcttcagtcaaaaggcaaagaaaagccgggcgggtgaattatgcccatctcgccagtgctgtttcttcaaaacaagcagtgcagaaatttcaaagagtgaatgtagtgcaggccgatcgcctttcggttctcagccgaaatcgcagggggaaggagtcaggagatctcagcactaagcatatagcgcttatcggatgcgggactataggcggctatcttgcagggttattactacgtgctggcgcaggctgtggtgataaaacatttcatctctttgatcatgatgaatttcaacccattaacttcggccggcatgtcctcgcgacaacagacattggccgtaacaaagctgaagctttggttttcacgctaaactcatccacccatcttgctaataatattaaagcatttacttcgcggtttgctatcaacgcggagcagctcaaacgctatgatattgtcattgatgcaaccggcaggcctccagtgtcagctcgtcttgcttcggtagtacggacacttaaattaacagagcgccctgtcttaattcatggttttaacgatggcaatggacgagcttccaaggtcattattgatgatggaagctgttgctatgggtgtctttttgccaacgaagccttctataaggggggaatggatctgcgcttcaatcatatcagtatgtccgcggaaagacatatcagttgtggcagcacttttacgccctatgatgcagcggttagtatcattactgcagggataatgcaggaagcggctctctctgtacttgaaaagaacgctcgctggacctatagcgaacatatgctcgagggaggccggacccaaaagcaaaaacttttagcagctcatccccggtgtggaatatgccatggcaacttgtga

SEQ ID NO: 245700 - DNA, 1293 bp, Klebsiella pneumoniae
atgagttggagttttcatcgctattatacaaaccggacagatggactcatcagtaagctgaagctcagtgacgaaaagtccgggtatcttaaggcgcttcgtaagcaaattcgggcacgtacaagagatgtgtttgaagaggcaaaaaagctggcagaggaaaccagaacttccactgtaaacctcagggagaaagttgccgctacccactttcgacatctttcgccggaagcgcagaaagaattcgaagagcttattaatgcacttggtaacgaagcccgtgaatcatttttacgtctgaagccacgtttctggactcagggtagttttcagtatgacacgctcaatgtgccatatagcacacctccccaggagatggatattgatgatggtacctatcttcctatggcactttttgatgataagccaatcattggccaccggcttctgttgttacttgtcgatacatccctcaaatcacttgtcgctgaaaatgatggatggatttttgaggcgaagcgtacctgtgcgcggatcaaaatcccctctgaaaatacgcatattgacgttcctatgtatgccatacctgaggatcagttcgttttaaaggaagtcgcgattgagtcgttcaggaaaatggcctttgattcagttgatgcaagagctgaagcctggatggttaatcgtgatgaatatgaactggattcagactccgtaaaccttgccctgcgcgaaggtgagcaaaaatgggcaaaaagcgatcctaaaatcgttgaggattggttccttgaaagttgtcgagtgaatggctggcacttgcggaaagtatgccgatttatgaaggcgtggcgtgatgcccagtggaaagaaaaagggccgtcatctatctcattaatggctgccaccctgaatgtcctcaacaaatttactcatgacagtactgatcttggggcaacgatgagtctaatcgctctgcatttgcctgaggagttcagaaagggggttgaaagccccgatcatacggatgataagcccttgttcccaccggtcgaagcgcatggtgaatgggagcaaggtgtgatcataaaacttgaagaattaaaaaattatctgtctgaagcggataccgcagaaacgaaggagctagcactgaaagcattaaataaagcatttggtgatcgcgtagcggaccacgaccttattgacaggaaagtcgccggaccggcatatcatgaagagcccagcaaggctcttaagcctgtcgtcattagccagacgatgagcagtggctaa

SEQ ID NO: 245701 - DNA, 1086 bp, Klebsiella pneumoniae
atgtcggagcagtttgacgttgagaagcttaaaatcctttgtctcaatggcggtggggcgagagggctctttactattaatgttctcgctgagattgagcggataatcgagcagaaaacaggtgataccagcgtaaatgttggcgattactttgatctgataactggcacctccattggggggattctggctctgggtcttgcttcagggaaaacagcacggcagcttgaggccgtattcagaaagcaggctccgttgatttttccggagcaaaaattagcctggttttttcctaagtaccgccgtctttatcgcctctgtaagcaacctttatatgacagtgcacctctcgctgaaacaattgcgagtatggttggaaagactaccacgtttaatgacctgcagcgcagggttatgatacctgcagtgaatctttcaacaggcgaacctcagttttttaagactccgcataatccaaaattcactcgtgatggccgcctcactcttctggatgctgcaatggcgacctcagctgcgccgacttacttcgccccccattattgtaacgaactggatgcttatttcgctgatggaggcttagtcgcgaacaatcccagcttaatcgggctttacgaagctatcagtgatatgcaaaccgattttcccggggtagatgtcaggaatatcagaatactgaatattggtactcttggcgaggaatataccatcagtccggcagcccttgcgtccaagaaaaacggttacgctggtctgtggggtgggggagaaaggcttgtgctgacaacgatgacggcaaatcaattgctacacaaagcgatactcaaacgcgagttacgccgtaatgatgcttcagataattacgtttatctcgatgacacaatccccaatgaggcagcctcagacatcactctcgataatgccagtgaaagtagccttcgtaaccttgccagcagaggtaaacaactggcgactgatgagttttctaaaaacaatcagttaagggcattctttaaggcacgtgccgttccgttcattcgcaaagccagtaaggagctaataccatga

SEQ ID NO: 245702 - DNA, 891 bp, Klebsiella pneumoniae
atgtttaagtatgccgtaaactcgctagcagattatgtttcaacagttacagaaatagtaaatgaagtcgatgacatatggtttagaggacatgcttgcgcttcatatagattagtaccctcggtattacgtgataccgttcccttaactgatgccagaggtaatagggtcgaaaatggtcaggtgatactttcagagggcggtcatgtaacaggtcttagtcccgaaaatatgttttatgaatttaagtctcgagcggttccttttttgaatcgagagccctcaaataattttgagtggatgttcttgatgcagcactatggtgtaccaaccaggctgttagactggacgacaaacgccttagttgcgttattttttgctatcgaatcaaatcctacctctgacgaagagaggcattacaacgaatcgccctcgcaaaattttatggaaagcgatgagttttgctcggaaggagctgctgtttttgccataagcccatcaaaattgaattatttaacagtctcaaaccgatcaaaaatttatatttgtgaagaagctgatgaatggagtcattacttcgacccaatgaataaagaaggtagttgtaattttcttccaattgcagtccaatcaagtcatattgatacgagaataagatcacaatcgggccactttacattacatggttcaaatatatgggcattagactattacgatgagcttcgtaaaattatacataaaatatttataccatatgaagtgatcccccaaatgcttaaagatttgcaagctctaggtataacggagtcatttatatatccggggctagaatcattgtcgcgagatatcaaaagaagcgaagcttttaaatttaacggagaaaagctttag

SEQ ID NO: 245703 - DNA, 813 bp, Klebsiella pneumoniae
gtgggcatcgaggtcggcatcttctgcgccctgcacacttacggccgccagctcagtcagcatccgcacatccacgtctcaattacccgcggcggtctcgataccaggcacggcatctggcacgatctgttcttcaaaaagcagcaggttgaagccatctggcgcggcgcggtcatccgtctgctgcgtgccagctacgatcgcgtcaatcccggtaagctgcccaatctcggccatattcgcgatgagaaacagtggaagcgctacctgcagacgcaatatcagcgccactggaaggtccacttcgccaaaaagactcgcggtgcctggcgcagcatcaaatacctcggccgctacctgaaacgcccgccggtggcggcgtcgcagcttcgccattaccgtggcggctcggtcgttcatcagtactatgaccacaacacgcagcagcataaacgccagaaactaactcaggaagagatgctgtggcgctacgtcagccatatcccggccaggcattttaaaatggtgcgctactacggcttcctggccaaccgaaaacgtggcaagttgctgccgaaagtctatgaagccctggaaatgacgccacgcgagaaaccgcagaagccggggtttgcggtgctgatgaaagcgttcctgggtaccgacccgtaccagtgcatcctgtgcaagggccgactgcgttttgccggcgccatggcgggcgagcacgccacaaaaatgctctcagacaggctgcagcgcatggctaaaaaacgatggcttcagaccccttttctggataaatgcgcctga

SEQ ID NO: 245704 - DNA, 594 bp, Klebsiella pneumoniae
atgaaatataatggaactgacaagtattgttataaagaataccatggtgtactgataaatcattttaatattaaagatgatgaattattggatagaagaataatatcagagcaaatgttagtcattgatgaaataaagatatttcgcccatatggtttaaacacattatgcaaaatacatagaaaaatgttcttatgtgctttcagttgggctggtgaaatcagggatattgacattagtaaaggtgaaactagattttgtagtaacccatacatagaaagggagggtgaaaaaatatttaatagaatcaatgatttagatgaaaaaatcctatcaaaggggatagataacatcactaaaaatgaaaaggaagaatacattaacgtgttaggggaaataatcactgacttaaattttcttcacccttttcgcgaaggtaatggccgcaccttacgcttatttatagaattatttttgtataacttgggaattaatcttagctggccctcatccccagagagatggatgaaagctagtattgatgatgatatgaaagaatttacctctctcatattagaaaatatatcaatataa

SEQ ID NO: 245705 - DNA, 327 bp, Klebsiella pneumoniae
atgattatacttagcgagattgaaacgttagagcaattgaaaaagaaaggaccatttaataaagtaaaagcaagtataaacgagattatccccattaaagctagaggttgggatcatttgtgggcaaagatattagaattgcgtatctatgctaaatgcaatgacatattccgcactgcaaacttacttagaataaaagacatatcgctcattaaaaaatacttatggctagtcacggcaaccagaagaaaatataatctgtacatcagttctaaatacgaaggaattgattatttcaaatctggagaggtatgtcatgaaatataa

SEQ ID NO: 245706 - DNA, 693 bp, Klebsiella pneumoniae
atgagcagagaaagaatagtacaaaatgcatattgtgactatgattcatacaaaaaagattttagcatcttttctgatgcaacattagcacacttaaagacaattgacatattcgaaatgtactggtgtactctcatcttcaaaaattggaaagatagcgtaaaccatattggaattaatgaactagacgaaatatttgacgaattgcaccaagacgtcaactcatcttattatttggcatcaatgggattatatcgaacagctaatatgcatttgcgtagcatgatagagttatcgttacaattactctacttctacgaacatccaatcgagctaaaaaaatggagagctggtgactttataattaaacatgataaattaaaagaatatattaaagactatccaaacttcagtcaacaaccgttgaaaggagaaatcgacactctaatagaacaaatatcaaaagaatggaaaaattattctaaacatattcatgcagaatctattaagtattttcaaacacaaaaacaaccatcaccagcaagcagttttaacgcagcaaactttggagcttggaagtctggatttacaaaaatagtgcttaaaataaataatttattcatgttattcttctcggaaaaatataagttattcccatctcagaacaaagaacttttagctatggcattgtaa

SEQ ID NO: 245707 - DNA, 825 bp, Klebsiella pneumoniae
atgaaaactatatcattcataaatatgaaaggtggggttggtaaaacaacatctgtagtagagttcgcgactattttagttaaggaccatgggaaaagagttttaattatagatattgatcctcaaacaaatgctacattttcgtttatcaaatatgatatatggcaggaccaaatagaaaataacactattgcagatgttttaggtatgaacaaacatctttcgagtagagatactgaatataatatcaacgatgctgtaataaaaaatgtttcagggattcaagggttagatctcatatcttcacatttaggattaacgtttctagatttggatcttagtgctaaaccaggtagggaaatgattctatcccgtcagatttcacgtttagaaggtgagtatgattatatattgatcgattgcccacccaatttaactctagcacctcaaaatgccttggtagcatctaattatattatcactccaataataccagacttctactctttccttggcctgccgctacttaaaaacagagtggaccgtttgaaaagagagttaaatattgatgtttcatttttaggatgcttattcacacgagtagaaagttcagtcaatcttcatagtgcatatatgcctaaaataagaaaggtgtgtgaggaatacggtgtatacgattttagaactattattcctaagaatattaaactaagcgaagccagtagtgcaagttcaccagcaaggattatgtttcctgatgtagctggtgtaatagcatacaagacggcagttaatgagatgctaaaacagttggagaatatttaa

SEQ ID NO: 245708 - DNA, 489 bp, Klebsiella pneumoniae
atgtttgcctgcgaagggtacgaagctcaattagcaatcgcctatatctcactgattaagcatatcaacaaccttggcgagcgcaaccagcacttggcgcgacccatcgctaatattaccgacgaggcgcatatcatcaccgtcaacccgctgctggcacggtttctgaccaagggttcgaagatgtggcgtaagctggggatctggctgtggctggcaacgcagaatctgagcgacttcccggatgatgcgaagaagctgctcaatatgatcgagtggtgggagctactggtgatgccgcccgaggaagtagaacaggtcagccgctttaaatctctgacgccggaacagcgacagctcctgctgagcgccaccaaagcgccggggaaatacaccgaaggcgtggtgctttcgccgcgagtggaagcgctgttccgcgtggtctcccctgctctggggatgacggagaagcatgaaaaggcagagtga

SEQ ID NO: 245709 - DNA, 1515 bp, Klebsiella pneumoniae
atgattaattccacacctatttataataaatttaagtacgtatctgctgagtgtggttcaggtaaaacatatcaattatgtgagaatatcaataaagtacttaagacgaaaggcattactgaaaagtttattatcgtacaaaatacacagaaactcgctacaaaaacagctaaaaaacttaacaactgcaaattactgattagcgatttaatgcccaggagtaaaaatgtcattaatacagtactggaatttttaaaatcacctaccgagcgagtgctaataattagcgacaaaactttttttagaattcccattgagttactacaggggtggcaaatatggcttgatgatgtgactaatttccattcattcaaaaacgttaatgatgataatcagagaatcaaagatatgatttatcatgaactgatgcaggagcatgagattgtcgacgaggaaaaggaacgatatttaacagctaaaaagaaagcagtaaaaggggatttaatgaacaaaatcgcccaagagctttctgttatagctgagaatgatattttcatcatgaacaacgattactttgtcgatccagagaaagtgcaattgagcattcttggatggaaagatctcagtaagtatctcggattacctgttactttcatgggggcgaacttcgagaattcattgatttataaggcaaatcaagggatgtttgaaaaaatcagtctggataatctgcgacaacgaaaagtacctttaactgaacgcctcaaagtatactatttctcagaaaatatcaagttatcaaagacatggaaggaaaggaatcccgaccaactccagcgtgtttatgattacctctctgaagtactcgacggtcagaagtactactggacgaacaacaataccgataaacagaagctgcatgaggcttacagaatcagccctgatgcgagggggcataacgactacaaagatcgacatacatgcgtctggttagcctgtatgcgttctgacgacacagaagcgaagctgtgtgagttgctattaaagattacaggtgaagatatccatcaggctagagaatacgagagccttcatcagttcgctttgagagggatatcacgtgatttcgacaatgatgcaacacagattgtctatgtgttcgataaatggcaggctgaatcattgagtacaaatattgaacatattcctgaagtactagaaaacgttgaaccaggtgtaccgggaaggccaaagggagccacaaacgctaagagattgcctgcattgagtgatacaaaatcaaagcgtttcagtcgctggaaaaaggataatccgaggcttgagttagaggcattcaaagcgtttcttgcaagtactgtcaactcggatctcagtcctgacgatattacggctatgtggggcagataccagaaagcagtacaaaaaagagacacaaactcagtccgatacaccgacatacaaagcaacagtatgtccaaaaataatcccttataa

SEQ ID NO: 245710 - DNA, 375 bp, Klebsiella pneumoniae
atgtcaaagaaaaacagtaagataccttccgtgattgtcaatgaaatcaatcatctattcaatgatttagctgcttttggcgttatagttcaacgtaagcaaagtagtacaaaagcctacatccaggttttggatgaatatcaggggaatgagaggattcacaccatttacctaaaggacgataaaatacgttatcgtggcctaaatttagaaagcggcaatataacagaagtcgatatagaagataacgaagtaaaatttgcgatgtattcaacattaattatgaaacttcctgtagcttttgaggcgatgaagcagcttctttcacttgttgataagcatgatcttgtagttgtcgcaactcctaaatactaa

SEQ ID NO: 245711 - DNA, 1890 bp, Klebsiella pneumoniae
atgccgcaactttatagctatatcaggtggtcaagtgatcgccaggataaagggacaaccagaaacaggcaggtagcggcagcgaaagcctatgccgaggaagctggccttgaaatggttgaaattttagagcctggcgtaagtgcttttcgcggaaagaacagggcggggaagttgggcgacttcatagacgccgttaaaaacaatgctataccttctgactcctggctttactgcgagaaccttgaccgcctttcacgtgatcaggtagatgaagcactgcgtttattccttgagttgataggtttagggttaacgattgtcacaggaatggatcggaaggtttataacagtaaatccatcaagcaaaaccctattgatctgatgatttctattctgatgttcatccgtggcaatgaagagtcagaaacgaaatctaacaggactgtaggcaatgttgttgctttggtcgaacgtcataaagaaggattgccagtaaacattaagtccgttggccgccatccgttttggatagatgattctggttcgcaatatgaagctgtcaaaaaacatcctgtttactggagcatcgcacgtgaagctatagaaatgtttttggcaggtgatggcatatacacagtaaagcgacatctagatgataagtatccaaatggtttgaagggtaaggagtgggattatcaggtattaaagaaaatgcgtgataaccgtgccttgattggggaaagaactatcaatgtcgctggtgcaacttacaaattggataactactacccgtggttatgtaaagatgaagcagagtttttaaccctggctgaacgtaagcagcaaaacaactacaaggctaagaaagacaaaacagaagaaatcaagttgttgtcagggctacaggtgttgcggtgtagtaagtgtggtgggactatgcattcatttatgaatcatggtagtgctcgctacatttgtacgaatggggttcacttacaaaaaaactgttctggctggtctatatcagcacaattggttgaacactgtaccatgatttcactactgataggttacatggacaagagtcgcaaggatggtattgacactactgctatagaagaagaaatcagtagaaaagcaacattgataactgatctggaatcacgcatatcaaacatggcgaaagcaatagctattgctcctgaggtaagtgagttagcagttcaactaaatgcgtttgatttagaacgtaaaaaggctgttctggaagttgataaattgaaagaacgcttacattcattgaaaggtaaaggatctttagaagtagatattactgatttcctgatgcttattcagtggtcggtgtttacaaatatggaggatgctgacagaaacaaaataaggaaaattattagctcgattatcgaaagtattattattgacaagacggatggatgtataactataaagataaagtgtcataataaagatgaatggctagtgtttggtggagtcaacagaaaacctttttgggcttttactatcgagtattccactaatgattcaaaagacattgaaggtgaagactcttcaaattttgttagtaatccgctatttcagaaggcagtagagcaactggatagtatcaaacagagttatctaaatcttttcgagactgccaacactatgttaggagtcgttggttatagtgatattcgaggggcatcattctggcctaatactggacagtatgaacgtgcgaatgttgagtatgaggggataacttatagcattgcgatgaatggtcgagtttcgaaggcaataaccacagcattggaagcgacaggattgtcgcgtaaagccttcatagagcgttataaggtatga

SEQ ID NO: 245712 - DNA, 894 bp, Klebsiella pneumoniae
atgaaatatacggcattgatagtgacattcaatcggctcggtaaactgaaaaaaaccgttgaagagaccctcaaacttgaattcactaatattgttattgtcaataacgggtccacggatgggacccaagcctggctttcgtcaattgttgatacacgagtcattgtattaaccctcaccgagaataccggtggggcggggggctttaaaaccggtagtcagtatatctgtgaacagctggcaagtgattgggtatttttctacgatgacgatgcttacccctatccagacacgttgaagtccttttcacagctggataagcggggatgtcgggtatttagtggactggtgaaagatccgcaaggaaaaccgtgtccgatgaatatgccgttctcgcgtgtgccaacttcccttggcgacactgtacgctatttacgctaccctgcagagtttatcccggcagctaatcgttctatgttcgtacaaacggtttcatttgttgggatggtcatacatcgtgatctgctcgagaccagtcttgactacattcgcgaacagctctttatctactttgatgatctttactttggctatcagctatcattagctggtgagcaaattatgtatagcccggagttgcttttttatcatgatgtgagtattcagggcaaacttattgcacctgaatggaaggtttactatctatgccgtaatttgatcctgtcgaagaaaatattccagaaaaatggcgtgtatagcaattcagcgatagcgatacgcatcctaaaatatatattaatcctgccatggcaacgtcaaaaatattcctatatgaaatttattcttcgtggaatttcacatggcataaaaggtattagtggtaagtatcattaa

SEQ ID NO: 245713 - DNA, 1131 bp, Klebsiella pneumoniae
atgagaaaattgtgttatttcataaattcggattggtacttcgatttacactggatcgatcgtgccatcgcctcccgtgatgcaggttatgagattcacatcatcagccattttattgatgacaacataataaataaattcaaaacattcggctttatttgccataatgttactcttgatgctcaatcttttaatgcattagttttctttcgtacttaccatgatgtgcaaaaaattattaaaaatataaaaccggatctcttgcattgcatcactatcaaaccatgtttgattggtggtgtgctcgcgaagaaatttaatctgccggtcatcgtaagttttgttgggcttggaagagtattttcttcagacagcatgcttttaaaattattgcggcagtttactattgctgcatataaatatattgccagtaataagcgctgtatatttatgtttgaacatgaccgtgacagaaaaaaactggctaagttggttggactcgaagaacaacagactattgttattgatggtgcaggcattaatccagagatatacaaatattctcttgaacagaatcacgatgtccctgttgtattgtttgccagccgtatgttgtggagtaaaggactgggcgacttaattgaagcgaagaaaatattacgcagtaagaatattcactttactttgaatgttgctggaattctggtcgaaaatgataaagatgcaatttcccttcaggtcattgaaaattggcatcagcaaggattaattaactggttaggtcgttcgaataacgtttgcgatcttattgagcaatcaaatatcgttgctttgccgtcagtttattctgaaggtgttccgcgaattcttctggaagcatcttctgtgggtcgcgcttgtattgcttatgatgttggtggttgtgatagccttattattgataacgataatggaattattgttaaaagcaattcacctgaagagctggctgataaacttgcctttttgcttagcaatcctaaagcacgcgttgaaatgggtattaaggggaggaaacgtatacaagataaattttcaagtgttatgattatcgataaaacattgcaaatatatcatgatgtagttcgatga

SEQ ID NO: 245714 - DNA, 237 bp, Klebsiella pneumoniae
atggaccaacacaacaatggagtcagtactctagttgctggccagtttgcgctcccatcgcacgccacgtttggcctgggagatcgcgtgcgcaagaaatctggcgccgcttggcagggtcaagttgtcgggtggtactgcacaaaactgacccctgaaggctatgccgtcgagtccgagtctcaccccggttcagtacagatttatcctgtggctgcgcttgaacgcgtggcctga

SEQ ID NO: 245715 - DNA, 708 bp, Klebsiella pneumoniae
atgggggcgctcgctgttatattcagccaaccaacgctctgtaatttcacgcgcttcgttcagtgttctgaacagataaaaacccactatttctgtccggtacgtccggttgaatcgttcgataacggcattctgtgttggcttgccgagcctgataaattccagcatcacaccatgctcttctgcccattgtgccagcgtcagctagaccagctccgaatcgttatccatccgcatcttcagcggatatccgcggtttgccacgagcctgtccagcactctgacaacccgctgcgccgggttattcaggtcaatttcgatcgccagcgcttcccggttataatcatccaccacgttgaaggtcctgaaacgtctgccacacaccagcgcatcgtgcataaaatcgatggaccagctctggttcatcgcctctggtgttgccagcggagccggattgcgcactggcaggcactgttttcccttacggcgataattcagtttcagcaggcagtaaatccggtgaacgcgcttatggttctaggtgttgccctgcctgcgaaggacctgaaaaagctttttaaatccgtatcgcggatagcgttcagccgccacggtcagcgccataattaccggctcatcccgtcgcgtatccggctgataacgaaatgccgtcctgctcagcgacaatgtcctgcatgcctgacgtaa

SEQ ID NO: 245716 - DNA, 357 bp, Klebsiella pneumoniae
atgaaaagagcattatcagtactgttgtcgatagttccattaaccacaattgcggctactattcctgacggtaaaactgaaaaaccgttcgtaattgatggggaagttatttgtttgaaagaaattcagaagcaaatcaccccttatctcaaatcttttgaagaagaaagcggggttaagtacaagtacaatgttaaatctggtttattgcataaggatactgtaggacttcgactacagatcaaccgtgtggattctgggctagatgtgcgtatagcagagctggactactactggctgcatgaacgtggaagcatatgccaaccagtgtacatggtacttgatcgttctcaataa

SEQ ID NO: 245717 - DNA, 402 bp, Klebsiella pneumoniae
ttggtcaataatttactgagcatcgatctggggcgaggcagccgcctgccggcgtgggccacgtcgatggggcgggtgttgctgagcgcgctgccggaggaacaactggaagtgacgttgtcacgggctacgcttattcgctacactccgcataccctgtgcgatttgtccggtttacgtgcagagatcgcccgggtgcgcatgcagggctatgccctcgccgaccggcagatcgaggtaggcttgtgctcgctggcggtacccgtgctgtcgcgtcacggtcaggtggtggccgccctgaatgtcggggtacctgccgcgacggtcagcgccgcggcgttaaaagagaaggccctcgctccgctacggcgcgcggcgatggatctgtcgctgcagctatag

SEQ ID NO: 245718 - DNA, 267 bp, Klebsiella pneumoniae
atgcagaaaatagaccggccgggtgttgattttcaccagcacgtcctgagcgaccagctgattgagataatggctggcggtatttctttgcatcgcgaaacgccgggccagccagctggcggtaaagacctcgctcaggttatccggatcgaaaaaatcggtctgattttgcaaaaaagccaacagttccgttttacgcatcgcatccccctcttcgccattacgaagggatatgatgcgggaaatccgccaaccgttggcgcttaa

SEQ ID NO: 245719 - DNA, 918 bp, Klebsiella pneumoniae
atgaaaataaccaaagatcgggtggtttacgccatgtcgcgcgataacgttcctgtcgccaccgtcaacagtggaagtgaagtgttattcgaaacctgcgactgcttctccgaccaaatcacctcagctgatgccgtctttaatgaactggactggcagcgcattaacccggcgaccggccccgtctttattgaaggcgccgagccgggcgattgcttaaaagtcagcatcaaacgcatcaccctgacggctcaacaggcggtgatggtgaccgcgccgcagctcggcgtcattggcgatgaactgcatgagcccacggtcaccatcgtgccaatcgtcgaggatcatgctgtcctcccggggaacgtgcgcgtgccattgaagccgatgatcggcgtcattggcgttgctccagcaggagaacccatatcctgcggcacgccggatagtcacggcggcaatatggactgcaaaatgatcgccgccggcagcacgctgtggttgccggtcaacgtgcccggcgcgctattcgggctgggcgatttgcacgccgcgatgggggatggcgaagtgtctgtctgcggtctggaagtgccgggcgaagtcctcgttgagttaaccgttgttaaaaaccgtcagctacccttgccgatgctggaaaacaacgaaacgattttcaccctcgcctctgccgttaccctcgacgatgcagcagcccttgcggcacgtaacatggcccatttcatcgccaacaataccgcattaacgctggctgaggcgatcaacgtgctgagcatcgccggagacctacaaatttgccaggtcgttgatccgctgaaaacctgccgctacgcgctgccgaaaacggtcgccaaacagctttctctgtcgattgatgggggcaagcatgagcgttga

SEQ ID NO: 245720 - DNA, 1344 bp, Klebsiella pneumoniae
atgagcgttgaacagttcggctataaacaggagctccatcgagcgctgaccttccgcgatctgctggtttacggcatgatttttatggtgcccatcgcccctttcggcgtcttcggctacgtctgggatggcgcgcagggcatggtggcgctggcttacctgatcggcatggtggcaatgtttttcactgccatgagttactggtcgatgtcgcgggcattcccggtttccggttcggtatacgcttacgctcagcgcggaatacaccctatcgtcggcttttttgccggctggctgatattgctggactacattctggtgccatcgctgctgtatatcgtcagcgcggcggcgctggggccaatgctgcctggtgttccgggctgggtctggattatcggctttatcgcgattaacagcctgattaacttacgcggcattacttttaccgcgcgggcgaataataccattttgattgctgaaatcgtggtgctcactatttttgtggtactgggattgattgcgctttattccggagccggagcaggccacctgacgctcgaccccttatataatgccgataaattcagcctgccgctggtgatgggcgcagtctcgattgccgtgctctctttcctcggcttcgatggaatatcaacgctgtcggaagaaactaaaggcggcgtcgataccgtcggcgaggcctcgttaggcgccctgatgctggtgggtacgctgttcattgtccagacctggattgccgcggatctggcgcaaggtatgaaatttggcagcctcgataccgcgttctacgacaccgccaatttggccggcggccaatggctgaaatacgtcaccatgtggtccacggtgatttcctgggggatcgccaacgcgctggttgcccaggcggcggtttcacgcatcttgtttgcgatggcccgcgataagcagctcccgcagttgctggcgaaggtgcatccacgcctgaaaaccccgtatgtcagtaccttatttgtcgcgctgatttcactggtttccggtctctggttctacggcgatatcgacaacctcagccggctggtgaacttcggcgcgctgatgggcttcctggtgctacacgtggcggtgatcaaccactatctgattcgccaaaagtcgcgcaatctggtgatgcatctgctcttcccggtgattgggctgtgcattatcggctttgtcatttatgagatggatgttgaagccaaagtgctcggcctgagctggctggccgtcggcgtggtgtattacgccattatgcgcctggtgcttaagcgcaacgtggagctgaatctggaagggtaa

SEQ ID NO: 245721 - DNA, 1410 bp, Klebsiella pneumoniae
atggggaataagtgggccaccgttagcattgacgatattaagttacctgagaaatatagttgtgttggaggcccgttcggttcttctctttcacaaaaacattatgtcgattcaggtgttcctgttatccggggcaccaatttagccggagacatattttcagagagtgactttgtttttgtttctccagataaagcaaatgaattacaacgtaatatggcctttcgtggagacattgtctttacacaacggggaacattgggacaagtagcgttaattcctgaagactcactatacgaaaaatatattgtgtcgcagagccaaatgaagttgactgtaaatccaaaacaagcggatgcatattttatctacacatatttcagaactaatgaagccaaggcattgattgaaaataatgctattattggaggagttcctcatatcaaccttggtattctgaaaggatttaagttgagactccctccactttcagagcaaaagcgaatctctgaggtttccaagtctattgataacaaaatcaatctaaaccgccaaatcaaccaaaccctggaacaaatgtcccaaaccctgttcaaaacttggtttgtggatttcgacccggtgattgataacgcgctggatgcgggaaacccaatcccggaagcgctgcaatctcgcgccgaactgcgtcaaaaagtacgcaatagtgcagatttcaaaccactgccggcggatattcgtacattgttcccggctgaatttgaagaaacagagttgggttgggtgccgagagattggtattatgtaccactaaaaaatctcggtaaaataatttgtggaaaaacaccagacaaaagtaacaaagaatattatggtaaagattaccttttcatcaagattcccgatatgcatggcaaagtttttgtcacaaactccactgacaaattaagtacattgggaagtgaaacacaaattaaaaaattaatacccaaaggcagcatttgtgttagctgcattgcaactgtaggtattgttgctatcaattcaaaagactgtcatacaaaccagcaaataaacagtattgtaccaaatagttcaatactgagaaactatctctatttttctatgttagaaaaaaacaaaacatttcatgacttggcaagtggtggaagcgctactttaaatatgaatactggcatattttcaaatgttttaaccttaaagccagaagattctgtgcttgaacgtttccagcaaacatcagagcattggttcggaagaatattagcaaatgagaatgaaattcatacactaaccgccctccgcgacaccctgctccccaaacttatctccggcgagctctccctggaggatctaccagatttagtaacccaaaccgaacccgcttaa

SEQ ID NO: 245722 - DNA, 363 bp, Klebsiella pneumoniae
atggtggcgctggcgtttgccctgatttacagcctggcggggcagtacattatcgcgttgttaacctcactgccttccctgcagcagctggccgatcgctatctgatctggcagacgatcctgccggtggtcggcgtctggtgttatctgctggacggcatgtttatcggcgcgacgcgcggcgctgagatgaggaacagtatggcggtcgccgcggcggggtttgccgtgacgctgcttacgctaccggtgcttggcaaccatggtctgtggctggcgctggcggtgttcctcgccctgcgcggcctgtcgctggcgctgatctggcgtcgtcactggcgacgcggcacatggtttagttag

SEQ ID NO: 245723 - DNA, 1206 bp, Klebsiella pneumoniae
atgtcttctgctacaagtaagaatattttgaaagatgatgatgaaatggatttaggtaaattaatcggtgagctaatagatcatcgaaaattaatcatagccattacatccttctgtaccttaatttctctggtctacgcaatatttgcaacgcccatttatcaggcaaattccttgattcaggttgaacaaaaacaagggaacgcaattttaagtaaccttagtcaaatgctaccagatagtcagccgcagtcagcccctgaaatatcattgattcaatcaagaatgattttgggtaaaactgttgatgatttaaatttacaaattatgatcaagcagaattactttcctatttttggtcagggttttgctcggttattaggtgaaaagccaagcaatatagaggtaactcgattatatgttacaaatgcaaatgatgatgtaacgcagttagaattaaaaattaaagacggggaacattatcaaataaaatatgatggtgcggtatttaatgggcgcgttggagaattacttgaaaacaaacaattggcaataaaagtcaatgatatatcagctaagccaggcgatacatttactatttattatttcaatcgtctgaaagctatagctgatttacttgataatctgaatgtatctgatcaagggaaagatacgggtatattatcaatctcctatacgggagagaatccgcaactgatcaaaaacatcgtaaatagcataagtgaaaactatttggctcaaaatatatctaggcaagcggctcaggatgctaagagtttagacttcttaaatatacagttgccgaaggtaagaaatgatcttgatatagctgaaaacaagctcaatgcatatcggcgacaaagtgattcggttgatttatctttagaggctaaagcagttctggatcagatagtcaatgtggataatcaattaaatgaactgacatttagagaatcagagatatctcaattatatactaaagagcatccaacatataaagctttaatggagaaaagaaaaactctgcaagaagaaaagcttagattaaataagaaagtatcgtcaatgcccgagacgcaacaagagatcctaaggttgagtcgtgatgttgaatctggtcgagctgtttatatgcagttactcaatagacagcaagagttaaatctgtctcttatacacatctga

SEQ ID NO: 245724 - DNA, 321 bp, Klebsiella pneumoniae
atgaaaaagccattaccgcccgtattacgcgccgcgctgtatcgtcgcgccgtggcctgtgcatggctgaccctgtgcgaacgccagcgccgctacccgaacctcaccctcgacgcgctggaaagtgccatcgctaccgagctggagggcttctacctgcgccagcacggcgaggaaaaaggccgccagatagcctgtgcattactggaagatttaatggaagccggtccactcaaagccgcgccgtcgctgtcctttctcgggctggccgtgatggatgagctttgcgcccgtcacatcaccgtaccggtactgcactga

SEQ ID NO: 245725 - DNA, 228 bp, Klebsiella pneumoniae
atgagacacaccaccattaccgcccgtgacctcgaatgtctggagcatatgcgcaatgtcggccagctcgtcagcgacctgatgcaggtacaggactgcgccaccgttcgtcgtgacccggcgcagcagttacagctcacctccgtgatttatctcatgaccgcccagctcgacggcgtggttgaacgctgcaatcagcactggctgaccggggagggcaacgtatga

SEQ ID NO: 245726 - DNA, 267 bp, Klebsiella pneumoniae
atgcacaccgctttttcttccccgtcttctgcccctgccgcgccgctgatgccggtttctgatgccgttcaggagcgctttatccgcctgcccgaagtgatgcatctgtgtggcctgtcccggtcgaccatttatgacctcatcagccgggaagccttcccgaaacaaatcagcctgggcggtaaaaacgtggcgtgggcgcagtctgaaatcaccgcatggatggcagatcgcattgccgaacgcaaccggggctgtgacgcatga

SEQ ID NO: 245727 - DNA, 744 bp, Klebsiella pneumoniae
atgaaacccgaaacagtcattaccgccctgcaagacgttgccgctcagcagtacgcggagaacagccagcacgtcaccgacaagctgagcgcatttactgcggccagagacacccacgcggccagcatgcaggcgctgaaagagattgatacgtccattgaacgctgtaagcaggagtggcagaccgccctcgatgagagcgcagaagcggagctggactggcgcagccgctttcgcaccctgcgcggcagtctcacccctgaaatgaaagctgagcacagcaggcgtatcgccagtcgcgagctggccgacgagttcaccggtctgattgcggagctggagacagaccggacacgcgctatgctgaatgcctgctccaccggcaataaatacctttcagcgcatgaagatgcttttaccgcttatgccggtgcggaatgggctcaggctgtcaatgcgattcctgtcgccctcatccgcgctttcctgctgcgcattcgtgccctcgaaatgaagggagaaagcgctcctcagtccgtggccaccggcgagctgcgcgatgcgctgagccgtcagggcagcctgtatcacttcgatatgacgcaggagccggtgttgtccgtgacgggcatgcaccggccgcaaattactgacgttgatacggaactgttacgcagccctgcgaagaggatgatgcttgccagaaagctggctgaaaatggcgagacaaaagcggaggggtaa

SEQ ID NO: 245728 - DNA, 219 bp, Klebsiella pneumoniae
atgtttcactgtccgttctgcaaaaccagcgcgcattcccgcaccagccggtatctgtccgataacgtcaaacagcgctatcaccagtgcatgaacatcgaatgctcggccacattccgcacgcttgaatccatcgacggggttatacgttcaccggcgaccgagccggttatccctgtactcgcaccggcggccaccgttaaccgtgccggtgcgtga

SEQ ID NO: 245729 - DNA, 1395 bp, Klebsiella pneumoniae
gtggctgtcagaacaataagtaaaatagagctttcaaaaatccataatagatataatttaagtgtggatttttttaatgatcttaatgttattcatggtaagaatggcgctggaaaatctacactcatacatgttattgctaatatagtcaatggcgattttattagatttgcgttcttaacttttgaagaaataaaggctacatacagcgatggcatggaaatagaaatacgcagagataaaatagaagagcaatcttatatctcggtggtgctttccaacgggaagcatatcaacttcgcagttgatgaagctatggcagcggtgagagaaattgaaagtgaccgccatatgagggatcgagatgttaaatcaatgttggtaattgatataaatagatttgttaaggagaatgaactgcaaaaggtaagtgcatcttacttccctgcatttcgaactatgttagaagcatggagttcttcttcggatgcagcatatgagagaagagctcttcgcccctcattttataatcgtaaagccagtgtttttgcgcgtgagctgtttggtcattttttgcctagtataaattatccatctccaatggagatcgaagaacgtttgagagaagaaatcaggcgagcgcaattgggtatagcagcttatgaaagtcgaactttttctgaatcatttgttaaagtattttcggcattatttgataattcagctgtagaaggagaaattactggggatttattaaaagaaatagaagggttagcaatagcacaagatagctcaattaaaaatgattattatgcggagtattcaaaggtatatgaagagattaggtctttaattaatagaaatctaaagggcaaggtcgaaaattctgtttcaggtgctttggttgtatatcgcgatgcgttgagggataggcaagattatcaagaaaaagctttttctgaaattgataactacatgtcatctgttaattcatttttagaagataaagagatggcttatgattttgacttaaggcggaagtatccaaaagtcggacttaaattcccggatggttcatggagtcctattagagttttatcctctggggaaaggcaacttttaactatgctttatgcagcatctaagatgggagatgatgcaattgtacttattgatgaacctgagatttcgctacacatcgattggcaagaagatctattaaaaagaatgctttcccaacttagtggccgacaaattattgtgtgtacacactcgccatctattgcaacaggctacgaagattttatgataaatatttcaccggagtttatttcttcgcgtgatgacgataatcataaagactcagaagaaatggaagaggatgaatctttatga

SEQ ID NO: 245730 - DNA, 927 bp, Klebsiella pneumoniae
atgagttcatgtgcttacactgttgatagctatatcacatcattgagcatgagctctaaaaagcggttgttggtagaaggaagacatgaccgttcacacctatatcaattaatttataaatttaatcctgcgtccaaggttaaaattgacacagcgcaagacataaaagcatctgacaaagctatgtctaaaaacaataggttgaaaatagagactattcattcgagggttaaaagtaaagataatatatcttttctatgcgatcgcgaattcagagagttcacttttaatgaccaggttgaagatttattgaattcacattattgtgacgattctttgtattggactttaggacattcgcttgagaattatttcttcaatgtcgcagtaataatggatgcttttcagtttctttcgccctctgaatataagtataaagctatcgaattattctcgaagctaatatcctcatcttttgctgttctagctgcaatttctattgcagccaagaatattgataagtctggattgccggctgcgttgattgattggaaggatatagtaattaatgaaggatatatcaatctggttaggcgtgacgcttatgatattgacccggaatgtgtaaacagcttttttaatgcttttgatgcagtattacccagcgtcatagcttcagaggttggggtttgctccagagtagttagggggcatacaggcatcttacttttacaaaaactattcgcagcatgcttgtattatgttggtaaggaagatgatcctatactggctgatgcaagcgcaaattacttttgtaatatatcagaattatcacttacaactgcattagctgagagttgggtaagaaaaattggagtacttgaggatgtatattttcctgactcacttttgaaggatattgagtga

SEQ ID NO: 245731 - DNA, 1197 bp, Klebsiella pneumoniae
atgaatttgaattatattccagagtctgctgataattgtatctggggtaatattcatcctagctccggtaaaaaacttgggttaatgcaaaatattggtggtggaattttttttattggcgatataattaatccgtggattggcgttacaagccggcatgacttttattcgcctaacatatcttggcagaaggatgctgtttctacaaacatgccacgaatagttgagagtggtagttgtataggaatgtttttttgtaaggtgtttactgttgttgttaacaatgtaaatgaagaactgaacctaacagaaattactgtttctgctaaagatttaccctatatttatgttggtgttccattgtgtatttcatcaacatcaacatcaacatcaacatcaacatgtgaagtgtcaattttatcacgcattatcgaggacggaatattaacaaatcggtacattttgactggtattgtaggggaaatcggtacattattagttgtcaatcaaagaatgctggcggctcgaaaatatgtaggaggttatgcattcggtagtattgagatcaatgaaggacaaatagatatagtgaaatcaaaagatagaggctcaaagcaggggctaaacttctatatgactgacaatcggctgacaccgtcagcttctatgacggccaccgaggatagtattctgtttagtgctggcagtttttggttcaacaataatatttgttttagcccagataagcattgtgacctcgcctcagcagattctccgatagagaatatatttgtaaggaatgcaatttcaactgttgctgataaaaataatatacctattattcgaaatgtccccgacaatatcctcgatatttgggggacaatatccgctaaagcttataaatatgattgggctattcgtcaaaaaggagatgatatggcccggtggcatgtgggatggattgcgcaagatatagttgatgcatttgcaaaagctggggaaaatgctagtgaatgggcgctggttgtctataatgaatcaagttcaattaatactcctttattaacttctcctgagtacacactccagaataaattgaaagaaacatcagaatggcgagtaatattagatgaatgtaatgctatggagttgttatatcaacgtcgtcaattgaaaagactttctgaattgctttga

SEQ ID NO: 245732 - DNA, 1050 bp, Klebsiella pneumoniae
atggcaataaataaacttagttatcagtgtctagaaacagtttttggtgatattcctgcatttactttctctatgaaggtaaaagaattgatccccatgtattacgttgctgttcgagggcgagataatgaggaaggagccgttcagcgtgtacttaatagtagaagaataacaagtattaaaaaatatgttcttgatggtaatatattctttagttcatttattttgaactggacgaatgcagataaaaatattgaagttaaagatggtatcatttcttttgattttattcctgcatctattcaggttattgatggtcagcatcgattagctggtttagaagaagctatggaggaagatcctaaagttggagaaatggacatattagttactttatgtgaatcattaacaacgccacaagcagcaaaaattttcttaaatatcaatacagaacaaaaaccagtacctaagagcttaatttacgatctttttggtgaactcgaagacgatgaaacgcatgcgataaatcgtataactgacattgctcgtgagctaaatgatttagagacatctccgttttataagctaataaagtttccggggtcacctcgtggtgttggtaatatcgagttatctactattgttcaatccttaaaagagcatgttaagccagcgggaacatttgcgaaatataatattaggacatatgataatcaacgcaatttgatcataaacttcttcaatggcatcaaatactattacgacaaagaaaatatttggaatagcaaagctaagaatccatttgtaaaagccgctggctttgcgggtgctgtggatttcttgactgaaaaactactttcacaatgcgttgaaaggaaatcatttactgttgatacaataaagtcaattatttcgctagagaaatcgacacttattacctgggatgaattaaagaatcatgatggtaaaacagcaaggaaaagagtgaaggaattgctggaagaaaacgtactgtcatcactaccgtctcaggatgaatatgaattttaa

SEQ ID NO: 245733 - DNA, 843 bp, Klebsiella pneumoniae
atgaattttaaaagatacctctgtcaggagtttattgaggctgaagtgggatgctcggatcccactcagttaggtcaatataaagatagaattgattcgattcagttaagtgctagtaaattgtcagacttgaaaaatgctattaggactgactcgacagatgttttttacaaagcatctgtaagttttttggagtcactatacagccttagaagggggcattcatcatgggccataattaaattatattattccattttttattcgttaagagctttcttgcttcttgagggatatgctattttcaaaaatggaaaaggggatatattttttttagagtgcgtggaaaatgctgtaccaatacgtatttccactaataaaataaaaggagatcacaaaactactattaaggcctttgctgagttatgtaaatctcataagctcaatactaatacaattgattcaattagtgtttttgagtgggctatccagtgtagagaacttgttaattatagaagttcgtccttcattgagcctgattatggctatgaagcagtgccagaagatttgagagatttgaatcgcttggaaggacttttagaaagttatattaacgacccatattatacatattgttttcttgaagagcatagcttattagcaactgcatcagtattaatgaatgaactggttgatatgtttagaaatgatgaggttgcatttttaactgatgagcggcatgtttttttaaaagctattattaaaaagtcagggctcatgaatatgtccgtattgcgagggttgtttcttaatgatgctgacattttgattatggaagaatag

SEQ ID NO: 245734 - DNA, 816 bp, Klebsiella pneumoniae
atgaacacaatcatcattaaagacccgctacgccaggcaattgaagcggcttctggcggacggcaaaccgtattatatacccctaaaggtcaggcttctttcgtgactattttcaataaagttgaccttaaaaccctgaacccggacctgtcaggaacacacccggcatttattattaacgggaaggaggtatcccagctttttatcgggacatatcagggaaccattattgatggagagctggtgtctcagccctggtcgataccgacaaccgggttaacgtatgcggcaatgcgtaaagcggttggtgcggcggggaaaaactggcacctcatgacgctaccagaatgggggcttttggctgcatacgataatctgggcattcagacgttgggtaataataatcagggaggatcaatcagtgattcatctctgaagggggcagttatacccggtcagtcgaatctgatttatagcggttcgggaccagtacagttcaggctaaatcgtgaatacaataacgtgtccgatttggtcggcaacaggtttcagatctgcgacggcgtgcgttttgttgacggagaaattcaggttgttgctaacaacgacgccgcgcaaactggttatgacctttccctgacctccctgaactggaaggcgataaacggacagaccggggcgctggtagcacccaccggcacagggacaattaatacagactatgtggccactacagctgactcagtaaaaatttcggccgccggggaaacactcgattatggtattatagcctacaggaaaaaatcccgacgctga

SEQ ID NO: 245735 - DNA, 267 bp, Klebsiella pneumoniae
atgagcttacgtattaacgcggcgaaactgattatcgagatgagagagacgtttgataacctctactatattgaaatagctgatgataaaacgttctcagtacagtctgccgatggacgcgctttaactaaagatgatatggacgctgaagttgcggggttcagccaggcgatccagttatccggatcaacagatgacctgatgtcaaggctgcatggactgacggatcacattgtctggtaccaggtttcgggcgcgatcagttga

SEQ ID NO: 245736 - DNA, 174 bp, Klebsiella pneumoniae; identical to SEQ ID NO: 209196

SEQ ID NO: 245737 - DNA, 363 bp, Klebsiella pneumoniae
atgcagacccggctgcatctgatcgccggtgaaacgggaaccttcaacggaatctcgtccagttacagcggcaggggcttttccggcatgaaatttaaagcgactgccgtaccggataataccgcgtttgaacagtggatcgctgatgtgaagaaatcaccggatatgctgctcggtccggctgattttgaaaaactggctgagcctgacgaaaaccacccggttgaattcttctctgtcatcgatccgacgttgttcagatacgtgactgaaaaatttaaagcacacgatcacgataaggagacgggaatgactgggtcagagccggaacaacacctctcacacagagcgcggggaaattaa

SEQ ID NO: 245738 - DNA, 1332 bp, Klebsiella pneumoniae
atgaggtttatttcaagggaatattatatagtaatatcaaaagatgacatagccgcttggattttgctacattggttgcttggtggatgctgcgttgcatggttttctattagattaagacattatttttacagaaaaaccttttggtttgaattgaaagaaatattgcggacattaattatttttgcaactattgagattgctgttgtagcatttacatcttggtcatttccccgcatacaatggcttattacttggcttattgtactctttctggtccctatagcacggatgtgtacaaaatggattttagattattttgggatgtggagcagagatacatggattattggaagcgggcaaaatgctgttgaagcatataaggccataagtagtgaaaaaaacttgggtttggcaattgtgggttttctgcggtgtggtacagagaacaaggttgacaatatattcacaaatatacctgtagtaaatgataaccaagagtggttattgacaaaggatagaagaacgcaatttatcgttgcagtcgaatcaacacaaagtgatgttcgaaatgcgtggttgaggaacttgatgattaaaggatatcgatatgtttctgttattccaacattgagagggatgcctttggatagcacagatatgtcattcattttcagtcatgaggtcatgatattcagagtgcaacataatttagcaaaactctcatccagaataattaaaagaacgttcgatataatcggctctttagggattataattattttatcaccgttactcatatacattagtaataaagttaaaaaagacggtgggccatctatttatggtcatgaacgaataggtaaaggaggtaagcctttcaaatgtttgaagtttcgttctatgattgttaactcgaatgaggtactttcaagagtcttggaaactgaccccgaagcaaaaaaagaatgggatttaacgtttaagttaaaaaaagatccaagaataacaaagattggcgctatattgagacgcacaagtctagatgagttaccgcagctattcaatgtattgcgtggggaaatgagtttggttggtcctcgtccaataattagagcagaattagaacgatacaatgatgaagtagattattatctgctgagtaagccaggaatgactggtttatggcaggtaagtggtcgaagtgatgtcgattacgagacacgagtatatcttgatgcttggtatgtaaaaaattggtcaatgtggaatgatattgcaattttatttaagaccataggggttgtcttgaaaaaagatggggcatattaa

SEQ ID NO: 245739 - DNA, 831 bp, Klebsiella pneumoniae
atgttacgtcggggaattgaaacaccagagcagttggaagaaatcggcattaatgtgtatgcaagtgtgcccgttgctgaaagtttggtgagcaatgaacgatcaataaaaaatataaggaaaaaaattactcataaggaatatacggggttattagccacaacgaatcctgctgatttagctatagaagcaattcgtgggcttcgaactagtttgcattttgcaatgattgaagctcgaaataatatcttgatgatatcaggtgcaagcccaaatgcgggtaaaacattcattagttcgaacttagcagctgttgtagctcaaacgggaaagaaagtattgtttattgataccgatatgcgaaaaggatatgtgcataaggtgtttgatgttgaaaatgataatggtctatctaactatttgtcaggaaaacttggtttagaagctaccctaaaaaaaattccagaagcgggctttgactttatttcgcgtggtgttgttcctccaaatcctaccgaattattaatgcatcgtagaatggaagaaatgctgaagtgggccagccaaaattatgatttagttatattagatactccaccaatacttgccgttaccgatgcggcaattatagggcattatgcaggaactacactgctagttgcacgttttgagctaaatacagttaaagaaatggatgtggcgttcaaacgatttgaacaaagtggcatagtcgcaaaaggatgtatacttaacggtatagtgaaaaaggcaagtagttattatggatatggctacaatcattatggttattcatataaagataatacataa

SEQ ID NO: 245740 - DNA, 1032 bp, Klebsiella pneumoniae
atggatacttatcataagatttttcttgataatatagagcgaatctataaaaacaaaccagaatcatgtgacacagttgaaatcgaaaaagtggttgacaatataattccggagatggtgtccatcctgaaagaatcgctcgctaactcaactcgcgaaatgcttgcggagcatcgttcactttcagaagggtttgtatccagaaatatttcaagatggggggacgcctttgatttatttgaaacactcatagtgatctgtacagagtctggtgaggaatttaataaatcttacagggcgcaagctgtagccgagaatgatttggtttttgatttagttgttcgacatcatgccagagcttgccatatcgctaatgaaatattatgtcttttaaaaaatggattcgcagatgctgctcatgcgagatggcgtgcacttcatgaagtagcggctacagctatgtttatcgctaagcatggaaaggaatgtgcagagcgcttttattaccacgaaatagttgactcatacaatggaatgcttgagcacaaaaaatacgaacaccggttacaagcaaaaggaccgagttttgaagaagttgctgaatgtaaggagcaatttgatctattaatcaaaaaatatggtaaaagatatgcagataattatggttgggcttcttatatttttccaaaccatacaaaagtaggatttggagcaattgagaaggacgttaatttagaacatatgcgtccttattataaatgggcgagccagaatatacatactggttctaaggcgatgagaaatagactaggtctctgtgaaactaatgaagatatattgctggttggtcaaagtaattcaggtatgactgatccagcacacgctactgctattagcttggtgcaggttaccgtgtcgcttttatttttaaaaccaaatattgataacctagtaatttctaaaataatacaagattattctgtagaggttggagaaactttccttaaaatcgatcaaaataacaagaaataa

SEQ ID NO: 245741 - DNA, 411 bp, Klebsiella pneumoniae
atgctagataaagatttcagtagcaaaagcataaatcgtgccctcgatatcctcctgttgggatacccacttaggactgcatttggtctaatgataggcactttattaggtgtcattctgcatatttttacacctttcttgcaagtcaaaggctttgttgttgacggtatttatatccttggttgttatattgttggaattctagtcatgcacatcaagacaatcattgaagtgtataacggagatgcgattagtgagagatttggcaacactttaagaattattgataagcgtatggatttaacggatgaacaaaaacgctactatcgaaataaactgctcagtcagcacatatccagccttagtgataaacagatgcaagaagttgaacaaagagtaatcgaaaagtaa

SEQ ID NO: 245742 - DNA, 645 bp, Klebsiella pneumoniae
atgatcaaatttctttcaaaatatttaggctggctaattggtttagtattagccatattggctgcccttacgtttgggaaaattattagctggcttgggatatcgaatgattggattatctctcttgtcggcacaacgataggtatgatatccagttttctgtatcggaatacaattaagtacattaaatccgaagagtacagacaagtggtaaatgaatacaaggagaaacgtaatcatcttgttaagaaagagagagaggagctaaagagaaagacaattgttgaactctatcttttgaatgagaagaaaacctttctcaaggtaaagctcctctcgataattatgatattcttaggtgtaacattgacttacttttttgagtatagctacatcgtcactgtcaccggaactatatccttcgctttactggagttgaaagagcgggtcttagcgtatcgaatagcaaaaggtttttacggcaataatagtactgaggctattcagttgctcaaatttatcgaggccaatatcgataaaattgatgatggaagtggtggtggtaaacgtaaaatcttaaatgatcccgttttagaagaaacccaaaatgaaagtttgggaaagggggcattggatgctagataa

SEQ ID NO: 245743 - DNA, 882 bp, Klebsiella pneumoniae
atgaccgcagaattccactgggatgatgctcgcatattcctcgccatcgcccgggtgggaacgctgagcggcgccgccgacaagatgaacatggggattgccacggtctcccgccggctggatcggctggagcaggcgttgaacgttccgctcttcagccgccatcagagcggctaccgcctgaccgacgatggcgaagccctgctcgcgcgggcggaggcgctggaatacgctggcctggcgttcggcgaagcggcgcaactgcaggggcatgtcgccggggttgttcgcctggccacctcggataacctggccacgcattttattctgccctccctgaaagggctcctggaccattatcccgagctgcgggtggaggtgctgagcggcgtgcagtcggtgaacctgcaccgtcgggatgccgatctggcgatccgcatggtcaagcctgaggccgggcatctgacgttaaagcggctggggacggtggggtttggcgtctatggcgccgccgactgtctggtcggcgcggacggcctgtcgctgagcgaggcggactttgtggggtggccggaaactcaccagcacctgccggccgcccaatggatcacgcgcaccctgcgcggccggccgtgtaaagtcgaagccaatacgctcgtggcccaggtttccgcagtatccgcgggcctcggattgggcgtcctgccgcactttatggcgcgggccagcggcctgcagtgcctgcagccggagatcggcgcggatcagaccctctggctggtgatgcattctgacctggccggatccagacgcgtgcgggttctcgccgaccatctcatcgctctctttgcggaccatcaagatcggctggcgatgccctga

SEQ ID NO: 245744 - DNA, 147 bp, Klebsiella pneumoniae
atggatggcgacaatcaaaaaggcaccattattgtgtctactgaggaaatattcgatggaaacaataaagaacacataggtaaagctaacgacattgaaattaagcttctggatcttggcttattgccacttatgaccgagctttaa

SEQ ID NO: 245745 - DNA, 678 bp, Klebsiella pneumoniae; identical to SEQ ID NO: 221299

SEQ ID NO: 245746 - DNA, 282 bp, Klebsiella pneumoniae; identical to SEQ ID NO: 221300

SEQ ID NO: 245747 - DNA, 738 bp, Klebsiella pneumoniae
atgaatcaggtgaaatcgctgaagcagctttcgtatggggggctggcggccgctgttctgctgatcatcgtcccgcaggaggcgttcgccatgcatatcatggagggctttttgccgccgatgtgggcgctggcgtggtggctgttgtttttaccctgcctgtggtacggcctggtgcgcctgcggcgtatcgtccgggaagagagcaatcagaaggtgctgctggccctctgcggggcgtttatttttgttctttcggcgctgaagatcccgtcggtgaccggcagctgctcgcatccgaccggcgtcggtctggcggtgatcctcttcgggccgggcgtggtggcggtgctgggggcgatcgttctgctgttccaggcgctgctgctggcgcatggcggcctgaccacccttggcgccaacgggatgtcgatggcggtgatcggcccgatggtcggctatctggtgtggaagctggcctgtcgggcggggatccgtcgcgatgtcggggtctttctctgcgccatgctggcggatctgatgacctactttgtcacctccgtccagctcggggtggcctttcccgatccggccaccggggcaggtggatcgatcgccaagtttatgggcatcttctgcctgacgcagatcccgatcgccatcgcggaaggcttgctcaccgtgatgatctacgatcagctaaccaaacggcggctgatcgccgcggagggacattaa

SEQ ID NO: 245748 - DNA, 711 bp, Klebsiella pneumoniae; identical to SEQ ID NO: 221302

SEQ ID NO: 245749 - DNA, 795 bp, Klebsiella pneumoniae; identical to SEQ ID NO: 221303

SEQ ID NO: 245750 - DNA, 786 bp, Klebsiella pneumoniae; identical to SEQ ID NO: 221304

SEQ ID NO: 245751 - DNA, 726 bp, Klebsiella pneumoniae; identical to SEQ ID NO: 221305

SEQ ID NO: 245752 - DNA, 1056 bp, Klebsiella pneumoniae; identical to SEQ ID NO: 221306

SEQ ID NO: 245753 - DNA, 774 bp, Klebsiella pneumoniae; identical to SEQ ID NO: 139156

SEQ ID NO: 245754 - DNA, 570 bp, Klebsiella pneumoniae; identical to SEQ ID NO: 139157

SEQ ID NO: 245755 - DNA, 606 bp, Klebsiella pneumoniae; identical to SEQ ID NO: 221309

SEQ ID NO: 245756 - DNA, 1140 bp, Klebsiella pneumoniae
atgagcgatcagacctttgacgccccggtgtggcatcacggcaaagcgctgcgcaagggctacaccaccggctcctgcgccacagcggcggcaaaagtggcggcgctgatggtgatgcgccagcatctgattcatcaggtctcgatcgtcaccccctccggcgtcaccctgtgcctgaacgttgagtccccgcacgtcgaagggcagcaggcggtcgccgcgatccgtaaagacggcggcgatgatgtcgacgccacccacggcatgctgatttttgcccgggtgatcctcaatgacagcggagagattagcctgcagggcggggagggcatcggcacggtgacccgcaaagggatcggcctgccgacaggcagcccggcgataaaccgcactccgcggcacaccatcgagaccgccgtgcgcgaagcgataggtcctacccgcggcgcgcaggtggagatttttgccccggaaggcgcgcttcgcgcgcaaaaaacctataacgcccggctggggatcctcggcggcatctcgattatcggcaccacggggatcgttaccccgatgtcggaagagagctggaagcgctcgctctccctcgagctggagataaaacgcgccgccgggctggagcgcgtggtgctggtgccgggcaaccacggtgagcgctttgtccgcgagcagatgggcatcgacccgcagatggtggtcaccatgagcaacttcgtcggctacatgattgaagaggcggttcggctcggtttccgccagattgtgctcattggccatcccggcaaactgatcaaaatcgccgccgggatctttcatacccacagccatatcgccgatgcgcggatggaaactctcgtcgctcatctggcgctgcttggcgcgccgctgccgctgctgacgctggtcagcgagtgcgacactaccgaagcggcaatggagcatatcgacgcctggggataccagcgcctctataaccatctggctgagcgaatctgccagcgtgttcttgagatgctgcgcttcactcagcaaccgcccacctgcgacgcggttctgttttcttttgataaccaggtactgggcagcagccgtccgctggaggcgattgcccgggagctgacatgttga

SEQ ID NO: 245757 - DNA, 636 bp, Klebsiella pneumoniae; identical to SEQ ID NO: 221311

SEQ ID NO: 245758 - DNA, 960 bp, Klebsiella pneumoniae; identical to SEQ ID NO: 221312

SEQ ID NO: 245759 - DNA, 1377 bp, Klebsiella pneumoniae
atggcaaccaggcgtgcgttcattcttgcgggtaccggcagcggttgtggcaaaaccaccgttacgctcggcctgctcagcttgctccaacagcgcggtatgcgggtgcaaccctgtaaagtcgggcctgactaccttgacaccgcctggcacaccgccatcagcggcatcgcttcccgcaatctcgacagctttatgcttcccgccccgatactcaacgcgctgtttaccgaacagctacagcaggccgacatcgcggttatcgaaggggtgatgggcctgtatgacggctacggcatcgaccctaactactgcagcagcgcggcaatggctaagcagcttggctgcccggtgattttgctggtggatggcaaagcggtgtcgacctccatcgccgccacggtgatgggttttcaacattttgatccggctctcgacatcgctggcgttatcgtcaatcgggtcaacagcgacgcgcacttccagctgctgaaaagcgccattgagcgctactgtcgggtgccagtgctcggctatgtgccgcgcgtggaaggcgtggcgctgcccgaacgacatctgggactggtgaccgcccgcgagtcggtggtcaatcagcaggcatggcgggattttgccagcctgctggggcgcaccctcgatatagaccggctgctggccctcagcgaactggccgccatgccgatcggcgagtggggagaacagcttgccgccgatgccggcgaaggactgacgctggccctcgccgacgatgaggccttcaatttttattaccccgataacctggcgctgctggcgcgctgcggcgtgaagatggtgcgctttagcccactgcgcgatcgccagctgccggcctgccagatgatctggctcggcggcggctatccggagctgcatgcggccgggctatccgctaaccacgagatgctgacacagcttcgcgcggcgcaccggcgcggggtggcgatctacgccgagtgcggcggcctgatgtatctgggcacgaccctggaagtcaccagcggcgagcgctacacgatggcggatattattcccggacacagccgaatggggacgcgtctgacccggttcggctactgcgaagcgcaggcgcggcagcagacgctgctggcagcccctggcgagtggctgcgcggccatgaatttcattactccgatttttctcccgccacccccgccgtactggcctgccgtaaacagcgagacggtaagacgctccagcagtggcagggaggatggcagtccggcagcgcctttgccagctatctccatgtccattttgcccagcgtcccaccatgctcaaccactggctgcgggcagcaaggagggcgctatga

SEQ ID NO: 245760 - DNA, 912 bp, Klebsiella pneumoniae
atgatttctgcgagtaccctaaactcagaactcatcaataaaatcgcacaggattttgcgcaagccaccagtctggcggttgtggtcgtcaatattcacggtgatgagatttctgaattgtttaatttcacgccgttttgccagctgatgcgtcagcacccggagcacagcggacgctgtcgcatgagcgaccgctgcggcgggctggaagcctcgaaaaaagaccagctgtgtatctaccgctgtcatgcggggttaaccgatttttccatcccgctggtgatcgccggccacctggtcggcttcgtgctgtgcgggcaggtgcgtctgagcaatgatgttgaactggttgatatcttgaacgtcgatgaccgctggcaggacgatccggcgctggtccaggcgtttcgcgatgtgccggagatggactattcgcgggttatcgcttcggcggatctgctgaagctgatcgtcgagaattgcctgaaaaaacagctcaactttgtggttatcaaagataacccgtcgcagaacgacccggcgcaggccagccgggcgccctcgccgcacgatggcaaaatgaagaaggcgctgcgctatatcgacgcgcatctctccgatgagctgcgtctggaggatgtggcggcgcatgtctatctcagcccgtactacttcagcaaactgtttaaaaagtatcaggggatcggttttaacgcctgggtcaatcagcagcggatggcgagcgcaaaagagctgctatgccacagcgactggagcatcgccagcatcgcgcggaatttaggtttttcgcaaaccagctatttttgcaaagtgtttcgccagacctatcaggtaacgccgcaggcatttcgtcagcaaattaatgccggatcacaaactgagtctttttaa

SEQ ID NO: 245761 - DNA, 810 bp, Klebsiella pneumoniae; identical to SEQ ID NO: 221315

SEQ ID NO: 245762 - DNA, 285 bp, Klebsiella pneumoniae; identical to SEQ ID NO: 213592

SEQ ID NO: 245763 - DNA, 813 bp, Klebsiella pneumoniae; identical to SEQ ID NO: 221317

SEQ ID NO: 245764 - DNA, 1665 bp, Klebsiella pneumoniae; identical to SEQ ID NO: 221318

SEQ ID NO: 245765 - DNA, 690 bp, Klebsiella pneumoniae; identical to SEQ ID NO: 221319

SEQ ID NO: 245766 - DNA, 525 bp, Klebsiella pneumoniae; identical to SEQ ID NO: 221320

SEQ ID NO: 245767 - DNA, 1833 bp, Klebsiella pneumoniae; identical to SEQ ID NO: 221321

SEQ ID NO: 245768 - DNA, 351 bp, Klebsiella pneumoniae; identical to SEQ ID NO: 135527

SEQ ID NO: 245769 - DNA, 276 bp, Klebsiella pneumoniae; identical to SEQ ID NO: 213585

SEQ ID NO: 245770 - DNA, 447 bp, Klebsiella pneumoniae; identical to SEQ ID NO: 221324

SEQ ID NO: 245771 - DNA, 633 bp, Klebsiella pneumoniae; identical to SEQ ID NO: 221325

SEQ ID NO: 245772 - DNA, 492 bp, Klebsiella pneumoniae; identical to SEQ ID NO: 221326

SEQ ID NO: 245773 - DNA, 276 bp, Klebsiella pneumoniae; identical to SEQ ID NO: 135532

SEQ ID NO: 245774 - DNA, 1017 bp, Klebsiella pneumoniae
gtggctatctatacccgaaccggcgatgccggcagtacatcactctttaccggccagcgggtcagcaagacgcatccgcgcgtcgaagcctacggcaccctggatgaactgaacgctatgctgagcctgtgcgtctgcgccgtcgctgaagaggaacagcgcaccctgctcgaagccctgcagcagcacattttttggttcagcgcggagctcgccagcgacagcgaacagccatcaccgggtaagcgctatatcagcagcgaagagattgccctgctggagcagaccatcgatcgcgagatggcccgcgtgccggcgctgcaccagtttgtattgcccggacgctgtgaagccgccagccgtctgcacctggcccgcaccgttgccagacgggcggagcgccggctggtcgagctggcggcagaggttactatccgtcagatactgctgcgttatctgaaccgcttatctgactgcctgtatgccctggcgcgcagcgaggatcatgccgctcaccagcgccgccttgtgacggagatcgcggcccgctatctggccgccagcgggtcgcctgcgcccgacgcgcccaaagcccaggccgggtcgctctcctttcacgagctgcatcagctcatccgtcaggccattgaacacgcccgccagctgcaggtgccggtggtggtcagcatcgttgacgcacacggcaccgaaaccgtgacctggcgaatgcccgatgcgctgctggtcagcagcgagctggcgccgaaaaaagcctggaccgccgtcgccatgaaaaccgccacccacgagctcgcgacgaccgtacagccaggcgctgcgctgtacggtctggagagccatctgcagggcaaagtcgtcacctttggcggcggatatccgctgtggcgcgatggccagctaatagccggcatcggcattagcggcggcagcgtcgagcaggatatggctattgcacaggctgccatggcggccattaacgtgagaactcatcaatga

SEQ ID NO: 245775 - DNA, 1389 bp, Klebsiella pneumoniae; identical to SEQ ID NO: 221329

SEQ ID NO: 245776 - DNA, 1113 bp, Klebsiella pneumoniae; identical to SEQ ID NO: 221330

SEQ ID NO: 245777 - DNA, 1353 bp, Klebsiella pneumoniae; identical to SEQ ID NO: 221331

SEQ ID NO: 245778 - DNA, 555 bp, Klebsiella pneumoniae; identical to SEQ ID NO: 213576

SEQ ID NO: 245779 - DNA, 351 bp, Klebsiella pneumoniae; identical to SEQ ID NO: 221332

SEQ ID NO: 245780 - DNA, 441 bp, Klebsiella pneumoniae; identical to SEQ ID NO: 221333

SEQ ID NO: 245781 - DNA, 1215 bp, Klebsiella pneumoniae
atgacctataaaatcatggcgattaacgccggcagctcctccctgaagtttcagctgcttaacatgccgcagggggcgttgctctgtcaggggttgatcgaacgtatcggcctgcccgaggcccgcttcacgctgaaaacgtcggcacagaaatggcaggagacgctgcccatcgccgatcaccatgaggcagtgaccctcctgctggaggcgctgaccggccgcgggatcctgagcagcctgcaggagatcgacggcgttggccaccgcgtcgcccacggcggcgaacgcttcaaagacgccgcgctggtctgcgacgataccctgcgggagatcgagcgcctggcggagctggcgccgttgcataacccggtcaatgcgctgggcatacgtctctttcgccagctgttacccgcggtaccggcggtggcggtttttgataccgcctttcaccagaccctggcgccggaggcctggctctatcccctcccctggcgctattacgccgagctgggcattcgccgctacggttttcacggtaccagccatcactatgtcagcagcgcgctggcggaaaagctgggcgtaccgctgagcgccctgcgggtagtaagctgccatctgggcaatggctgtagcgtctgcgccatcaaaggcgggcagtcggtgaatacctcaatgggctttaccccgcagtccggggtgatgatgggcacccgcagtggcgatatcgacccgtcgattcttccctggctggtggagaaagaagggaaatccgcccagcagctcaaccagctgctgaataatgaatccgggctgctgggcgtctccggcgtgtcatctgattaccgcgacgtcgaacaggcagctgacgccggcaacgaacgggcggctctggcgctgtcgctgtttgccgaacgcattcgcgcgactatcggcagctatatcatgcagatgggaggtctggacgcgctgatctttaccggcggcataggcgagaattccgcccgtgcgcgggcggcgatctgccgcaatttgcattttctcggcctcgcgctggacgacgagaaaaaccagcggagcgcgacctttattcaggcggataatgcgctggtcaaagtggcggtgatcaataccaatgaagagctaatgattgcccgcgacgtcatgcgtcttgcattgccgcaggcgcgcgagctggcggtgtcggcataa

SEQ ID NO: 245782 - DNA, 903 bp, Klebsiella pneumoniae; identical to SEQ ID NO: 221335

SEQ ID NO: 245783 - DNA, 1077 bp, Klebsiella pneumoniae; identical to SEQ ID NO: 221336

SEQ ID NO: 245784 - DNA, 1254 bp, Klebsiella pneumoniae; identical to SEQ ID NO: 221337

SEQ ID NO: 245785 - DNA, 1332 bp, Klebsiella pneumoniae; identical to SEQ ID NO: 221338

SEQ ID NO: 245786 - DNA, 321 bp, Klebsiella pneumoniae; identical to SEQ ID NO: 221339

SEQ ID NO: 245787 - DNA, 1845 bp, Klebsiella pneumoniae
atgactttcgaacaactactgctggcggcggtggagcagcgtctgctgcggccgctggacgtccagtttgccctgatggtggcgcaaaacgacccgccggcggtcaagctggcggcggccttgctgagccgggatgccggcgaggggcacgtctgtctgccgctctcgcggttgagcggcgacgaggcgctgagcggtaaagcgggggagatccgcgatcggctgctggccgaagccggcgcgccggaggactggcccgcgctgctgctcgcgtcgtcggcggtaagctgcggcgatgccccggcgccgatgattttgtgcggcgaccggctctacctgaaccggatgtggcgcaacgagctgaccgtcgcccgcttcttcaatgacgccaaccgggtgctggagatggatgaggcgcggctggcggccaccctgaatgcgctgtttcccgccaccggcgaaaccgactggcaaaaagtggccgcggcggtggcgctgacccgccgcatctcggtgatctccggcggtcccgggaccgggaagaccaccaccgtggcgaagcttctggcggcgctgatccagattgacgacagtccacgctgtcgtattcgcctggcggcaccgacggggaaagcggcggcgcgtctgaccgaatcgctgggcgcggcgctgagaaaattgccgctgaccgacgcgcagaaagcgttgattcccaccgaggccagcacgctgcatcgtctgctgggcgcccagccaggcagccagcggatgcgctatcacgccggcaacccgctgcatctggacgtgctggtggtggatgaagcctcgatgatcgacctgccgatgatgtcgcggcttatcgacgcgctgccggcccacgggcgggtgattttcctcggcgatcgcgaccagctggcctccgtagaagcgggggcggtgctgggggatatctgcgcctgggcgagttcgggctataccgccgcgcgggcgcaggagctgacccggctgaccggttcgccggtgccggcgggcgagggggctatcgcgggcgtgctgagagacagtttgtgcctgctgcaaaagagctatcgcttcggtagtcactccggcatcgggagcctggcgcgggcggtgaacgctggcgcgcgcgcggaggtgaaggccacgctgcgccagccgtttgacgatatcgcgcttcatcccctcagcacgaccgaagagtacgaagccatgctcggcgcggctcagcagggctatgagcgctacctgcagctgcgccgcgagcgggccgaaccgcaggccatgctggccgctttcagcgaattccagctgctgtgcgcgctgcgcgaggggccgtacggcgtgagcggcgtcaatgagcggctggagcagcggctcaaccgccagcgggcgatcgccctgccgcgccactctcgctggtatgatggccgaccgatcatgatatcgcgcaacgacagcgcgctggggctgtttaacggcgatatcggcatcgccctggagcgcaacggcgagctgcgggtgtggttcctgatgcccgacggcgccatcaagtcggtgcagccgagccgtctgccggagcatgacaccgcctgggcgatgaccgtgcataaatcgcagggctcggagttcgaacacgcggcgctgatcctgccggcgcgcagcgtcccgctggtgacccgcgaactggtctacacggcgatcacccgcgcgaaacggcggttgtcgctctatgccgacgagcaggtgctctcccaggccattgtgacgcgcaccgaacggcgcagcggcctggcggagattttcgccgggcgcgaagccccctga

SEQ ID NO: 245788 - DNA, 3537 bp, Klebsiella pneumoniae
atgaccgacaccgctgagtctttggatcccctgcgcttgcccctgatcggcgagcgcctgatagaagcctctgcgggcaccggaaaaacctttaccatcgccgcgctgtatctgcggctgctgttggggctgggcggtgaggccgcctatccccgcgccatcagcgttgaagaactgctggtggtgacctttaccgaggcggcgaccgaagagctgcgcggccgtatccgcagcaacatccacgaactgcgcatcgcctgcctgcgcggcgaatccgacaatccgctctacagcgcgttgttggcggagatcgccgataaagatgacgctgcgaagacgctgctgctggctgaacggcagatggacgaggcggcggtattcaccatccacggcttttgccaacggatgctgagccttaacgccttcgagtcgggcatgctgttcgagcaacagctgatcgaggatgaatcccgcctgcgctatcaggcctgcgccgatttctggcgccgccactgctatcccctgacccgcgatatcgcggcggtgatccacgacgtctggaaagggccgcgcgatctgctgaagtcccttgaccgctggctgcagggcgaagcgccgcagcttaagtcgccgccagcccctaacgagacgctggccgaacgccatcagcagatcatcgcccgcattgactcgctcaagcagcagtggcgcgagcaggtgggcgagatcgaaggcgtgctggaaaattccggccttgaccggcggaagtttaatcgcggcaaccagggcaagtggatggagaaagtgaacgcctgggcgcaggaagagacgttaagctaccagctgcccgacgcgctggagaaatttgcccagtcgtttctgctcgagcgcaccaaagccggtggcgaaccgccggtgcatcccctgtttagcgccgtagagtcgttgctggcctcctcgctgacgctcaccgatctggtgctggcgagagcgatggtcgagatccgcgatgcggtcgcccgcgaaaagcgccgccgcggcgagctggggtttgacgatatgctcagccggcttgacgaggcgctgcgcggcgacagcggcgagacgctggccagcgccattcgccagcgttttccggtggcgatgatcgatgaatttcaggacaccgaccctcaacagtaccggatttttcgccgcatctggcgccggcagccggagacggctctgctgctgatcggcgatccgaagcaggccatctacgcctttcgcggcgccgatatctttacctatatgaaagcgcgcggcgacgttgccgcgcactacaccctcgataccaactggcgctcctcgccgggcatggtgggcagcgtcaatcggctgttcagcctcagcgataaccccttcatgttccacgagatcccgttcctgccggtgaaggcggcggcgaagaacaaggggctgcgctttaccgttgacgcggcggacgtaccggcgatgaacgtctggctgatgcccggcgacaccgtcgggtctggcgattatcagacctttatggcgcagctctgcgccacgcagatccgcgactggctgagcgccggtcagcaggggcgcgcgctgctgtggcgcggggaaacctcgcgcccggtacaggcttcggatattaccgtgctggtgcgcaaccggctggaggcagcgcaggtacgtgaagcgctgcagacgctgggcattccctcagtctacctctccaaccgcgacagcgtttttgagacgctggaggcccaggagctgctctggctgctgcaggcggtgctggccccggagcgggaaaataccctgcgcagcgcgctggcgacgtcgatgtttggcctgaccgcgctggatattgaaaacctgaaccaggacgagcaggcgtgggacgcgctggtggaagagttcagcgaataccgccagatttggcggcagcgcggggtgatgccgatgctgcgggcgttgatgacagcccggcatatcgccgagaacctgctggcgacccgcggcggcgagcggcgtttaaccgacattctgcacatcagcgaactgctgcaggaggcggccagccagctggaaagcgagcatgccctggtgcgctggctggcgcagcatattgccgagccggacagcaacgccgccagccagcagatgcgtctcgaaagcgataagcacctggtgcaaattgtcaccattcacaagtcaaaagggctggaataccccctggtctggctgccgtttatcgcccggtttcgtaaacaggaccaggcgttttaccacgatcgcgaaacgttcgcggcggtgctggatctgggccaggatgaggccagcctcgagctggcggaggcggaacgactggcggaagatctgcgcctgctgtacgtggccctgacccgcgcggtctggcactgcagcctcggcgtggcgccgctcagcagccggaaatccggcaacagcgatttccacctcagcgcgctgggacggctgctgcaggcgggcgaagccatggacgccgccgggctggctgcgcggctggcggacttctgtcatggcgatattgcattacagagaccgggcgaactggatctcaccccgtggcaggcgcccgcggcgaccatcccgcgattgtcggcgcgcgagctgcagcgccgcatcgccgacgactggcgggtgaccagttactccggactgcagcagcatggtttcagcggcgggcaggatttgctgccgcgtctggatgttgatgccgccggcgtcggcgaagtcgtggaagagccgcagctgactccgcaccagttcccgcgcggcgccgcgccggggaccttcctgcacagcctgtttgaggagctggacttcacccagccggtgccggaagggtggatggcggagaagctgcagctgagcgggtttgacgcgcagtgggcgccggtgctgaccgactggctggggggcgtgctgaagacccgcctgccggggccggatatcgcgctcaatcagcttgcggcgcgggataaacaggtggagatggcattttacctgcccatcgcccagctgctgacggcggagcgccttgacgcgcttatccgccagtacgatcccctctctgccgacacgccgccgctggatttccgccaggtgcgcggcatgctgaagggctttatcgatctggtcttccgtcacgaaggccgttattacctgctggattacaaatccaactggctgggggaagatcgcgaggcctacacccggccggcgatggagcaggcgatgcgtgcccaccgctacgatctacagtatcagctgtatagcctggcgctgcaccgctatctgcgccaccggctggccgattatgactatgaccgccacttcggcggcgtgatttatcttttcctgcgcggcatggacgggcaggagggggggcaggggatcttcaccacccggccggtgcgaccgctgattgacggtctggatcagctttttgccggagaaactcaggaggaggcctcatga

SEQ ID NO: 245789 - DNA, 324 bp, Klebsiella pneumoniae; identical to SEQ ID NO: 135551

SEQ ID NO: 245790 - DNA, 408 bp, Klebsiella pneumoniae; identical to SEQ ID NO: 135552

SEQ ID NO: 245791 - DNA, 558 bp, Klebsiella pneumoniae; identical to SEQ ID NO: 221346

SEQ ID NO: 245792 - DNA, 552 bp, Klebsiella pneumoniae; identical to SEQ ID NO: 221347

SEQ ID NO: 245793 - DNA, 795 bp, Klebsiella pneumoniae; identical to SEQ ID NO: 221348

SEQ ID NO: 245794 - DNA, 876 bp, Klebsiella pneumoniae; identical to SEQ ID NO: 221349

SEQ ID NO: 245795 - DNA, 2247 bp, Klebsiella pneumoniae; identical to SEQ ID NO: 221350

SEQ ID NO: 245796 - DNA, 531 bp, Klebsiella pneumoniae; identical to SEQ ID NO: 221351

SEQ ID NO: 245797 - DNA, 696 bp, Klebsiella pneumoniae; identical to SEQ ID NO: 221352

SEQ ID NO: 245798 - DNA, 219 bp, Klebsiella pneumoniae; identical to SEQ ID NO: 134704

SEQ ID NO: 245799 - DNA, 1041 bp, Klebsiella pneumoniae; identical to SEQ ID NO: 221355

SEQ ID NO: 245800 - DNA, 1194 bp, Klebsiella pneumoniae; identical to SEQ ID NO: 221356

SEQ ID NO: 245801 - DNA, 2160 bp, Klebsiella pneumoniae; identical to SEQ ID NO: 221357

SEQ ID NO: 245802 - DNA, 1017 bp, Klebsiella pneumoniae; identical to SEQ ID NO: 221358

SEQ ID NO: 245803 - DNA, 480 bp, Klebsiella pneumoniae; identical to SEQ ID NO: 221359

SEQ ID NO: 245804 - DNA, 774 bp, Klebsiella pneumoniae; identical to SEQ ID NO: 221360

SEQ ID NO: 245805 - DNA, 1428 bp, Klebsiella pneumoniae; identical to SEQ ID NO: 221361

SEQ ID NO: 245806 - DNA, 1338 bp, Klebsiella pneumoniae; identical to SEQ ID NO: 221362

SEQ ID NO: 245807 - DNA, 1011 bp, Klebsiella pneumoniae; identical to SEQ ID NO: 221363

SEQ ID NO: 245808 - DNA, 1263 bp, Klebsiella pneumoniae
atgccacactcgctttacgccaccgatactgacctgaccgcagacaacctgctgcgcctgcccgcggaatttggctgtccggtctgggtctatgatgcgcagattattcgccgccagattgcccagctcagccagttcgacgtggtgcgttttgcgcaaaaagcctgctctaacattcatattctgcgtctgatgcgtgagcagggggtgaaggtggactcggtgtcgctgggggagatcgagcgggcgctggcggcaggctacgatccgcagcagaatccagaggatatcgtctttaccgccgatctgatcgacgacgccaccctcgatcgggtgaaggcgttacagatcccggtgaacgccggctcgatcgacatgctgagccagctgggcgaggtgtcgccgggccatcgcgtctggctgcgcgtcaacccgggatttggtcacggccacagccagaaaaccaataccggcggtgagaatagcaagcatggcatctggtacagccacctgccggcggcgctggaagtgatgcgtcgctatcagctgcagctggtcgggatccatatgcatatcggctctggcgttgactatggtcacctggagcaggtgtgcggcgcgatggtgcgccaggtcgtcgactttggccaggatctgcaggccatctccgccggcggcggtctgtcgattccttaccgcgaaggtgaagaggccatcgacaccgcccactattatggcctgtggaaccgcgcccgggagcagatcgcggcccatctggggcacccggtgaaactggagattgagccaggacgcttcctggtggccgagtccggcgtgctggtgtcgcaggtgcgcagcgtgaaagagatgggcagccgtcacttcgtgctgattgacgccggctttaacgacctgatgcgcccggcaatgtacggtagctatcaccatatcaccgctctggcggcggatggccgggatctcagcgccgcgccgcaggtcgaaaccgtggtggccgggccgctgtgcgaatccggggatgtctttacccagcaggaggggggcaaagtcgagacccgcctgctgccggcggtggcgcctggggattatctggtgctccatgacaccggcgcctacggggcttcgatgtcatccaactataacagccgtccgctgctgccggaggtgctgtttgatggcggcaaggcgcgactgatccgccgtcgccagaccatccaggagctgctggccttagagcttatttaa

SEQ ID NO: 245809 - DNA, 927 bp, Klebsiella pneumoniae; identical to SEQ ID NO: 221365

SEQ ID NO: 245810 - DNA, 714 bp, Klebsiella pneumoniae; identical to SEQ ID NO: 134716

SEQ ID NO: 245811 - DNA, 327 bp, Klebsiella pneumoniae; identical to SEQ ID NO: 221367

SEQ ID NO: 245812 - DNA, 891 bp, Klebsiella pneumoniae; identical to SEQ ID NO: 213539

SEQ ID NO: 245813 - DNA, 903 bp, Klebsiella pneumoniae; identical to SEQ ID NO: 213538

SEQ ID NO: 245814 - DNA, 1128 bp, Klebsiella pneumoniae; identical to SEQ ID NO: 221370

SEQ ID NO: 245815 - DNA, 1287 bp, Klebsiella pneumoniae; identical to SEQ ID NO: 221371

SEQ ID NO: 245816 - DNA, 1344 bp, Klebsiella pneumoniae; identical to SEQ ID NO: 221372

SEQ ID NO: 245817 - DNA, 1437 bp, Klebsiella pneumoniae; identical to SEQ ID NO: 221373

SEQ ID NO: 245818 - DNA, 1242 bp, Klebsiella pneumoniae; identical to SEQ ID NO: 221374

SEQ ID NO: 245819 - DNA, 174 bp, Klebsiella pneumoniae; identical to SEQ ID NO: 134724

SEQ ID NO: 245820 - DNA, 996 bp, Klebsiella pneumoniae
atggcgtccctgaaagatgtagcaaaactggcgaatgtatctctaatgaccgtctcacgggcgctgaacaccccggagcggctgaagcctgagacactggcccgcgtgcaggccgccatcgccgagaccaactacgtccccgacttgtcggcgaagaagatccgcggggcgcgcgccacccccagcaccatcggcgtgctggcgctggataccgtcaccacgcccttttcggtggagatcaccctctcgatcgaagagacggcccgcgcccacggctggaacagctttgtggtcaatatgttttctgacgatcgtccggaagcggtggtcgacctgctcctctcccaccgtccggacggcattatctttaccaccatgggcctgcgccaggtaccgctgccggagaaactgctgactctgccctgcgtgctggccaactgcgaaagcctcagccagccggtggccagctatatcccggacgatgaacaggggcagtacgacgcggtgaaagccctgcttgccgctggctatcgtcgtccgctgtgcctgcacttacccgccagccagccggcgacgatccgccgccgccgggggctggagcgcgcctgccgggaggccggtatcgaaccggaccatctgagccattcgtatatgggccagggcgatgagcattaccacgatatcccggcggtggtgctggcgcatatccgcgagggtaaacctggctttgactcagtgatctgcggcaacgatcgcatcgcgtttatggtctatcagacgctgctgggccaggggttacgcattccacaggacgtggcggtagtgggatacgacaacatggtgggcattggcgatctgtttctaccgccgctctccacagtgcaactgccgcattatgacatcgggcgcctgagcgccctgcatatcattcacggcgacaaccatcgggagacgcgcaaagtcgccagcccgtggttgccgcgcgcctcacattaa

SEQ ID NO: 245821 - DNA, 1422 bp, Klebsiella pneumoniae
atgacttcaatcagtaacgactctacattatcgccgcggacgcaacgtgatacccggcggatgaactggtttgtttccatcgccgcggcggtggcgggcttgctctttggcctggatatcggcgtgatatccggagcgttgccctttataaccgaccatttcaccttatccagccagcttcaggagtgggtggttagcagcatgatgttgggggcggcgataggcgcgctgtttaacggctggctgtcgttccgccttggtcgtaaatacagcctgatggcgggggccgtactctttgtggccggctctatcggatccgcttttgccgccagcgtggaggtgctgctggtggcccgcgtggtgttgggcgtggcagtcgggattgcctcttataccgcgccgctgtacctctccgagatggccagcgagaacgtgcgcgggaaaatgatcagtatgtatcagctgatggtcacccttggcattgtgctggcgtttctttccgataccgcctttagctacagcggtaactggcgcgccatgctgggcgtgctggcgctgccggcggtgatcctgatcattctggtcgtctttttgccgaacagcccgcgctggctggcggagaagggacgccatatcgaagcggaagaagtgctgcggatgctgcgcgatacctcggaaaaggcgcgcgacgagcttaacgagatccgtgagagcctcaagctgaagcagggcggttgggcgttgtttaaggtcaatcgtaacgtgcgccgggcggtgttcctgggcatgctgctgcaggcgatgcagcaattcaccggcatgaacatcatcatgtactatgcgccgcgtatctttaaaatggcgggctttaccactactgaacagcagatgatcgccaccctggtggtgggcctgacctttatgtttgccacctttattgcggtgttcacagtggataaagcgggccgcaagccagcgctgaaaatcggctttagcgtgatggcgctgggcactctggtgctgggctactgcctgatgcagttcgacaatggcaccgcatccagcggcctctcctggctctccgtcggcatgaccatgatgtgtattgccgggtatgcgatgagcgcggcgccggtggtgtggatcctctgctccgagatccagccgctaaaatgccgcgacttcggcatcacctgctcgaccaccaccaactgggtgtcgaacatgatcatcggcgccactttcctgacgctgcttgacgcaattggcgccgccggcaccttctggctctacacgacgctcaacgtggcctttatcggcatcaccttctggctgatcccggaaaccaagaatgtcaccctcgagcacattgagcgcaacctgatggcgggcgagaagctgcgcaacatcggtaatcgttaa

SEQ ID NO: 245822 - DNA, 762 bp, Klebsiella pneumoniae; identical to SEQ ID NO: 221377

SEQ ID NO: 245823 - DNA, 1176 bp, Klebsiella pneumoniae; identical to SEQ ID NO: 221378

SEQ ID NO: 245824 - DNA, 696 bp, Klebsiella pneumoniae; identical to SEQ ID NO: 221379

SEQ ID NO: 245825 - DNA, 1179 bp, Klebsiella pneumoniae; identical to SEQ ID NO: 221380

SEQ ID NO: 245826 - DNA, 870 bp, Klebsiella pneumoniae; identical to SEQ ID NO: 213526

SEQ ID NO: 245827 - DNA, 462 bp, Klebsiella pneumoniae; identical to SEQ ID NO: 213525

SEQ ID NO: 245828 - DNA, 1230 bp, Klebsiella pneumoniae; identical to SEQ ID NO: 221383

SEQ ID NO: 245829 - DNA, 879 bp, Klebsiella pneumoniae; identical to SEQ ID NO: 221384

SEQ ID NO: 245830 - DNA, 705 bp, Klebsiella pneumoniae; identical to SEQ ID NO: 221385

SEQ ID NO: 245831 - DNA, 573 bp, Klebsiella pneumoniae; identical to SEQ ID NO: 221386

SEQ ID NO: 245832 - DNA, 636 bp, Klebsiella pneumoniae; identical to SEQ ID NO: 221388

SEQ ID NO: 245833 - DNA, 210 bp, Klebsiella pneumoniae; identical to SEQ ID NO: 139211

SEQ ID NO: 245834 - DNA, 897 bp, Klebsiella pneumoniae
atggcttttctctcacgtaatctgattctcgacctgctgctcaccgcgctggcgcccgctatctgggggacgacctacatcgtcacctcccagtttcttccccctgaccgcccatttattgctgcgctgttgagggtgctgccggcaggtatcgccctgctgatctggagccgtcgttttccgcaacgcggcgaatgggcaaagctgatcgttaccggcatcttaaatatcggcgcgtttcaggcgctgttgtttatcgccgcctatcgcttacccggcgggctggcggcagtgatcggcgcgatccagccgctgctggtgatgctcctcgcctggtgcgtcgaccggcagcgctcgccctggctggcggtgttctccgccatcgccggcatactcggtatggccatgctgctgctgtcgccgcacaccgtcctcgacccgctgggcatcggcgcggcgtttctcggggcgatcagtatggcgctgggcacctggctctcccggcgctgggcgctctccctgccgatcgtcgcgctgaccggctggcagctgacgatcggtggggtggtgctggccccggtggcgctgatcgttgaccctcctttgcatcaggtaacagtgctgcaggcggccggctatctgtggctgtgcctggcgggcgccatgctggcctatggcctgtggtttcgggggattggccgcctctcaccggtggccgtgtcggcgatgagtctgctgagcccggtgaccgccgtggtactgggatggatattcctcggacaaaagatccaggggatggcgctgatgggattgatcgtggtgctggcgagcgtgatgtctatccagcgcgcgctggcgcgtcaggcggcgggagcaaaaacgaaaaaagccccgtaa

SEQ ID NO: 245835 - DNA, 507 bp, Klebsiella pneumoniae; identical to SEQ ID NO: 221394

SEQ ID NO: 245836 - DNA, 957 bp, Klebsiella pneumoniae; identical to SEQ ID NO: 221395

SEQ ID NO: 245837 - DNA, 606 bp, Klebsiella pneumoniae
atgacgaataacgccgacataaaaaaaaggaacttcctgactcagaatgaaattgagtctttacttaaagcggccgataccggtccttatgctgcacgtaattattgcctgacgttactgtgcttcatccatggtctgcgcgccagcgagatctgtcgtctacgaatatcggatatcgaccttgctgcccgatgtgtttacatccatcggcttaaaaaagggttttcgactacccacccgttgctggataaagagatctacgccctaaagcgctggctggccattcgcagcagctggccgcaggccgccagcgaatggctgtttctctcccgcaaaggtaatcccctttcccgccaacagttttatcagattatcgcgtcctcagggggactggcggggctgccactggagatccacccgcacatgctgcggcactcctgtggctttgcgttggcgaatatggggatcgatacccgcttgattcaggattatctcgggcatcgcaatatccgccacaccgtctggtataccgccagcaatgcgggacgcttctatggcatctgggacaatccccgtgacaaacagcgatcgtcgccgatccaatag

SEQ ID NO: 245838 - DNA, 609 bp, Klebsiella pneumoniae; identical to SEQ ID NO: 221397

SEQ ID NO: 245839 - DNA, 549 bp, Klebsiella pneumoniae; identical to SEQ ID NO: 137019

SEQ ID NO: 245840 - DNA, 537 bp, Klebsiella pneumoniae; identical to SEQ ID NO: 221399

SEQ ID NO: 245841 - DNA, 705 bp, Klebsiella pneumoniae; identical to SEQ ID NO: 221400

SEQ ID NO: 245842 - DNA, 2613 bp, Klebsiella pneumoniae; identical to SEQ ID NO: 221401

SEQ ID NO: 245843 - DNA, 528 bp, Klebsiella pneumoniae; identical to SEQ ID NO: 221402

SEQ ID NO: 245844 - DNA, 501 bp, Klebsiella pneumoniae; identical to SEQ ID NO: 137025

SEQ ID NO: 245845 - DNA, 909 bp, Klebsiella pneumoniae; identical to SEQ ID NO: 221404

SEQ ID NO: 245846 - DNA, 1413 bp, Klebsiella pneumoniae; identical to SEQ ID NO: 221405

SEQ ID NO: 245847 - DNA, 273 bp, Klebsiella pneumoniae; identical to SEQ ID NO: 137028

SEQ ID NO: 245848 - DNA, 231 bp, Klebsiella pneumoniae; identical to SEQ ID NO: 137029

SEQ ID NO: 245849 - DNA, 273 bp, Klebsiella pneumoniae; identical to SEQ ID NO: 137030

SEQ ID NO: 245850 - DNA, 1026 bp, Klebsiella pneumoniae; identical to SEQ ID NO: 221409

SEQ ID NO: 245851 - DNA, 1938 bp, Klebsiella pneumoniae; identical to SEQ ID NO: 221410

SEQ ID NO: 245852 - DNA, 1449 bp, Klebsiella pneumoniae; identical to SEQ ID NO: 221411

SEQ ID NO: 245853 - DNA, 300 bp, Klebsiella pneumoniae; identical to SEQ ID NO: 137034

SEQ ID NO: 245854 - DNA, 1554 bp, Klebsiella pneumoniae
atgcattcctctgttaataaaaacgaaagccgtacctttttcggccatccttatccgctgggctcgctgttcttcactgaaatgtgggagcgcttctcgttttacggcatccgtcctttactgatcctgtttatggcggcgacagtgtacgacggcggcatgggcctggcgcgagagaacgcctcggcgatcgttgggatttttgccggcagtatgtatctggccgcgctgccgggcggctggctggcggataactggcttggccaacaacgcgccgtctggtacggctctatcctgatcgccctggggcacctgtcgatcgctctgtcagcatggctgggcaacgatctgttctttatcggtctgatgtttatcgtcctgggttccgggttgtttaaaacctgtatctcggtgatggtcggcaccctgtataaaaagggcgacgcgcgccgcgacggtggtttttcgctgttctacatggggatcaacatcggctcgtttatcgcgccattgatctctggctggcttatcaaatcgcatggctggcactggggcttcggcatcggagggatcgggatgctggtggcgctgatcattttccgtgtctttgccgtaccgtcgatgaagcgctatgacgcggaggttggcctcgattccacctggaacagcccggtggcgaaaaagaatggcgttggagcgtggctgctggcgctggcgctgggagtggcggtgctggtcacgcttatcagcctgggcacgatcgtgattaacccggtagcggtggccagcgtgctggtctatgtgattgccgcctccgtggcgctctatttcatctggctgttcgtcttcgccggactcaaccgtaaagagcgggcgcgcctgctggtgtgctttattttgctggtctcggcggcctttttctggtccgcgtttgaacagaaaccgacctccttcaacctgtttgctaacgactataccaaccggatgatcggcgattttgagatccccgcggtctggttccagtcgattaacgccttgtttatcattctcctcgcgccggtattcagctgggcgtggcctgcgctggcgcgtaaaaacgttcgtccgggcagtatgaccaaattcgtgattggcatcctgtgcgcagcggcgggctttggcctgatgatgctggcggcgcagaacgttctgagcaacggcggggccggtgtgtcgccgctgtggctggtgggcagcatcctgatgctgacgctcggtgaactgtgcctcagcccgattgggctggcgaccatgactctgctggcgccggagagaatgcgcggccagatgatggggctgtggttctgcgccagcgcgctgggtaacctggcggcgggcctgatcggcggtcatgtgaaggccgatcagctgtcgctgctgccggacctcttcgcccgctgctccatcgcattgctgatctgcgccgccgtgctggccgtgctgattgtcccggtccgccggatgctggagaacagtcggtccagcgccgcgcaaaaatccctcagcaacgcctga

SEQ ID NO: 245855 - DNA, 423 bp, Klebsiella pneumoniae; identical to SEQ ID NO: 221413

SEQ ID NO: 245856 - DNA, 1293 bp, Klebsiella pneumoniae; identical to SEQ ID NO: 221414

SEQ ID NO: 245857 - DNA, 330 bp, Klebsiella pneumoniae; identical to SEQ ID NO: 221415

SEQ ID NO: 245858 - DNA, 294 bp, Klebsiella pneumoniae; identical to SEQ ID NO: 138650

SEQ ID NO: 245859 - DNA, 573 bp, Klebsiella pneumoniae; identical to SEQ ID NO: 217733

SEQ ID NO: 245860 - DNA, 276 bp, Klebsiella pneumoniae; identical to SEQ ID NO: 138648

SEQ ID NO: 245861 - DNA, 900 bp, Klebsiella pneumoniae; identical to SEQ ID NO: 221419

SEQ ID NO: 245862 - DNA, 309 bp, Klebsiella pneumoniae; identical to SEQ ID NO: 216437

SEQ ID NO: 245863 - DNA, 558 bp, Klebsiella pneumoniae; identical to SEQ ID NO: 221420

SEQ ID NO: 245864 - DNA, 1020 bp, Klebsiella pneumoniae
atgcagtatacccggctcgggaagagtgacttactggtctcccgtatctgcatgggatgtatggggtttggcgatccgtcaacgggtcagcatcgctggacgctggacgaaacagccagccgggacatcatccgccacgctctggaacagggcatcaatttttacgataccgccatcgcctatcagaacggctccagcgaacggtacgttggccgggcgctgcgggagatggcaaaacgcgaggaggtggtgctggccaccaagtttctgccacgaaccgctgcccagattgccgaggggatcagcggaaaacaggcgatagcccgctcgcttgaccagagtctgcgaaacctcgggatggactacatcgacctctacatctaccacatctgggattacaacaccccggttatcgacgtgctggaggcgctgcacaccgcagtgaccgccggcaaggtgcgcgcgattggcatttccaattgctatgcctggcagctggcgaaggcgaacgcccttgccgaacgcgaagggctgacatcctttgtttctgtgcagagccactacaacctgattatgcgtgaagatgaacgagagctgttcgggctgtgcgcagaagagggtatcgccatgactccctatagcgcgctggccagcggccgtctctcccgcttagaaggccacacgcggcgagaggtggaagatgattatgcccggggcaaatacgacggcacggcagagcaggaccggatcattattgcccgcgtcgccgaaattgccgaacggcatcaggtctcgatgaccgaaatttcgctggcctggctgctgactaaagtcaccgccccggtgatcggcgccacgcaaaagcatcatgttgacggcgcggtcaacgctgtagcccttcaactgagcccggaagacatccgttatctggaagaagcctaccagccgcacttcctcacaggcgtgatggcgcaaaacacgccgcaagccaaagaccatcatcaggtgtggacgcggtaa

SEQ ID NO: 245865 - DNA, 804 bp, Klebsiella pneumoniae; identical to SEQ ID NO: 221421

SEQ ID NO: 245866 - DNA, 930 bp, Klebsiella pneumoniae; identical to SEQ ID NO: 211767

SEQ ID NO: 245867 - DNA, 1389 bp, Klebsiella pneumoniae; identical to SEQ ID NO: 221423

SEQ ID NO: 245868 - DNA, 714 bp, Klebsiella pneumoniae; identical to SEQ ID NO: 211769

SEQ ID NO: 245869 - DNA, 900 bp, Klebsiella pneumoniae; identical to SEQ ID NO: 221425

SEQ ID NO: 245870 - DNA, 1494 bp, Klebsiella pneumoniae
atggcaaattcagataaaaaaacgccttcaccggtgcatgatttacgttcggctctggcactgttaaaaacgctgccgggcgaatatgttgagaccgataccgaagtcgatcctcacgccgagctctcaggcgtttaccgctacgtgggcgccggcggcacctgccagcgcccaacgcgcaagaacggcccggtcatggtctttaacaaaattaaggggttcgacgatatcagcgtggccatcggtctgaacggctcgcgccagcgcgttagccagttcctgcagtgtgaaccggcaaaactgggtcatttgctgaaagattccgttgaaaatgctattagcccaaccatagtacaggacacggcggtatgccaggaagtggttcacctcgccagcgatgctgattttgatctgcgtaaactgctgcctgcgccaactaacaccgaagaagatgccggtccgtatatcactatgggcctgtgctacgcctccgacccgcaaacccacgaatccgatatcactattcatcgcctgtgtgtccagagccgcgatgagctatcaatgtggctgacgccgggtcgtcatatcgatgccttccgcatgaaggcggaagcggcgggccagccgctgcctatttcgatcagtatcggcgtcgatccggctatcgaaatcgccgcctgctttgagccaccgaccaccccgctgggtttcaacgagctaagcatcgccggcgcgctgcgtggccgcgcggtggagatggtgcaatgtaagactattaatgaaaaagccattgcccacgccgaaatcgttatcgaaggcgaactgctgccgaacgtgcgcgtacgcgaagatcagaacacccataccggccgcgcaatgccggagttcccgggctataccggtgaagcgaaagaggcgattccggttattaaagtcaaagccgtcacccatcgtactcagcctatctggcgcaccaccgtcggaccaggcgaagaacatgtcaacatggccgggatcccgaccgaagcgagtattctcgatatggtggagcgcgccatgccgagcaaattactcaacgtcttcgcccactcggcaggcggcggcaaactactggcggtactgcaatttaagaaatcttcccctgccgatgaaggccgccagcgccaggcggcgctcctggcgttctccgctttcccggagctgaagcacgtcattttggtggatgaggatgttgatattttcgatagcgacgatgtgctgtgggcgatgcaaacccgctaccagggtgatgtcgataccgtaatgatcccgggtgtgcgctgtcatccgctcgacccgtcgcaggtgccagagtacagcccgagcgtgctgcagcagggaatgtcgtgcaaaaccattttcgactgcaccgtaccgttccatctgaaacacaactttgagcgctctaagttcaaagcggttgatgtaaaacgtttcctgccggacttcgaataa

SEQ ID NO: 245871 - DNA, 579 bp, Klebsiella pneumoniae; identical to SEQ ID NO: 221427

SEQ ID NO: 245872 - DNA, 717 bp, Klebsiella pneumoniae; identical to SEQ ID NO: 221428

SEQ ID NO: 245873 - DNA, 555 bp, Klebsiella pneumoniae; identical to SEQ ID NO: 211770

SEQ ID NO: 245874 - DNA, 1518 bp, Klebsiella pneumoniae; identical to SEQ ID NO: 221430

SEQ ID NO: 245875 - DNA, 963 bp, Klebsiella pneumoniae; identical to SEQ ID NO: 221431

SEQ ID NO: 245876 - DNA, 1734 bp, Klebsiella pneumoniae; identical to SEQ ID NO: 221432

SEQ ID NO: 245877 - DNA, 714 bp, Klebsiella pneumoniae; identical to SEQ ID NO: 221433

SEQ ID NO: 245878 - DNA, 897 bp, Klebsiella pneumoniae; identical to SEQ ID NO: 221434

SEQ ID NO: 245879 - DNA, 522 bp, Klebsiella pneumoniae; identical to SEQ ID NO: 221435

SEQ ID NO: 245880 - DNA, 411 bp, Klebsiella pneumoniae; identical to SEQ ID NO: 221436

SEQ ID NO: 245881 - DNA, 267 bp, Klebsiella pneumoniae; identical to SEQ ID NO: 137771

SEQ ID NO: 245882 - DNA, 984 bp, Klebsiella pneumoniae; identical to SEQ ID NO: 211779

SEQ ID NO: 245883 - DNA, 660 bp, Klebsiella pneumoniae; identical to SEQ ID NO: 221439

SEQ ID NO: 245884 - DNA, 312 bp, Klebsiella pneumoniae; identical to SEQ ID NO: 221440

SEQ ID NO: 245885 - DNA, 1434 bp, Klebsiella pneumoniae; identical to SEQ ID NO: 221442

SEQ ID NO: 245886 - DNA, 360 bp, Klebsiella pneumoniae; identical to SEQ ID NO: 221443

SEQ ID NO: 245887 - DNA, 2010 bp, Klebsiella pneumoniae; identical to SEQ ID NO: 221444

SEQ ID NO: 245888 - DNA, 612 bp, Klebsiella pneumoniae; identical to SEQ ID NO: 221445

SEQ ID NO: 245889 - DNA, 504 bp, Klebsiella pneumoniae; identical to SEQ ID NO: 221446

SEQ ID NO: 245890 - DNA, 744 bp, Klebsiella pneumoniae; identical to SEQ ID NO: 221447

SEQ ID NO: 245891 - DNA, 2874 bp, Klebsiella pneumoniae
atgactcagactttaagtcagcttgaaaaccgcgacgcctttattgaacgtcacattggcccggacgctcagcaacagcaagagatgctgaagaccgtcggcgcggattcgcttaacgccctgatcggccagattgtgccgcaggatatccagctggcgaccccaccgcaggtgggcgacgcgactaccgaattcgccgcgctggcggagctgaaggcgattgccagtcgcaacaagcgcttcaagtcttacatcggcatgggctataccgccgtgcagctgccgccggtcattcagcgcaacatgctggaaaacccgggctggtataccgcctataccccttaccagccggaagtatcccagggccgtctggagtcgctgctcaacttccagcaggtcactctggatctgaccgggttggatatcgcttccgcttcgctgcttgatgaagccaccgccgccgccgaagcgatggcgatggccaaacgcgtcagtaaactgaagagcgccaaccgcttcttcgttgccgccgacgtccatccgcaaaccctggacgtggtgcgcacccgcgcggaaaccttcggtttcgacgtcatcgtcgatgacgccgacaaagtgctcgatcaccaggatgtcttcggcgtgctgctgcagcaggtgggcaccaccggcgaaatccacgattacagcaaactgatcgccgagctgaaagcgcgcaaagtgattgtcagcgtcgctgccgactttatggcgctggtgctgctgacggcgccgggcaagcagggcgcggatatcgtcttcggttccgcccaacgcttcggcgtgccgatgggctacggcggcccgcacgcagccttcttcgcggcgaaagatgaattcaaacgctccatgccgggccggattatcggcgtatcgaaagatgcggcggggaataccgcgctgcgcatggcgatgcagactcgcgagcagcacatccgccgtgagaaagcgaactccaacatttgtacctcgcaggttctgctggccaacatcgccagcctgtacgcggtattccacggcccggcgggtctgaaacgtatcgctggccgcattcatcgtctgaccgacattctggccgacggcctgcagaagaaagggctgaagctgcgccatgcccactacttcgacaccctgtgcgtcgaagtggcggataaagccgcggtgctggcgcgtgccgaagccctgcagattaacctgcgcagcgatattcacggcgcggtgggcattacgctcgatgaagcgaccacccgcgaagatgtgctgaacctgttccgcgccatcgtcggcgacgatcacggtctggatatcgataccctggataaagacgtggcgctggatagccgttcgatcccggcggcgatgctgcgcgacgatgcgatcctcacccatccggtgtttaaccgctaccatagcgaaaccgagatgatgcgctacatgcacgccctggagcgtaaagatctggcgctgaaccaggcgatgatcccgctgggctcctgcaccatgaaactgaacgccgcggcggagatgatcccgatcacctggccggaattcgccgagctgcacccgttctgcccggtcgagcaggcggaagggtatcagcagatgatcgcccagctttccgactggctggtgaaactgaccggctatgacgccgtctgcatgcagccgaactccggcgcgcagggtgaatatgctggtctgctggcgattcgccattatcacgagagccgcaacgaaggccatcgcgatatctgcctgatccctagctccgcgcacggcaccaacccggcttccgcgcagatggcgggtatgcaggtagtggtcgttgcctgtgataaaaacggcaacatcgatctcgccgatctgcgtgaaaaagcagagcaggcgggggccaatctctcctgcatcatggtcacctatccgtcgacccacggcgtgtatgaagagaccattcgcgaagtgtgcgagatcgtgcaccagtttggcggccaggtttatctcgacggcgccaacatgaacgcccaggtcgggatcacctctccgggctttatcggcgccgacgtttcgcacctcaacctgcataaaacgttctgcattccgcacggcggcggcggcccgggcatgggcccaatcggcgtgaaagcgcacctggcgccgttcgtgccgggccacagcgtggtacagattgaaggtatgctgacccgccagggcgcggtttccgccgcgccgttcggcagcgcgtccattttgccgatcagctggatgtatatccgcatgatgggcgcggaagggctgaagcaggcgagccagaacgcgatccttaacgccaactacatcgctacccggctgaaagacgcctacccggtgctctacaccggtcgcgatggtcgcgtagcgcacgaatgcattctcgatattcgtccgctgaaagaagagaccggcattagcgagctggatatcgccaagcgcctgatcgactttggcttccatgccccgaccatgtctttcccggtagcggggacgctgatggttgagccgacggaatcggaaagcaaggtcgagctggaccgctttatcgacgcgatgctggcgatccgcgcggaaatcgaccgcgtcaaagccggcgaatggccgttggaggataaccctctggtgaacgcgccgcacacccagggcgagctggtgggcgagtggaaccatccgtacagccgcgagctggcggtattcccggcagggttgcacaacaagtactggccgacggtgaaacgtctggatgatgtctacggcgaccgcaacctgttctgctcctgcgtgccgatgagcgaataccagtaa

SEQ ID NO: 245892 - DNA, 390 bp, Klebsiella pneumoniae; identical to SEQ ID NO: 221449

SEQ ID NO: 245893 - DNA, 1095 bp, Klebsiella pneumoniae; identical to SEQ ID NO: 221450

SEQ ID NO: 245894 - DNA, 1203 bp, Klebsiella pneumoniae; identical to SEQ ID NO: 221451

SEQ ID NO: 245895 - DNA, 1179 bp, Klebsiella pneumoniae
atgagcgtgctgatcgtcggcggcgggatgaccggcgcgacgctcgcgctggccatctcccgtttgaccggcggcgcgctgccggtccacctcattgaagcgcaggatccgcattcgtcacgccaccctggctttgacgaccgggcgatcgccctggctgcgggcacctgccagcagctggcgcgtatcggtatctggcaacgcctcgccgaacgcgcgacgcccatccagcgagtacacgtcagcgaccgcggtcatgccgggtttgtgaatctggcggccgcggattatggcctgtcggcgctgggccaggtggttgaactccacgatgtcggccagcgcctgtttggtctgctgcgcgaggcggcgggcgtcacgctgcactgtccggcgaaagtggaagcggtcagtcgcagccaggagagcgtcagccttacgcttgagggcggcgaaatcattaacggtaagctgctggtggcggcggacggttcccgttcggcactgggcgcccgctgcggcatcagctggcagcagcagccgtatgagcagatagcgatcattgctaacgtcagcaccgcgttgccccacgaaggtcgcgccttcgagcgctttaccgagcatggcccgctggcgatgctgccgatgtcgcaagggcgctgctcgctggtgtggtgtcatccgcagtcgcgccgcgatgaggtgcagagctggtctgacgaacgcttttgtcaggagctgcagcaggcgttcggctggcggctggggcgtattacccacgccgggaagcgcagcgtttatccgctggccctcaccaccgccagccgcgcggtgtcgcaccgcctggcgctggtcggcaacgcggcgcagacgctgcacccgatcgccgggcagggctttaatctcggcctgcgcgatgtgatgagcctggcggaattactcgctgacgcccatctcagcggcgaagatgtcggtcattatccgctgctgtgccgctatcaggcgcgcagggcagcggataaagccgccaccatcggcgtgaccgatgggctggtgcatctgtttgccaaccgttgggcgccgctggtggcggggcgcaacgtcggtctgatggcgatggaattatttaccccggcgcgcgatgcgctggcgcagcgtaccctcggttgggttccccgttaa

SEQ ID NO: 245896 - DNA, 1317 bp, Klebsiella pneumoniae; identical to SEQ ID NO: 221453

SEQ ID NO: 245897 - DNA, 585 bp, Klebsiella pneumoniae; identical to SEQ ID NO: 211795

SEQ ID NO: 245898 - DNA, 330 bp, Klebsiella pneumoniae; identical to SEQ ID NO: 138508

SEQ ID NO: 245899 - DNA, 597 bp, Klebsiella pneumoniae; identical to SEQ ID NO: 211797

SEQ ID NO: 245900 - DNA, 1233 bp, Klebsiella pneumoniae; identical to SEQ ID NO: 221457

SEQ ID NO: 245901 - DNA, 660 bp, Klebsiella pneumoniae; identical to SEQ ID NO: 221458

SEQ ID NO: 245902 - DNA, 894 bp, Klebsiella pneumoniae; identical to SEQ ID NO: 221459

SEQ ID NO: 245903 - DNA, 768 bp, Klebsiella pneumoniae; identical to SEQ ID NO: 221460

SEQ ID NO: 245904 - DNA, 636 bp, Klebsiella pneumoniae
atgtttacttattactttcaggggcttgccctgggagcggctatgatattgccgcttggccctcaaaatgcctttgtgatgaatcaggggatccgtcgtcagtatcatctgatgattgccctgctatgcgcggtcagcgacttgctgttaatctgcgctggcattttcggcggtagcgcactgctgatgcaatccccgtggctgctggcgctagtgacctggggcggcgtggcctttttgctgtggtatggcttcggcgcattgaaaacggcgttcagtcagagtcttgaactcgccaatgcagaggtaatgcagcaggggcgctggaaaatcattatcaccatgctggcggtgacctggcttaatccgcacgtttatctggacacctttgtggtgttaggcagcctgggaggtcagctggcggtggagccgaagcgctggtttgcgctagggaccattagcgcctctttcctgtggttctttggcctggcgctgttagccgcctggctggcgccgcgactacgtaccgccagagcccagcggatcatcaatattgtggtcggcgccgtcatgtggtttattgcgtttcagctggcaagagaaggcgtcagccatatccaggcgttgcttaactaa

SEQ ID NO: 245905 - DNA, 858 bp, Klebsiella pneumoniae; identical to SEQ ID NO: 221462

SEQ ID NO: 245906 - DNA, 342 bp, Klebsiella pneumoniae
atgtcaaaaattgttgctctgattgccactgaagagaaaggcagaaagccagctctccagcagcgcaagctgaaagctacgagtggcttgcgtaaaactgcccgcatgacacacctcgatgcccttgctaaaaagcttgggtaccagatagtccgcagttccagttttgcatatcgccatacgattgctgtggaagtagttaagaaatgtgaagctgttgaggaaaactgtgtaccgcgcgttaagaagctctctttctctgaagcaagcgcgctttccagggaactatccgactctcgagaagagcggttactgagagcttcctttgatggtccagaatga

SEQ ID NO: 245907 - DNA, 516 bp, Klebsiella pneumoniae
atggtccagaatgaatatcttggtggcgtatatagcgaacagaaatttaaatctgaccttatattaaaaggttttaaagactcatttatttttcactggcgctatggccaccatcctgactttggtaaggatagtctttttcataaacccccatgtgtctaccctattcacataagaaaagttcatgtaaatattggattatacaccaatgaatatgggataaatggcactgaagaatgttggaataattggtctaccggtagatacggtcccggtggatatgaaaagcaaattccaacatcagatgcatatttaatttatgcagtgtgtgaaaacaggaatgcaggagttctagatttctggtttcctcctgcacacaaagaagctgaatacgagtcctctgttcaatttgtagccgctcttgctgataagttttatgataaaatatccggaaaaccaatgagtagagatcaagagccatggcatcctgattatcttgttaagaagcccgcatag

SEQ ID NO: 245908 - DNA, 345 bp, Klebsiella pneumoniae
atgttcgtgagcccgtcgtatggcatcagtagcctgtccttgttgacctgctataccgcctgggcgtgccgttctggcactgagtacactgtccgcaataacctgatagccttgctgtgtatctccatcctgaccagtccactgattgagctgcatattgcccgccacactgacaaggtcgcctttacggtgtttggccagcgtatctgccttcttcccaaaggcaatgactcccagccagaaggtagcctgcccgtcccctgccgcattacaaggcagcgcaaccgccaagcgggccatagccatgttcgtaccttttcctgttgttctggtttgcgggtctga

SEQ ID NO: 245909 - DNA, 843 bp, Klebsiella pneumoniae
atgcattcattacaacgtaaagtactacgcactatttgccctgatcagaaaggcctcatcgcgcgtatcaccaatatctgctacaagcatgaactcaacattgtgcagaacaatgagtttgttgaccaccgtaccggtcgtttctttatgcgcaccgaactggaaggcatttttaacgacgctactctgctggccgatctcgacagcgccctgcctgaaggctccatccgcgaactaaatccggcaggccgtcgccgggtggtgattctggtgacgaaagaggcgcactgtctgggcgatctgctgatgaaagccaactacggcgggctggatgtcgatattgccgcggttatcggcaaccatgacaccctgcgctcgttggtggagcgctttggtattccgtttgagctggtcagccatgaaggactgagccgcgaagaacacgatcagcggatgggcgatgctatcgccgcccacgaaccggattacgtggtactggccaagtatatgcgcgtcctgacgccagaatttgtcgcccgcttcccgaacaaaatcatcaatatccaccattcgtttttgccggcgtttatcggcgcccgtccctatcatcaggcctatgagcgcggcgtgaaaatcattggcgctaccgcccactacgtgaatgacaatctggatgaaggcccgatcatcatgcaggacgtgattcacgtcgatcatacttataccgcagaagatatgatgcgcgctgggcgcgatgttgaaaaaaacgtcttgagccgggcgctgtatcaggtactggcgcagcgcgtcttcgtttacggtaaccggacgattattctttaa

SEQ ID NO: 245910 - DNA, 459 bp, Klebsiella pneumoniae
ttgtcgcaattatgcccctgtggcagcgcactggagtatagctcatgttgccagcgatatctgtccggcgctgagcttgcgccgggcccgtcacagcttatgcgctctcgttatagcgcgttcgtcatgaaagacgctgactatctaatcaaaacctggcacccgtcctgtcaggcgcagcaatttcgcgccgagctggagaaagggttttcccagaccgaatggctgggcttaaccctgttcgccagtgatgaggggcgagctccaaatgaaggttttgtcagctttgtcgcccgctttaatgacaataaccgccctggcgccattattgaacgttccagattcttaaaagaaaatggacagtggtactatatcgacgggacacgaccgctgattggccgtaacgacccctgcccctgcggctcaggtaaaaaatttaaaaaatgctgcggccagtaa

SEQ ID NO: 245911 - DNA, 903 bp, Klebsiella pneumoniae
atgagaaagcttaaaattggtctggcgctaggtgcgggagccgctcgcggatggtcgcacattggcgtcatcaacgccctccagcgggccggtattgagattgatatcgtagccggttgttctatcggttcgctggtaggggcggcgtatgcctgtaaccgactcccggcactcgaatcatgggtctgctcattcagcaactgggatgtcctgaagctgatggatctctcctggcgccgggggggactgctgcggggggaaaaggtattcaatcattaccgccgcattatgcccgtcaccgagattgaacgctgcgagcgccggtttgccgctgttgccaccaatttaagcaccggtagggagctgtggtttaccgaaggcgatcttcatttagccattcgcgcctcctgcagtatgccggggttaatgtcgccagtaaggcataatggttactggctggtcgatggcgcggtggtcaatccggttcctgtgtcgctcacccgggcaatgggagcggatattgtgattgccgtcgacctgcaacatgatgcccatcttatgcagcaggatttgttctcccttgaaacgccgcggcaggaagcggaagagaaggaggggccatggcatactcgtctgcgcgcgcgcttgacgcgaatgagttcccgccgtacggccgtgacgccgacggcgatggagatcatgaccacctctatccaggtactggaaaaccgtcttaaacgcaatcgtatggcgggtgacccgccggatatcctgttgcagccatactgtccgcaagtttcgacgcttgattttcatcgcgccggagaggcgatcgccgcggggcaactggcggtagaaaagaaaatggatgaattattaccattagtgcgtacagccgtttga

SEQ ID NO: 245912 - DNA, 1014 bp, Klebsiella pneumoniae
atgacgcagccattggcgggaaaacagattctgatagttgaagacgaacccgttttccgctcactcttgcatggatggctgacctcgctgggagcaacaaccttccaggcggaagatggcaaggatgccctgcataaaatgacggaggtgcatccggacctgatgatttgcgacatttctatgccgagaatgaacggtctggagctggtggaaacgctgcgtaaccgcggcgaacagttaccgatcctgatgatctccgccaccgaaaacatggcggatatagctaaagcgttgcgacttggcgtccaggacgtgctgttaaagccagtaaaagatttcgatcgcctgcgcgagaccgtttacgcctgtctctatcccgcgatgttcagttcgcgcgtggaagaggaagagcgtttatttgaggactgggatgcgctggtcagtaatcccatcgccgcttcaagactattgcaggaattacagccgccggtgcaacaggaaatgtcgcactgccgtattcattatcgacaactggtgtcggcagacaagcccggtctggtactcgatatcgcgccgctttcggaaaatgatttggctttctattgtctggatgtcacacgcgcaggcgataatggcgtgttggcagcattattgctgcgcgcgttgtttaatggtctgctgcaggagcaactggcgcaccagggacaacggctaccagaaatgggaagtttgttaaaacaggtgaatcaactgctgcgtcaggcaaatcttccgggccagttccctctgttagtagggtattaccacagcgggctgaaaaatttaattctggtgtcagcgggacttaatggcacgctgaatacgggggagcatcaaattcagattagtaatggcgttcctttggggacgctgggtgatgcttatcttaaccaaattagccaacgctgcacctcgtggcagtgccaaatttggggggctggcggtcgtttacgcttaatgttgtctgcggaatga

SEQ ID NO: 245913 - DNA, 2475 bp, Klebsiella pneumoniae
atgataaaggcatttttatcgcactcaagtaaagataaggaacattatgtgcgtaatgtcgctaattggcttggcaaggaaaacataatatatgatgaatttacttttgaggaaggagaaagaacactagaccaaattatggagggtttaggagattcagagttatttgttctttttatttccaacagcgcacttgagtccgaatgggtcaaaaaggaaataactgagtcaaaaaaactactcgatgaaggtaaaattttaaaaattttccctataataattgacaacaatataaatcatgaagaccaaagaatacctgattggttaagaaaagactataatcttcaacccattacacgcgcaagaactgcagcctcaagaattaagaaccatctatacaaaatttcttggcaaaaacaccccaaacttgaaaaaataagctcattatttgtaggaagaaacgataagctagaagaatttgaagagagaattaacgattacactaaaaagaaaccaactgttatcttcgcgtctggtttaataggtgtaggaagaaggtcattcttatctaaagcgttaataaaatgtaacatccaaaaaaaccaaatcacaccttacgctatatatttagacagaaatgagtcaattgaggattttatcctaaaacttaatgatttaggtattaccgatcttaaagaaagtgctctatcactttcagaaaaaaccatcgaggaaaagcaaaaaataatatccaacatattaaatgaagcttacaaagctaaagaaacaatatttttcctagatgatgggtgtataataaattataagcgagaattaacaccttggtttaaaatgataattgaagagtataatgatatcaatttccccgtattatgtatcgcctcaagatatagggtcaactttgctaacaggcctcgtgatgatagattttatttcattgaattacccgagcttaatgtaaaagaaagaagacgtcttttatcacaactattagaaattgaaaatattgatgatctagacccatccaactttagcagcgtctgcgacttacttactggtttgccagaacaagtaagatttgctattgagctgataaaggataaaaacataataccatttgagaataaacttcctatattgtcagattttaataatgataaagcatcaatacagctacaaaggtatgcccacaacgaaacggttttagactttataagactcatcgctcaatttgaggtaataacattagactttattttttcaatcgttgataaggataaatatctacctgtccttgaagctttaattgcagaaagcatttgcgaattagtgggttctgatggtgaaatgatcagattaaatgatatcgtaagagattatataaaaagaaacagacttaagattaatgatgagcataataaaaaacttaatttagttgttaaagagatagtaaacaatgaagatttaacagaagcaaactcatctgtatatatttttactataaaagaaatgctcaaatcagatgagtatattgatccaaaacatcttattccttcacattatttaagatgtatgaaagatttatataatgcaaaaggttcattagaaaaagtaatatcattagccgacacaattttacaaaaagaaaagaacatggataatggtgttgtacaagatataagatactatctatgtcttgctttagcaaaaaaatccgattcaaggcttttaactgaagttcaaaaaattcgcggtgatgaacataaatttttattgggtttttattacagaaaatgcggaagactttctgatgcactttctcagtttgaaagcataatcaatgctccatatgttgagtctcgagctaaacgagaattggttcaggtttatacacaattagaagaatatgataaagcgttaagttatgctaaaaagaactatgaagaaaatagaagcaatcaattccactgtcaagcctattttaattgtctcataaattctcagcatagggtagattcagataatatcgttttaaaagatattatcactaccttaatcaacattgattcagagcaatcaaatgaaatggcaaaaatagctgatgcaatgtattcagctaaaattgaaaatgatgtagtgaagtcaatcaccataataaatgactgcatagcaacatatcctgaaagtccttatccattactcgcaaagtgtgatgttggattaaaattcaagtctatacagacactagaggaagccttatcctcattagataaaatgaaaaggcgaaaagttgtgtctgaacgaacacttacaacctatcaggcttatttaatggctttaaagggtgatgaaaatagtgcaaaccagataatatccaatgatattaaaaaatatcctcaggaagcaagggagagaattttaaaaaggataaaggaatatgctggtaaaaattaa

SEQ ID NO: 245914 - DNA, 129 bp, Klebsiella pneumoniae
atgatatcgattctcattttagccgaggcagaggggggcggggtcaaatccctgacggcaaaggccaaaaggaccgccgcctcagtcaattttttatacccgcgaaaaatgaaatttaaccaggagtaa

SEQ ID NO: 245915 - DNA, 660 bp, Klebsiella pneumoniae
gtgcttgaaatggcccctgccatcaaccagattaaccaggccaacagccagatgcaggccctgaacagcgccgccgaagcggccggggccctgatctgcgacatcaatacccagataaattttgtggccgacaaaatcagggacctccagtcggcggtgctgctgggtagcgcgccgcagggagtggcactgacctcaggcgaacaccttcagctcagcagtacccgcaacaccatgatcaatgccggtcagcatcttgatatcggtgcgatgaagaatctgtctgtaacggtggaaaaagccctgggtatgtttgtgcatgaagacggggcgaagctggtcgccaatcagggggatattgatattcaggcgcagcacaacacgatggcgcttctggcaaagcagcaggtgacgataaccagctgcgaggatgggattaccatcagcacgccggagacactgacgctgaatggcggcggatcgtatctgaagctgagtaaaaacgggattgagcatggtactgagggaatgatggtgatgaaggtagcgagctatttggtgccaggaagtggcagcagtctgccactggagacaccggactttaaaacgacggacgtgaaggtcataacaaaaaattccgccaaatggacaagtgaataa

SEQ ID NO: 245916 - DNA, 684 bp, Klebsiella pneumoniae
atggcggacggaatttcagtctgggtgccgatgatctccacgctatcgggaggggttctggccggaggcgttgccctcctggtgagccgattgaatcatcgttacgctggagaacgtgaagccctggcggcggcagaacggcatcgccacgagttaaaggttgctcaggatacactggataaggaacgtttattcatcgcaacggagttggttttcttactggagcagtttgcggaaggctgcgctcgcctggctacagacttcggcgaactggatgctcagaatgagtatgctcccgctgaaaaattatctgatctcaaaatcacaggtatttcgggtgactggcgatcgcttcccccccggattatgtaccggattcatgaactccctgtactccagaatgaagtccggaggcatgttgcagctttctatgagcactactgggagccgcccaaccactccagctactttcgggaacgtcagtttcactatgcccggctggggctaaaggccattattctttcgcggcgactgcgtaaactggtcagtctgccggaaacccgcctcgaggcaacggaatggtctgcacaacccgtcctctggagtgtgtggcggaaaaaacgcaaagaaaggaccgaagcggaaatcagtcgcctgcgtaaaaagaaaggtgcggactcatga

SEQ ID NO: 245917 - DNA, 942 bp, Klebsiella pneumoniae; identical to SEQ ID NO: 221801

SEQ ID NO: 245918 - DNA, 951 bp, Klebsiella pneumoniae
gtgaacttccagcagctgaaaattatccgtgaggcggcccgtcaggattacaacctgacggaagtcgcgaatatgctctatacctcgcagtcaggcgtcagtcgccatatccgggaactggaagaggagctggggattgagatctttatccgccgcggcaaacgcctgttaggcatgaccgagccgggtaaagcgctgttatcgattgccgagcggatcctcaatgaagccagtaacgttcggcggctggcggatctcttcactaacgatgcgtcaggcgtcttaactatcgccaccacccatactcaggcgcgctacagcctgccgccggtcattaaagctttccgcgagctgttctcagatgttcgcgtcgagctggtgcagggtaccccgcaggaaatcgaagcgctgctgcataacggcggagcggatatcggcatcgccagcgagcgcctgagcaacgatccgacgctggcggctttcccctggttccgctggcatcacagcctgctggtgccgaaggagcatcctttgacgcaggtttctcccctgacgctggaggcgatcgcccgctggccgttaatcacctaccgccaggggatcactggccgttcgcgcattgatgaggcgttcaaccgcaaggggttgatgccggatatcgtgctgagcgcgcaggattccgatgtgatcaagacctatgtggagctggggctgggcgtcgggctggtcgccgagcagtccggtgatgcccgggaagcggacacctttacgcgtcttgatacccgccatctgttcgatgccaataccgtgtggttgggactgaagcggggccagctgcagcggaattacgtttggcgctttatcgaattgtgcaatgccggactgtcgctggatgagattaagcgtcaggcgatggagccggaagaggccgtaatcgactatcagatttaa

SEQ ID NO: 245919 - DNA, 918 bp, Klebsiella pneumoniae
atgaacttaagacgactgaaatattttgtgaaaatcgtcgatatcggcagtctgacccaggccgctgaagtcttgcatatcgcccaaccggccctcagccaacaggtcgcgaccctggaaggtgaaatggaccagcagttgctgatacgcaccaagcgaggggtcacgccaacggaagccggtaaaattctctacacccatgcgcgcactatcctgcgccagtgcgagcaggcgcagctggcggtcaataacgtcggccagacgctgcgtggtcaggtgtcgatcggcctggcgccgggcaccgcggcctccgccattaccatgccgttgctgcaaacggtgcgcaatgagttgcccgaggtgatggtctatctgcaggagagcagcggcacagcgctgaatgacaagctgctggcgggccagctggatatggcggtgctctatgagcgttcgccggtggcaggcatcgtcagccagccgctgctgaaagaagacctttacctggtcggcacccgcgactgcccggggcagagcgtggatctcactgcggtggcggagatgaacctgttcctgccgcgcgattacagcgcagtgcgggcgcgggtcaccgaggcattcaccctgcgtcgtctgtcggcgaaaattatcggcgagatcgaatccatcaccaccctgaccgcggccatcgccagcggcatgggggcgacggtgttaccggaatccgctgctcgttccctgtgcggggcggcgaacggctggatggcgcggatcagcacgccttcaatgagcctgtcgctgtcgctgaacatgtcggctcgcggcagtctgtcgccgcaggcgcaggcggtgaaagagatcctgctgtctctggtgagccgcccatcgctggaaaaccgtgaactgcagctggtcagttag

SEQ ID NO: 245920 - DNA, 1554 bp, Klebsiella pneumoniae
gtgccgctaccgctgatccaaatcgccgcgggcgccgcgctggccgccagtggctttcaggtcgattttgacccgcatatttttttactgctgtttatcccgccgctgctgttcctcgatggctggcgcatccccaaagacgcttttttccgcgatatgaagccgattttatcgctggcgataggcctggtgatggtgactattctcggtattggcctgtttattcactggctgatcccggctatcaccgtggcggcagggttcgccctcgcggctattctgtcgcctaccgatccggtggcggtatcggcaatgaccgccagctcgccgcttccctcaaggatggcgcatattctcgaaggggagtcgctgttaaacgatgcttcagggctcgtcgcctttaatttcgccatcgccgcggtgctgaccggcagcttctccccgggagacgcggtggtgaaatttttcctgatggccttcgggggcatcctcagtggcctcgtggtggtgtgggtcaccggcaaatgtaataactttctggttcggcgcacccgcgaggagccagccatccagatcctgatcagcctgcttatccctttcgccgcctacctgctggccgaggcgttccatgtctcgggcattcttgccgccgtcgccgccggcattgcgatgcattatgagcagctgtcggggccccggcttccggcgacgcgcatgaaaagcagcgcggtatggtccatgctgcagaccaccctcaacgggatgatctttctgatgctgggcgagcagctgccgcgcatgctcaggacgctgccggcggtagccagccaggccggcgtctcttcgccctggtatctgctgctgtacgccgtggccatcaccctggcgctcggtctgatgcgcttcgcctgggtatggctgtcgatgaagctgacaatttttcgccgcaaacgtcgaggcaaggccatcaccgtccgtccacgattcagtatcctcgccgtcatggcgctggcgggagtgaagggctctgtgaccctcgccggtattctgacgctgccggtggtgctggcagatggttcgccgttcccgggccgtgaactactgatctttctttcgatggcggtgatcctgatgtcgctggtggtggcggctatcggtttgccgtttatgactcgttatcttgccgatgatctaccgcatgacaccggtaaggacgacattggcgccgtgatgaccgaggtggccattaaccgtcttaacgcgctactggacgagccggtgaaggatcccagtgagcaggccctgcgggccgatgccggcaatatgctgctcgaaacctatcagcggcggcttcactataacgacaatgacgaggggcaggatgtcgggctggagctggctaagcgcgccaggctggagaaatatatgcaacgagaggtcattatcgcccagcgtcaggagctgttccggctgcgccgcgcccataacatcagcgatatcactttttatgaggtgctgcgggagatagatctgaaggaagagagtttacgctaa

SEQ ID NO: 245921 - DNA, 705 bp, Klebsiella pneumoniae
atgaatcccgatacctccgccgtcctgaagccccgccgcggccgtccacccaaggttgatcgccagtttgacgatacgcgtcaggcgctgattcgctcaggccttgaagtgctgaccgaaacgggctatctcgcggcgggtattgatgcggtgatcaagaatatcgccgtgccaaaggggtcgttttatcactgctttaaaagcaaagaggcctttggcctcgccgtgcttgccgcctatggcgacttctttgcgcataaattagataaattcctgctgaacgacgccgtgccgccgctggaacggatggcggcctttgtgcgtcatgccggtcagggaatggagaaattccagtttcgccgcggctgcctggtgggcaacctgctgcaggaagccccgttgttacccgagacgtttccccaacggttgatggctatcctgtcggcatgggagtcgcgcgtggcgcgctgcctgcgcgaagcgcaggcagccggggccatcgccagcgacgcctcaccgcaggcgctggcccaggtgttctggatcggctgggaaggcgcggtgatgcgcgccaggctggtccagtctgccgcaccgcttaaccaatactgggatttttttgcgcacagtatgacaacaaaaacacctgcacaggacggcgctagcgccgataacccccttccgacgaggaatactctgtcatga

SEQ ID NO: 245922 - DNA, 978 bp, Klebsiella pneumoniae
atgaaagcattagttctggaccagatcgacaaccgcaccgtcgccaccgtcaaagatatcgacctgcccgctcttgccgaaggcgatgtccgggtcgccatcgactggtcgagtctcaattataaagacgccctggcgatcaccggcaaaggaaaaattatccgtcagtttccgatggtgccgggcattgattttgccggtcaggtgaaagaaagccgcgatccgcgctttgttcccggccaggccgtgatcttcaccggctggggcgtgggcgaaaaccactggggtggcctggccaccgaagcctgcgttaaaggcgactggctggttgctctgccggagacgctcagcgcgcgccaggcaatgatcatcggcaccgccggctttaccgcgatgctatgcgttgatgctctcgttagtgcgggtgtcacccctgatagcggggatatcctggtcaccggcgccagcggcggggtcggcagcaccgccgtggtgttgctgaaagcccttggctaccgggtgacggccgtatcgggccgggaatcgacacacgattaccttcgccagctgggcgccgatacgatcctgccgcgcagcgacttcgcggagacccgtccgctggagaaacagctgtgggcgggcgcggtggataccgttggcggcccggtgttggccaaagtgctggcgcaaacgcaatatcgcggctgcgtcgccgcctgcggtctggccgggggcttcgatctgccgaccaccgtgatgccgtttattctgcgcaatgtgcgtctgcagggggtggattcggtgatggtgccgaccgctgaacgcgacgctgtctggcagcgtctggcccagcttctgccggagagctactaccagcaggcggccactgaaatcacgctggagcaggcgccagcgtatgccgcagatttcctcagcaataatattcatggtcggacgctggtcaatatcggccagtaa

SEQ ID NO: 245923 - DNA, 933 bp, Klebsiella pneumoniae
atggatgtcataagcatcattatggcggcgggcaagtcgtccgttgacgtcgcgctgtatacgctgttgccgatcatggtgatcatgctgatcatcatgaaataccttgaggtccgcggtatcctcgatgtgattgttcgctgggtggccccgctgctgaagcccttcggcttaaccgggatgagcgccttcgccctgatccagattaactttgtcagctttgccgccccgctcgccacgctgtcgattatggataaacgcggcgtctcggaccgacaaatggccgccacgctggccatggtgttcgccatggggcaaggcaacgtcttttatcctcttaccccttttggtctgcactggctggcctcgatcgttatctcggtggtcggcggcctgggcgcggccgccgtcgcctggcacgtcaccgggcggcacttatcggtcgccgagaacccccgcgcggaagcgctgccgaacgccgagcagaacagccagggaattctggccgtgattaacagcgccggctccgacgccatccgcctggcgctcggcgcggtgccaatgctgatcctgtcgttaaccatcgtcgggctgctgcagggcgccggggctatcgacctgctgcagcagctgctgaagccgcttctcagctggctgcatatcccgcagaactttgtgctgccggcgctggtgaagtgcgttgccgggggcaccgcctactttggcgtcatttccgagctgatccagcagggcaacgtcacagttgaccaggtcaacgcctcggcaggtctactgatccagacctttgatcttcccggtatcggcatttttcttggcatcagctcacggtttgtccgcctgttccgcttcgtggctcccgcggcgatcgtcggcatcctgctgcgtaccgttctgcacctgatcctgttttaa

SEQ ID NO: 245924 - DNA, 246 bp, Klebsiella pneumoniae; identical to SEQ ID NO: 136434

SEQ ID NO: 245925 - DNA, 1455 bp, Klebsiella pneumoniae
atgaatatcaaggccgccagtctgaccccggaacaagcgcttgccgagctggaagcgcgctatgaagcctcggtcacggcgttacgcaaagccatcggcgactatatcgaccataatacgctccccgataccgaagcccgcgcggaaggcctttttgtctatccgcagctgtcggtctcctgggacggcgccgatcataaagccctcaaaacgcgcgcctggggacgtttcacccatgccggttgctataccaccaccattacgaatccgaaactgttccgcaactatttgctggaacagctgaccctgctgtatcaggactatggcgcacatatcagcgtcgagctgtcgcagcatgagatcccctatccttacgtgatagatggttccaccctgacactcgaccgctcgatgagcgccggtctgacgcgctatttccctaccaccgagctgtcacaaattggcgatgagaccgcggatggcctgttccatcccaccgagttctatccgctgtcgcactttgacgcccgccgcgtcgatttttcgctggcgcgtctgcgtcactacaccggcacgccggcggaacacttccagccctacgtgctgttcaccaactatacccgctacgtggatgagttcgtcagctggggctgcagccagatcctcgatcccgacagcccctatatcgctctctcctgcgccggcgggatctggatcaccgccgagaccgaagcgccggaacaggccatttccgatctggcgtggaagaagcaccagatgccggcctggcatctgatcacccacgacggcaaagggatcaccctgattaacattggcgtcggcccggctaacgccaaaaccatctgcgatcatctcgcggtactgcggccggacgtctggttaatgatcggccactgcggcggcctgcgcgaaagccaggccatcggcgactatgtgctggcccacgcctatctgcgtgacgatcatgtactggatgcggtgctgccgccagatattccgatccccagcattgccgaagtgcagcgcgccctctacgacgccaccaagcaggtgagcgggatgcccggcgaagaggttaagcagcggctgcgtaccgggacagtggtcaccaccgacgaccgtaactgggagctgcgctattccgcttcggcgctgcgctttaatctcagccgggcggtagctatcgatatggagagcgcgaccatcgccgcacagggctatcgcttccgcgtcccctacggcacgctgctctgcgtctcggacaagccgctgcacggtgaaatcaagctccccggccaggctaaccgcttttacgagggcgctatctccgagcatctgcagataggcatccgggcgattgacctgctgcgcgccgagggagatcacatgcactcgcgtaagctgcgcaccttcaacgagccgccgttccgttaa

SEQ ID NO: 245926 - DNA, 1437 bp, Klebsiella pneumoniae
ttgaacgtcacctccgccgtacgccaggccgtcgaacggacatcctggtttaaaaaacgtcagcgttatcgtgtgctgtactggcgcgaaatcagccctctcgctgtgcccattctgctggaaaatgcctgtgtgctgctgatgggggtgttgagcaccttccttgtcagctggctgggaaaagaggccatggccggggtggggctggccgatagctttaacatggtcatcatgtccttctttgccgccatcgatctgggcaccacggtggtggtggcctttagcctcggcaagcgcgatcggcggcgggcgagggcggccgcgcgccagtcgctggccattatgacgctgttttccattttgctggcgggggtgatccatgcctttggccaggagattattgattttgtcgccggcgatgccaccgcccaggtcaaggacctggcgctgacctatctggaactgacggcgctgagctacccggcagcggcgattgcgctgatcggcagcggggcgctgcgcggcgccggcaccaccaaaatcccgctgctgattaacggcgggatgaacatcctcaatatcttaatcagcagcgtgctcatctacggcatcttctcctggccgggactggggtttgtcggcgccgggcttgggctgaccattgcccgctatattggcgcgatagccacgatctgggtgctgatggtgggcctcaatccggcgctgcggctgtcgctgaagggctacttcaaaccctttaacttcgccattatctgggaggtgatggggatcggcatcccggccagtatcgaatcggtcctcttcaatggcggcaagctgctgacccagatgtttgtcgccgggatgggcaccaacgttatcgccggcaactttatcgccttttcggtggcctcgctaattaacctgccgggcaacgctctcggctccgcctcgacgatcattaccggcaagcggctgggaaaagggcagattggtcaggctgaattccaggcctggcacgtattttggctgtcgacgatcattctgacgctgatcgcctggggcagcgcccccttcgccggctttatcgcctcgttctacacccatgaagaagatgtaaaagaagtggttaaacagctgctgtggctcaacgccctgtttatgccgatctggtcgctgtcgtggactttaccctgcgcttttaaaggcgcccgtgacgtacgctacaccatgtgggtgtcgatgctcggcatgtggggctgccgggtggtggcgggctataccctgggcatcgtgctggggatgggggtgattggcgtctggttagggatggtgctcgactgggcggtgcgcggcgtgctgttttatttccgcatggtgagcggccgctggctgtggaaatatccgcgcgtgaaggcttcatcggaggaaagctga

SEQ ID NO: 245927 - DNA, 948 bp, Klebsiella pneumoniae
atgaaagcagccgtggtttttgacctcgcagaaggcccggtttgtgccgattttatcgacccgcagcccgcgcccggccagacgctcattgacgtccgcgccgccgcgataagccatgtggttaaggcccgggcatccggacgccattacagcttcgacggcaatctgccctttgtgcccggtatcgatggcgtcggcaccacacctcagggtcagcgcgtctacttcgccttccccaccgcccccttcggcagtatggcgcagcgggcgccggtcgccctgcagaattgtctgccgctgccggatgcgctcgatgatatccaggcggcggcgatggccaaccccggtatgtccgcgtgggcatcgctggtgacacgcgcccagcttcaggccggcgaaacggtgctgattaatggcgccaccggcagcgccggtcagttggcggtacagattgcccgctatctgggagcgaaaaaaatcattgcaaccggacggaatgcgcagacgctggcggcgctggacgccgatgagtgtattaagttaaccgctgatgataaaaccttgagcgggcaattttcagcggtcagcgccgcgcagatcgatgtggtcatcgattacctgtggggacatagcgcggaattattattgccggcactggcgaaatatacctctgccggcagtccggtgcgctatgtgcaggtgggttccctggctggcgccgatatcgcgttaaatggcgcagtgctgcgttccgccccgctcctgctgatgggcagcgggatcggtagcctgtcggtatcgcaactgctggcggcgaccggtgaaatgctgcaggcggcggtgccggggaaattgaccatcgccaccaccccgcggccactgcaggagatcgcggcggcctggccgcaggacgacagccagaagcgcacggttttcaccctcggataa

SEQ ID NO: 245928 - DNA, 219 bp, Klebsiella pneumoniae
atgatccgccagctcaaccactcccaccgggccatggcgccctactgccacaagcagcggaaacagcatctgttccagctggatgccggctgcctgcaggatctgctcatcgcgcagcggctggttcattacgctgatgatatccagcagcgcgccgtgaaagtcggtaatgtcgtagtcattatgtgcatcttgcatatattaattttccgcgtatag

SEQ ID NO: 245929 - DNA, 621 bp, Klebsiella pneumoniae
atgagccagtttttttatatccatccggataacccgcaggcgcggttgattaaccaggcggtggagattgtgcgtaagggcggggtaatcgtttatcctaccgactccggctacgcgctgggctgcaaaattgaagacaagggggcgatggagcggatctgccgcattcgtcagctgccggacggccacaactttaccctgatgtgccgcgatctgtccgagctgtcaacctacgcttttgtggataatgtggcgtttcgcctgatgaaaaacaacacgccgggcaactatacctttatccttaaggggaccaaagaggtgccgcgtcggctgctgcaggagaagcgtaaaaccatcggcatgcgcgtcccgtctaaccccatcgctcaggcgttgctcgagaccttaggcgagccgatgctctccacgtcgctgatgctgcccggcagcgactttaccgaatccgacccggaagagatcaaagatcgtctggagaaagtggtggacctcatcattcacggcggtttccttgggcagcagccgaccacggttatcgatctcactgaagacaccccggtggtgctgcgcgaaggcgtcggcgacgtgaggccgtttctctaa

SEQ ID NO: 245930 - DNA, 2352 bp, Klebsiella pneumoniae
atgaacttcaccactacgctgacgccgctggcctgcgcgctgatgctgagtttttccgcccatgccgtcaccgcgcaggcgtttaaaaacgtcatcgaccgcagcggcgcgccgcagtatatgcaggatttcgacgccgatgaccaccagcgcttcaacccctttttcgacctcggggcgtggcacggccacctgctgcccgacggcccggcgaccatgggcggcttccccggcccggcgctgctgaccgaagagtacatcaactttatggccaccaacttcgatcgcctgacggtgtatcagaacggcaaaaaggtcgatttcaccctgcaggcctggagcctgcccggcgcgctgaaacaaacgctgaccgcccccggcgtgaaggtggagatgacgctgcgcttcgccagcgcccacacttcgctactggaaaccaaaatcaccagcaacactccgctgaagctggtatgggatggcgaactgctggaaaaactggccgccaaagagggtaaagcgctatcggacaaaaccattgatgaaaccttcccggactatcagcgccgtctgagcgccacgcccgacggcctgacggtcagctttggcaaggttcgcgccgcctccgacctgatgacctccggcgaatcgcagtatcagatccaccgttcgctggtaaccgagactcgtatcgacggccaccgctttatcagcagcgcggagatccgcggctccaccaccctctacaccacctattcgcacctgctcaccgcggagcaagcgcggcgggaaaaagcgcagatccgcgatattctggcgcgcccggcttactatctcaccgcctccgaacagcgctgggacggctatctgcaaaaagggctcagcaaccccgacgctaccgccgaacagacccgcgtggcggtgaaagccattgagacgctcaacggcaactggcgcgcgccgggcggcgcggtgcattaccacaccgtcaccccatccgtgaccggccgctggttctccggcaaccagacctggccgtgggatacctggaaacaggcctacgccatggcccacttcaacccggatatcgccaaagagaatatccgcgccgtcttctcctggcagattaaagccaatgataaggtgcgcccgcaggatgccggatttgtgcccgatctgatcgcctggaacctgagccccgagcgcggcggcgacggcggcaactggaacgaacgcaacaccaagccaagcctcgcggcctggtcggtgatggaggtgtataacgtcaccaaagataaagcgtggctggaagagatgtatccgaagctggtggcctatcacgactggtggctacgcaaccgcgaccataacggtaacggcgtgccggaatatggcgcgacccgcgataaggcgcacaacaccgccgacggcgccatgctgttcacggtgaaaaaagggcaaaccgagcagacgctttccggccttcgcgcctacgaacaggtgacggccaaaggcgattacgacagcctcgaaattccggcgcaggtagcggcgtcgtgggagtccgggcgcgacgatgcggcggtatttggttttatcgataaagaacagctggataaatacgtcgccaacggcggcaaacgcagcgactggacggtgaaattcgccgaaaaccgcgaccgcaacggcaacctgctggggtattcgctgctccaggaatcggtcgatcaggccagctatatgtacagcgataaccactatctggcgcagatggcgaccattcttggcaaagcggaagaggcaaagcgctatcaggcgctggcggcgaagctggcggattatatcaatacctgcatgttcgacccgcagactcgcttctattacgacattcgtatcgaagaacaaccgctggccaacggctgcgccggtaaaccgatcgtcgagcgcggcaaggggccggaaggctggtcgccgctgtttaacggcgcggcgacgcagcaacatgctgacgatgtggtttcggtgatgctcgacccgaaagagttcaacacctttgtgccgctgggtaccgccgcgctgaccaacccggcctttggcgctgatatttactggcgcggacgggtgtgggtggatcagttctggttcggcctgaagggaatggagcgctacggtcatcgcgatgaggcgctgaagctggcggacgccttcttccagcacgccaaaggcttaaccgccgatggcccgattcaggagaactacaatccgctgaccggcgcccagcagggggcgcccaatttctcgtggagcgcggcgcatttatatatgttgtataacgagtttttccgtaagccgtag

SEQ ID NO: 245931 - DNA, 777 bp, Klebsiella pneumoniae
atgtgtataagagacagtccatatgctgtttggtcaatattacaaggatgtatagaggtttttctctcaaattacaccaattcaaaaactagtttaatatctgttttatcatttccatttcatcctagagcacagttttggtttttatatgcgttgcttttgatttttattttatcagctgtcatatataataaatatttcaccaaaataatacctttactcttagtgttttcttttttttcttatatttatggcgaggatgttatatctatttattatataaattacattgataataatatcgtgttctttttcttaggctgtctggtatataaatacaatgcttatttgaaagatgttttaaatatatattcatttatcatattaacagtggtttttgttttagttgaatatttttatttcgtacgcttagggaatgattattctgagttaaatttcactaccgctgcgattgctatcgttgggatattttggatttctaatttatcagttgtattatctaagtataatgtagcttggctatctcatctaggaaggcaaagtataataatttttcttgttcatatacttgcatctagtggagtgagaatagttctaacgaaattgttccatatagaaaattggtactttaatatcattagtggtacggtggctggtatcatattaccattattgttctatcatttcgctttgcgtctgaaaatgagcttcttttttgtatatccgtacgtaaaaacacccagtaatttgaaataa

SEQ ID NO: 245932 - DNA, 549 bp, Klebsiella pneumoniae
atgctctttgccgttcagctctttggtgacggaaggaatggacttagacggggagaagcccacgaacgtaaagcggccatcgtcgtaagcaaaatcgggaacaatgttgaaactgcctttgcccggatatttggtgtaactccagttgcggggcgtctgcgccgagttcagcgctttctggacgctggcctgttgctgtttctgctcccactcgcgctgtctggccgtcgcctcccggctcgctttgtcccgttcttcgcccggatagcgatagctcacctggaaagcgggttgttgtgccgatttatcatcgatgacgttcagctcgacgttgtacaggcgcttactggtgacaaccagcatattggtatgccagtcccggctgttcggggggatcacgacctgcgttgtgttgccatcttctccgggcgctccctgcgtgagcgcgaccgggcgaacgttgacccggtttgcatccggcgtggcttcccacgcctcatcaaagccaggtttggcgcttatgaccgcctcatcgttatcaaagactag

SEQ ID NO: 245933 - DNA, 171 bp, Klebsiella pneumoniae; identical to SEQ ID NO: 138617

SEQ ID NO: 245934 - DNA, 1311 bp, Klebsiella pneumoniae
atgaaaaacgacctcgaaaagaaggtgatgcgtaaggttaccctgcgcattattcctttcatcatgctgctgtacttcattgccttccttgaccgcgtcaacattggctttgccgccctgaccatgaatcaggatctgggattttcacccaccgtttttggtctgggcgctggcattttcttcctgggttattttctgtttgaggtaccgtcaaacttaattcttcataaagtgggcgcccgcatctggatcgcccgcgtcatgattacctggggattcgtctctggctgcatggcttttgtgcagggcacgacgagcttctacattctgcgttttctgctcggcgtggcggaagccggtttcttcccggggatcattctctatcttagctactggtttcctgccgccaggcgtgcgcaggtcactgccatctttatggccgcagctcccctgtcgacagcactgggatcgccggtttcggccgcactgctggagatgcatggcttccttggctacgccggctggcagtggatgtttgtactggaagctttgccggcgctggtgctcggtgttgtggttctgttcttcctgacggatcgtccggccaaggccaaatggctgactgatcaagagcgtgcctggctggaaaacgccatgcaagacgaggagcgggcacgggcggcaaaacagagccattccagcgcatggcgagggctagcggatatacgcgtcctggcgctggcgctggtctatttcggtacctcagccgggctgtatacgcttggcatctggtccccgcaaatcattcgcagtttcggtgcttcctcgctggagattggtttcctgaacgcctttccggcggtgatcggcgtcatcgccatgatcctctgggcgcgtcattccgatcgaaccaaagagcgcagctggcacgtcattggcgcctgcctgctggcggctgccgggctgatatacgccggtaatgtcagcacattgtttaccgtaatggtcgccttaacgctggtcaccgtggggattagcgcatcaaaaccccctttgtggagcatgccaaccctgttcctcagcggcccggctgcggccgctggcattgccgctatcaactccatcggcaacctcggcggtttcgttggcccgatgatgattggcgtgatccgcgagcaaaccggtagttacagctggggcctgtactttgtcgccggattgctggcgctctcggccctcgtggtcatgattctttctgccagagcgaacaaatcgccgacggcagagcttccacatcctcatactcattaa

SEQ ID NO: 245935 - DNA, 1287 bp, Klebsiella pneumoniae
atgttaaaaaaaatctatcgcaaggaagcgattgagtataaaaagcatcactggaaaggaaaggcactgctgctcgcagggcttccagcatggcttgttgcattactctcttttgcttttcttgcgatcctgatagccaccacagtattttgctcctttacccagagaatcgacgttcagggagaggtcattactctacctcactctgtcaacgtttatgccccgcagcaaggctttgttatctcccaatatgtaaaagtcggcgatattgtgaccaaaggccagccgttatatgagatcgacatttcccggaacaccacaacgggtaatgttagtgcggtacaaatagaggtcattaatgaaaagatcgcaaatgctgaagatatcatttcaaaactgaatcataataaagaagaaacaaccatttctttagagaagcagttaaaaacaatcaatgattcgttaaaagaaactaatcgcatgttggctaacgcccaggctggattaaagaaaatgcatgataatctatccagctatgataagtatttaagtgacggactgattaccaaagaccaatataactatcaacactctttgtattttcaacaacaaagcacttaccagtctctggtgagtcagaaaatgcaactggaatcgcaggtcactcagctcaatagtgataaaattacaaaaatagctgattttgacaatcaaatctcgtcacaagaaaaccagattaatgattataaaaatcaactggttgaatcaaacgcaaacggtaacattattattaaagcaacgactgaaggccgtattgaatcattgaccgtcactaaaggccaaatggttgataaaggcagcagtctagcacagataaaacctaccggtgatatagagtattatcttattttatggttacctaacaatagtataccttatgtaaaacctggggatgaaattaacattcgttatgctgcattcccatcagataaatttggtcaattcccgggaaaaatactttcaatatcttctgttcccacatctcgacaagaaatgtctgagtataccaatgttacgaacggcacaaaccagcaggaactggcgctctataagaccattgtgaaaattgaaaacaaaacctttgaatataatggtaaaacgctttcgctttcaaacggcctcaaggctcaagctgttgtattcctggaagagcgtccgctctatatgtggatgtttacccctgtgtataagataactcaaagcattactgggccgatccatgactaa

SEQ ID NO: 245936 - DNA, 1017 bp, Klebsiella pneumoniae; identical to SEQ ID NO: 219672

SEQ ID NO: 245937 - DNA, 2001 bp, Klebsiella pneumoniae
gtgaactaccagttcagcggctcgaacgacatgcaggccaatgatgaatactacagcttgaacctgcagtctggcctcaacgttggcccatggcgtatccgcaacctcagcacatggaataaaaacaatagcgatgccggggactgggactccgcctatctctatatgcagcgaagtattcgctcgatcaacagtaacctggtgatgggcgaaagttcatcgctctcaaccatcttcgacagcgtgccgtttaccggtattcagctggccaccgataccacgatgttgccggaaagtatgcgcggctatgcgccgattattcgcggtatcgccaaaaccaacgcccgcgtcgtcattaaacagaacggctaccaggtttaccagacctacgtggcacccggggcatttgaaatcaccgatatgtacccgagcggcggtagcggcgacctttacgtcagcgtggaagagtccgacggatccaagcaagaatttgttgtgccgttcgccaccctaccggtcatggtgcgtgaaaatcaactggagtatgagattacttccggtaaatatcgtccttacgatggtggagtcgatgaaacgccatttactcaggccaccgcgacctatggcgtctccagcagcctgacgctttatggcggtatgcaggcggcctcgcgctaccaggcgctgtcgacgggcctcggctataacctgggcgagcttggcgccgcctcggcagacgtcacccaggcatggtcgaaaaagaaagacgatgaaaagacctcaggacagtcctggcgggtccgttatggtaaaaacattgtcgaaactggcaccaatgtcaccatcgcgggctaccgctattccacccgcggctttaataccctctcggaggtgctggatagctactctaatgacggtaattatacctctcgctcactgcgcaatcgcaccaacctgacggttaaccaaagcctgggtaaaggcctcggtagcctgtcgataagcgggttgattgaagattactgggacgataagcgaaccaacaagtcaattagcgtaggttacaacggcggtttccgtaatgtgaactactatctgggctacagctataaccgctacacctggagcggaaataactcaggtaaggatgcccaggacgatcagcgcatcaccctgacggtgacgctaccgctgagcaactggctgccgggtacctataccagctatcaattaaccaacagcaatccgggatctaccgatcagtcggtctccattggtggcgtcgggctagataacgacagcctggaatggagcctgcagcaagggtacagcaaccgggaatattacagcggcgatatgcgtgggacctataacggtgcccgcggcagccttaatgccggctatagctatgacaataacagccaacgtattgactacggcgccaacggcagcatcgtcgctcatgccgatggcattacacttggccaggacatcactgacgccgccgtgctggttaaagcgccgggcctggataacgtcaagttgaccaacgataacaccatctccaccgactatcgcggttacgctatcgtcccgtacgttacaccttaccgtcgtaccgacatcacccttgacagcacttcactgggtgaagatatggagcttccagaaactacgcaaagcgtcgtgccgacccgtggtgccatcgtgcgtgctaattatgacggcaatatcggccagagggcctttgtgcatctgaaaaccgccagcggtcaggacgtgccttatggcgcaatggttctgctcgccggagatagtaaatcgcagccaagtatcgtcagcgacgccgggatggtctatatgtccggcctgcagcagacggggatccttaacgtccagtggggcaaaagcgccgcgcagcagtgcaatgcttcctttactttaccagtcagggaaggcaaagcgtctggcatcagtcaaatcgaaacggtttgtcgctaa

SEQ ID NO: 245938 - DNA, 1302 bp, Klebsiella pneumoniae
atggaaagtctgaacgccctgattcagggcatggggctgatgcacctcggcgccggccaggccatcatgctgctggtcagcctgctgctgctctggctggcgattgcgaagaagttcgagccgttactgctgctgccgattggcttcggcggcctgctctccaatatcccggaggccgggctggcgctcaccgccctggagagcctgctggctcaccacgacccggcgcagctggcggtgattgccgcgaagctccactgcgcgccggacgtccacgccattaaggcggcgctggccctggccctgccgtcggtacaggggcagatggagagcctcgcggtggacatgagctactccgccggggtgctggccatcttctataaggtggcgattggctcgggcatcgcgccgctggtcatctttatgggcgtcggggcgatgaccgatttcggcccgctgctggctaacccgcgcaccctgctgctgggggcggcggcgcagttcgggatcttcgccaccgtgctcggggcgctgacgctgaactacttcggcatcatcagcttcaccctgccgcaggcggcggccatcggcatcatcggcggcgccgacggcccgacggcgatttacctgtcgggcaagctggcgccggagctgctgggggccatcgcggtggcggcctactcctatatggcgctggtgccgctgatccagccgccgatcatgaaggcgctgaccacggataaggagcggaagatccgcatggtgcagctgcgcacggtgagtaagcgggagaagatcctcttcccggcggtgctgttgctgctggtggcgctcctgctgccggacgccgcgccgctgcttgggatgttctgcttcggcaacctgatgcgcgagagcggcgtggtggagcggctgagcgatacggtgcagaacgcgctgatcaacatcgtcaccatcttcctcgggctgtcggtgggggccaagctggtggcggacaagttcctgcagccgcagacgctggggatcctggtgctgggggtgatcgccttctgcgtggggaccgccgccggggtgctgatggcgaagctgatgaacgtgttcagccggcacaaaatcaacccgctaatcggctcggcgggggtgtcggcggtgccgatggcggcgcgggtgtcgaacaaggtgggtctggaagcggacgggcagaacttcctgctgatgcacgccatgggcccgaacgtggcgggggtgatcggctcggcgatcgccgccggggtgatgctcaagtacgtgctggcgatgtaa

SEQ ID NO: 245939 - DNA, 1770 bp, Klebsiella pneumoniae
atgaccgttgccattaccgatgtcgtcctgcgcgacgcccaccagtccctgttcgccacccgtctgcgtctcgacgatatgctgcccgttgccgctcagctggacgacgtcggctaccgctcccttgagtgctggggcggcgccacctttgatgcctgcatccgctttctcggcgaggacccgtgggtccgcctgcgcgagctgaaaaagacgatgcccaagaccccgctgcagatgctgctccgcggccagaacctgctcggctaccgccactacgccgacgacgtggtggagcgcttcgtggagcgcgccgtcaaaaacggcatggacgtcttccgcgtcttcgatgccatgaacgacccgcgcaacatgcaggccgccctgcaggcggtccgccgccacggcgcccacgcccagggtacgctttcgtacaccaccagcccggcccacaccctgcagacctggctcgacctcaccgaacagctgctggagaccggcgttgactccgtcgccatcaaggacatgtccggcatcctcaccccgcatgccgcctttgagctggtcagtgaaatcaagaagcgctatgacgtcaccctgcacctgcactgccacgccaccaccgggatggcggagatggccctgctgaaggccattgaagccggggtcgacggcgtcgataccgccatctcctcgatgagcgccacctatggccacccggccaccgaggcgctggtcgccaccctcgctggcacgccctacgacaccggcctcaatatccacaggctggagagcatcgcggcctacttccgcgaggtgcgtaagaagtaccacgccttcgaaggccagctgaagggcaccgacagccgtatcctcgtcgcccaggtgccgggcgggatgctcaccaacctcgaaagccagctgaagcagcagagcgccgcccaccgtctggatgaagtgctggcggaaatcccccgcgtgcgcgaggacctcggcttcatcccgctggtgaccccgacctcgcagattgtcggcacccaggcggtgctcaacgtgctgggcggcgagcgctacaaaaccatcgcgaaggagaccgccggtatcctgaagggcgagtacggccgcaccccggccccggtgaacgccgccctgcaggcgcgggtgctcgacggcgccgacccggtgacctgccgcccggccgacctgctgaagccggagctggcgcagctggaagccgacgtcagacgccaggcgcaggagaagggcatcacgcttgccgaaaacgccatcgacgacgtgctcaccgtggcgctgttcccgcaaatcggcctgaagttcctcgaaaaccgccacaacccggcggcctttgagccggtaccgcaggcggaagccgcgcagccagtggcaaaagcagaaaaacctgccgcctccggcgtctacaccgtggaggtggaaggcaaagcctttgtggtcaaggtcagcgacggcggcgacgtcagccagctgacggcggccaccccgtcttccgcaccggttcaggctgccgccccggccggcgccggcaccccggtgaccgccccgctggcgggcaccatctggaaggtgctggccagcgaaggccagacggtggccgcaggcgaggtgctgctgattctggaagccatgaagatggaaaccgaaatccgcgccgcgcaggccgggaccgtgcgcggtatcgcggtgaaagccggcgacgcggtggcggtcggcgacaccctgatgactctggcgtaa

SEQ ID NO: 245940 - DNA, 210 bp, Klebsiella pneumoniae
atgtttctcggcatgggctttgtgctggtgttcctgctgctgctcatctttgccatccggggaatgtccctcgccgtcaaccgcctgtttcccgagccgcccgccgcccccgcagcggcgccggccgccgtcgcgcccgccgacgatttcgcccgcctgaagccggcgattgtcgccgccattcaccaccatcgccgtattcacccttaa

SEQ ID NO: 245941 - DNA, 864 bp, Klebsiella pneumoniae; identical to SEQ ID NO: 217112

SEQ ID NO: 245942 - DNA, 447 bp, Klebsiella pneumoniae; identical to SEQ ID NO: 223051

SEQ ID NO: 245943 - DNA, 765 bp, Klebsiella pneumoniae
atgacgggattccgttgggagatcatcgaggagtacggcccgctgtttgtggacggcgccctgatgacgattaaatgtaccattatctgcgtgatcctcgggacgctgtgggggttaactctcggtctcgggcggatggcgaaggccgagcacgggccgtggaaatatattctccgctacctggtgcagtttccggtgcgcttttacgtcagcgccttccgcggcacgccgctgttcgtgcagattatggtggtgcactttgcgctggtgccgctgtttatcaatccgcgcgacggcctgctggtgaccagcggcctgatgagcgccgactttgcccgcgaactgcgcgccagctacggggcgttcctctcctgcatcgtggcgatcacccttaacgccggagcctatgtgtcggagattttccgcgccggcatccagtcgatcgacaaagggcagatggaggcctcccgcgcgctgggcatgccgtggtggaaaaccatgcgcaaggtgatcctgccgcaggcgtttcgccgtattctgccgccgctgggcaataacgccatcgccattgtcaaagactcgtcgctggcctcggcgatcggcctggccgatctggcctatgccgcgcgcaccgtctccggcgcctacgccacctactgggaaccctacctgaccatctctctggtctactgggtgatcaccttcctgctggcgcagctggttaaccgtctggaaaagaggtttggcaaaagtgattcacattaa

SEQ ID NO: 245944 - DNA, 471 bp, Klebsiella pneumoniae
atggtcgatttctccgcgccgtacttcccggccgaacagtctatcgtcgtcgctcaggactcgcaggtggattcgctggcggccctgaaaaacgagaaggtcggggtggtgaactccagcaccggcgatatcgtggtttctgaggtgctgggtaaaaacagcaccgcgatcaagcgcttcgacaataccccgctgatgctccaggagctgtttgaggacggcgtcagcgccgcggttggcgacgtcggggtggtgaagtactacatcaaacagcacccggagaagcagttcaagctggtgccggatgccaaatttgagcgtcagtatttcggtattgcggtggcgaaaggcaacagtgaactgctgggcaaaatcaacgccgggctgcaaaagatcgttgctgacgggacttacgccaaaatctataaaacctggttcgacgacaacgtgccgacgctgccagcgcaataa

SEQ ID NO: 245945 - DNA, 369 bp, Klebsiella pneumoniae; identical to SEQ ID NO: 213474

SEQ ID NO: 245946 - DNA, 1005 bp, Klebsiella pneumoniae
atgctcaaacggatgtatgatcatgctgcattgctgcaagccgatgtggttatctgccgatgccagtctttagatctacaaacccattcatatgcaccaatgccatggtctgtgcgcgtagatttactcccccaaaaagaactattttcatcagatgaaattactcataatttctttgatgcatttatctggtggccctgggataagcttttccgtcgccaggctatactggatactgggttacaattccaggatttaagaacgactaatgatttattttttgttagcgcttttatgctacttaccaaaagaatggcgttcctggatgagatcttgatttctcattccattaaccgcagtggttcattatcggtgaccagagagaaatcatggcattgtgctcttgatgcgttacgtgccctctattcctttattgactcaaagcacttgttgccttcacgtggtagagactttaataattatgcagtgacttttcttgagtggaatttaaatacgatttctggtccggcgtttgattctttattcactgcttcacgcgaattcatcgcctcattggatattgatgaaagcgatttttatgatgattttatcaaagcggcacactatcgcctgattcggttaacgccggaagagtatcttttctcgttaaaagatcgggtattacatgagcttgaatcctctaatttatcttcagagaagttgcaagccagtattgcttctcaggatcaagttcttaaagccagggaagaagaaattgatgagctaagagcgtccgttgcacagaaaaaagaacgtattgataggttggtccagcgaaatgcatatttagagactgagtatcagaaacagcaagatcaattaactaaactacaaaatgaattaaataacgctgctcaacgttattcagcccttatttcatcattgtcatggaaagttacaagacctttaaggttaatcaaagcgttaatcacgaggaaaatgtaa

SEQ ID NO: 245947 - DNA, 378 bp, Klebsiella pneumoniae
gtgatgctcaccaatgccctggcgccgatgcgggttatcgagcgcctgcagcaggccgttaaaccgcaggggctgctcggcgtgatgtcctctggccaggggagcctgaccaataaccttaccggccagcgggaactctaccgcgggagtaaagctgcgctgaatatgtttatgcgcagctttgccgctcgcccctcctcggcctcccatccgctggtggtgatggccccgggatggatccgcaccgagctcggcggggcagatgccccgctgaccatcgaagagacgatcccacgcctggtgaacgtcctgctcgacaaacggcaacgtccgggactggagtatctggattaccagggccgtaccgtgccctggtaa

SEQ ID NO: 245948 - DNA, 294 bp, Klebsiella pneumoniae
atgaaatccgatcagcacaacactatcctcatcgtcggcgcctcgcgcggccttggccatgctatggcggcgacgttcctgcagcacggctgggaggtcatcggcaccgtgcgcgatttatcatcccacacgccgctccacgacctggccaagacgcatcccctgcggctacgcctggcgacgctcgacattcgcgatgaagcccagctggccgcgctgcaggcgacgcttcccccggcaagcctcgatatgctgtttgtcaacgccggtaccaccaatcgtgacccatcgtag

SEQ ID NO: 245949 - DNA, 231 bp, Klebsiella pneumoniae
atgaatacgggtttaaggcaggttctgcgatatgcaggcgtcccggttgacgccgctgaaccggtgcgccggcaattcggtagccgcctgattttaatcgtgacggttgctctccttccgctgttgattgttgacgtccctcagtggatatttgtgctctcccagattatctggggaagcggtatgtatattggtatctccgtggccagtgataaaccagatcgccggtaa

SEQ ID NO: 245950 - DNA, 231 bp, Klebsiella pneumoniae; identical to SEQ ID NO: 139462

SEQ ID NO: 245951 - DNA, 264 bp, Klebsiella pneumoniae
atggtggtcaataccatcgatttcgggatgaacgtcgcggaagccaccaacgcgccgcgtttccaccatcaatggctgccggatgagctgcgggtggagaaaggctttagcccggataccctcaagctgctggaggcgaaggggcagaaagtggcgctgaaagaggcgatgggcagtacccagagcatcatggtagggccggacggcatgctgtatggcgcctccgatccgcgttcgccggatgatttaacggcggggtattga

SEQ ID NO: 245952 - DNA, 339 bp, Klebsiella pneumoniae
gtgaagcaactggtggcctgtatcgatgagcaagtcgtcggccatttaagcattgccgtcgtccaacgtccccgccgtagccacgtcgccgattttggtgtcagcgtggattcgcgctggcacaaccgcggcgtcgccagcgcgctgatgcgtaccatgattgatatgtgcgacaactggctgcgcgtcgagcgtattgagctgacggtgttcgccgataatgccccggcgattgcggtgtataagaagtacggctttgagatcgaaggcaccggcaggcgttacgcgctgcgcaacggtgagtatgtggatgcgtattatatggcgagaataaagtag

SEQ ID NO: 245953 - DNA, 159 bp, Klebsiella pneumoniae
gtggtggagaagatcgattttgccgatgtctccgcgctgtatgaagcgctgcagacccgcttcgggctgggcgtggacgatcctaaacatggctttagtgaagcggcgctggcggcggtaatggcggcgttcgatacccatccggaagccgggaaataa

SEQ ID NO: 245954 - DNA, 201 bp, Klebsiella pneumoniae
gtggactgggcgcaggcggtggtcaccttccacggcggcgcctcagcgcatctggacggcgtggcgtggatttaccgcgtccacctggtgctggggatgactatctttctgatcttccccttcacccgtctggttcacgtctggagtgcgccggtggagtattttacccggcgttaccaggtggtacgctcccgccgctga

SEQ ID NO: 245955 - DNA, 147 bp, Klebsiella pneumoniae
atggctcttcaaactaatactggcacttcgtcaacgtcattaacttttggtgacgccaaaaaaatggcctcagaatgtaaggataaagaagagtttaaagcagtacgtgaaaaacaacttaatgcactgaacgatatgggcaaatga

SEQ ID NO: 245956 - DNA, 240 bp, Klebsiella pneumoniae
atgtaccgcctgaagatactcctgctcctggtaatacccgtcctggttactgtctatcaattccagcagccgtttatagttatacttgttcagcgcgtgagtggtgcgcgtttcatcctgtgccgctttatacaactgctccagaatacccttcaccacgttattcggttgttttatcccatcaatcaggtcaaaactctccggagccttattcagcgtgacaaatccgagctcacctaa

SEQ ID NO: 245957 - DNA, 198 bp, Klebsiella pneumoniae
gtgctgtgggccctcatggtgttgctgatgaatatgcataacgtgagtgaatcggcggccgggctggcgattgcgctgctgacgctgatagtgtgctcatctgccggagaacgtgtgaaacgcttctggccgcggcatttctttgtgatgttctatgccgtgcacctggcggtactgggtattgtcatctctatgtaa

SEQ ID NO: 245958 - DNA, 2877 bp, Klebsiella pneumoniae
atggcgactaccgacacacagcaaacggcacagttcgcggcagaggcagccgtgagtgccgcagaggcaaagcagtacctgatcgaggtccagcagggctatcaggatattagcgccaccgctcaggaagcgattaatgcagccacagcggcagaggcggcgaagagcgccgcagaaactgctgagcaaaattcatctgtttcagccgttgcctcatccgaatcggcaacggcagccgcaggttcagctgcacaggccgaagagtacaagaatgatgcctctgaatatgcactgaataagttcacgttctataaaacaccgagcgatccggacggtacaattgcaggcctcgctgccactacaaacggtcagtcattccgcgtagcggaagggccggaagcgacagcagcattcaaaacctacgagaaccaggatggcgtagctgtgttacaggcttctcagcctggcacagccgctgtaaccgggacaatccgtgaatttccgacgctggctgcggcgcaggctgacgcagacgctggaaatatccccatcggatcaaccgcgtattatcgaagcgctgacgacgcaactcttgcgattgaggttattaacacctcaggaacgctgcagcctaccggacgaaaaatgccatccgcaatgccaatgggttaccagtctgctacagctgtgagtagcggtgcggctaataccattgctatcactatccccggattattagtggatggcagtttgatttatttcatgtcccctattttaaacaccggggcagttaatgtgaccgttactgatgctaagggtaacagcgtcaccaggactgtgctgcgacgggctaatgccgccctgagtggtggggaactgattaattccaatccggtactgatggtctttcgcgccgcaccgaccgataatttcatgcttgtggcatcaggccccactgcgtcagaaattgcatctaatctcgacgcgtataaggcgaccaacgacgccttgactgccacgctgaaaaatctggcccccttgcctgtgacggttagcgcagtggccgatgatgtctatacggcaacgtcagctattaccagcggagagctacagaacgggcgtctgttcctgtttactccgccatcagcgaacacttcccgctcgcctaagctcaaactcaatgcgtggggtgcctataacattacccgaattgacggcgggcaggttgctgccggagacctggcatcaggccgcgcacatctgctgcactggcacgcaggcgcaaatcagtttcgagtaatgacgtatgccgatgagcgcaccaaaatttacggcacggttcttcgcgcaaccatgaccagcgatgccagtacgccgaatgacctggcctgtaaggtggacggttatatcgacaatggtacgctggtagtattggaaccaccagcaacgaacactggcgcagtggctgttactgttgttgacaggtacggcaatcagattgtgcgcagtgtgtttaaaggcgcaaacgttgccctcgctggcggtgaaatcaaatacgcagagccagtgctattgatgtatcgcggctccccgcaaaacaacttcaaaatcatatcgtccggcgatttgtccactcctgtcgcaaaactccaggcggatgtggaggctctcaaatcctcctttaccgacccatatgtgaagctggcgaaaaaacttatcggcgatggtacgaccgcaaataccggaccctttggctcgatatcgttcacagccggggtaaggaccacagtgaaaaaacggttggtatttacctcaatcggctcgtcagtcggtgttggggcgggttccaccggtggcggtgttgcaggtgcgccattcgcgccgaacacgctgttcgtcgaggccatgaaagcgcaattagctgggtacgggaattttgagtttatcgatgataaccaatgcattcccactcaggcgctccagcagttttccgcgcaacttcagaactcgccatacttcaccagcacaaacgagaatgactggcccgattttgtactcattattggcggcatgaatgacgcgcccgttgggaactttaacaacggactaacgttccctgcgcaacaaggaaaactcgaagctctgatagatgagtgtaaagccaaaggtgctgtggtgattgttgctaccagcccgcaccacaacccactaagcccgtctgttacggctatggacttaggcagcctgaacgtttcgtggcctgtcaggacgttcaacgttgacacaaactatacctttgatgcggcagcgcgaaccatcaaaggtggggcattctcctacgggacagacaacgccgctaccagctggggcggccagattctccgggtagggcatacgctccgtatattgagtggcgacaacgctggtgattacaccatcgaagccatttctgcggacaggaataccatcactgtggccgaatctttcccggcttcgggccttatgaaaacgaccatccgccatatcgggcttaacagcctgaaggaagagatacttgagccacctccgtcacggtcctttatcgagcgcgactggtccgggaatggcattaaaacagtcggcgctgcgcggttcggcatggtcaacagcatgttccggtctgtggcaagggataaagcagtcttcctgatggaatgtgaaataccgtggttccgggatggcgttgaagtgcatggctggaatgccttgttcgacggaacgaactacaaccatccgaatgacctcggatataccgtgagctataaggcaggcgcggataaggcggcattcgacctgtgcagtctgatttatggcgaaaaatactatttaccgttgtga

SEQ ID NO: 245959 - DNA, 288 bp, Klebsiella pneumoniae
atggcctttaaattatcagcagtaaaaactgtccagatttattatctcggaggatatctctgtgaaaaagaaatcaacattgacctgatttatgccatcgaaagcgtcagacaggacgaagctggtatggtcaaggcttctatgtccgtgcgatacgatgaccaggcaaaaatcatggttggtgattaccccgttactctggacgctacatcatcaaaatcctgggccgaacaagctgaacagcaactcatgcaagctgaagagtttgctggggctgttgtcctgtaa

SEQ ID NO: 245960 - DNA, 1767 bp, Klebsiella pneumoniae
atggcttttgtcacagatataaggatcgaggataatgctgctgctgcgccagcaacgtctcaagttactgcccagcgcttaggtgccactttaagggggcgataccaggagtatattcataagcgagagtgcgaagttggacagcatgactataatgtcaaaatggctagtagggcgcttgcggcattcactatgtatcaacttggtggtgttgatgacaagtatgcaggagaggctgtttgtgatagtagccatgatggtggtattgatggcattgcattaaaccataatgaaaaaattgtagtagttgttcaatcaaaatttaaccaagcaggaaatggcacttggtcaaaagctgattttatgtgcttcaaagatgcttgcgagaaattacaaagcgaaagatatgagctttttgacactattttacaaagtaaaagtggggaaattaatgctgcactaggaagctttggctataaattcatttttgctatggctcatacaggtaaaaaaggagctgctgcagagattttagatgacatgaaagaatggcagcatcagttaaatgctgcagcttttactccaccagacgaacctaaagaaaactgggattttcaagtgcatttaatttcgtctgaagacatgatggcatggttacaaaatggtacgagaagtcaaatagatttaaacgcaactgaaattgaacgttttggttttttgaatgaacctcatcaagcattctatggggctgttagtggtgaccaaatagctgattggtgggagctttatgggaccagattatttactaaaaatatcaggaatatgctaggtaaaactgaggtaaatgaagaaattaagaaatctgccattgaaaatcctgacatgttttggtattacaataatggcataactgtcttagtaaatgaagcaatacctcatcgaagaaatgctgcaccaggtatcgatcgaggtgtttttgattttaaagatgtcagtataattaatggagcacaaactgtaagcagtataggtgcatgtaaagaagctttgggtgagaatatttatcgtctcaaagtacctgctcgttttatcgtacttaatgaagatcaagataatttgcaagcgaatgcaataactaaggcaaataacttccaaaatagagtgcttggtcgggattttgcctcacaacaggtggagcagcacagattatccagggaattagttttagagggatatcagtatcagattttgcgtaccgatgaagattattcgcaaactaatagcaaagttatagacttggatgaagccttaaatgctctggcatgtttgagtaaaagtaatacactagtctctacgttaaaatcaaatcgcggcagattttttgaaaattttgaagggacattgtatcgttctattttcaatccaaccttaagtggtcttaagcttataaatacagttctgcaatttagaactatagataaaatattaggtcaagctctacaatcaattgacaaaacgcttaatagtcgaaaatatcttatcgttactcacggtaatagatattttgcgtcagttttattaaatcaggttcctggattaaaaaaagcgacggagttacttactcctgacgaaaatgatctatctttaaaattacaagatctcattcagaaggtggaggcatatattgaagaaaattaccaaaatgcatatcctgcaagattttttgctaatccatcgaagatccaagagttatatgacaatatttaa

SEQ ID NO: 245961 - DNA, 192 bp, Klebsiella pneumoniae
atggcaaatgagttgtcagatattcgaatcaggattgaggatgaggtttatagtcacaggattgattttccgaaactttcaacgaaaagtattgatgctaaatatctatgtaataaaagcattgaagctaaaatcatcacatataccaatgagtcaaatgggaaaaaggaggtggtaaaaaatgaacagtga

SEQ ID NO: 245962 - DNA, 381 bp, Klebsiella pneumoniae
atgaaaaaacctgaccaacaatcaagatccggatggggtggaaagcgtgccggcgccggggcaccctacggaaacacgaacgcggttaagcacggcgaacgcagccgtcgtgcattcttcccgcttgaaggcgctgacgaattttctccgttgctaaaaaaccggatacgcaacctgatgctggctgaacatctcggcttgctcatacaaagcgacccggagtacggaacagaggcatggcgggaaatgacacttctctacgggatgatgggtctgcataccgaccgcatcatgagactggagctgatgaaagcgaaggctggtcgggcctatgcgaaacgggagctgcaaaggattaaaaagcgtctacccgccagatga

SEQ ID NO: 245963 - DNA, 669 bp, Klebsiella pneumoniae
atggccacagcaagaccaattgaagatcgcgaggtgtatgactccatcctgaagggggcgaaacaatcaattcgtgtgtcaatgccgggggttattaagtcttttgacccggaaaccgttacatgcgttgttgaagtctcgatatatatccctaagccagagtcagcggaaggcaaatccattgatcggctggcgcaggacaatgttttctacccgcttattttagatgcgccggttatttttccccgcggtggtggctgtacgctgacttttcccgttagtgccggcgatgagtgccttgtgatattcgccgatcgctgtatcgatttctggtggcagaatggcggagtgcaaaatggctcaagggggagaatgcacgattactctgacgcgtttgttatccccggcccgcagtctcaggcgaagaaaatcagcggcatcagcaccacgtccgcgcaactgcgtaccgacgatggctcgtcattcattgagctggcaccgggcggagcggtaaacatcaccagcccgcagatcacctttaacggccccctgcaggttaatggcacgatcacgtctaccggcgaccagacagcagcaggtatcagccagacgcgccatacacacagtggtgtcgagtctggtggcagcaataccggcgcaccgcagtaa

SEQ ID NO: 245964 - DNA, 351 bp, Klebsiella pneumoniae
atgaaaaaagcaattctcattattggcatggttgcttcaatggcgtgcagcgcgaaagcgcccttaacgcatcggtatgattgcggagcctttcggtttgagataatcgaaaactccatgtcgaagataaacggcgagtatgtaacttcacaaaaaatagcgtcgctgggggagcgtggagccaaaatagatatgaccctcacatctgctaaagacggtaatttctacggcttcgaatatgttcatcctgacggcagcaataagcgttggctaaatgttgagttaatccgcagtagcatggatcagccgcggattattggtacgtttatgtgcaaacgtgttgagagttga

SEQ ID NO: 245965 - DNA, 1083 bp, Klebsiella pneumoniae
atgccaagaaactggaaccgacattttgaactacagctcatcgacgataacggcgagggtatcagccttagcgactttaaagttacctttagcgtagagcgaaacgataaccgatggccagctatggcgctggtcaaaatctataaccttgcccccgaaacccagaaccgtatcatgcgccgtgaatacagcaagataaccctgatagcgggttatgacgggctggatagtgcttcctctgataccgtaagcgccagcgaggtagggaaggtgcgctacgtaacaaatgacaccataaatagccctgatggctcaaattacggtgtcattttcagcggtgatattgctttcactgtggaaggcaaagacaacattaccgatcggtacgtccgtatacaggcatttgacggcgacaaggcctttatggaagcgcagatcagcacctcgctggccgccggctatacgctgagcgatgagtacaatttgctcatgaagcaccttgaaccgttcggtatccgtaagggggttgagccggttttccctggtacagtctatccgcgagctgcgtcataccacggccttgtgaacaactatctttcccgactggctgatgaccttcgtgcgacatggcaattcagctttggaaaggttgacttcattcagcaggatgtggcgaaacaccgtgcaatcgtcctgaacgctgataccgggctggtgggcatgccgcagcagaccattggcggaggggtgaatgttacgtgtcttattaattccttcattcagttacacgggcttattcagttggatcaggcgtcagtgtatcgtgcacagttgagcaatgagcaggttttacaggctggtggtattgcgccggaacaggaaattaacggcaaccttgtcacaagtggtctggcgcagagagagaatccggcgagtgttgcgacagacggtgtttatatcgtccgctacctctcatatcgaggcgatacgcgcgggcaggactggtacatggatttagcttgcgaagcccgaggaaatgctgacgttccctcatcgtcttacttactcaaacaggattcttaa

SEQ ID NO: 245966 - DNA, 306 bp, Klebsiella pneumoniae
atgtccgtatcggaaattccgttagcgcccgatagtcagagttttaatatcaccctagctggcgttgattatcaaatgcgcgtggtctggcgcggggtatgttggttcctcgacctgatggacagtaccggtacgctgatgattggcggtattccgctgatcaccggcactaatctgctggcgcagtaccattatctcggcctcgggttctcgctttatgtggtctgtgatgacccggccagcgaaaacccaacgcagtttgatcttggcattaaaagccacctgtacgcgaaaactgaggattaa

SEQ ID NO: 245967 - DNA, 588 bp, Klebsiella pneumoniae
atggatattctttcaacgctgtttcagcaaaatagccgcagaatcgggttaatggtgccaagcgttgttgtttctgaaaaacacactgacatgctggagattaccgagcatcccgttgaacgccccacatctgctggggctggttttattgctgatcatgcgtatcgccgaccctctgaagtggtaatggaaattggctttgctggtggtggttcactgctggatttctacgacacccgaaatattggactgtcgacgccgctcaacagcatgggcccgaaagaggtttatgcggagctgctgaatatgcagcaaggtaagcagttgctcgacgtcaccacgggcaagcggttgtacaaaaatatgctgatccgctctctggaggttaccactgaccgaactactgaaaatgtattatcggccacagtgacacttcgcgaagtcattatcactcagacaaaaagcatcaaggtggctgataaagccgatatgaaatatggcgtaaacacctcagccgtaattaacaccggaactaaaacgccagtaccgaaaaatgagtccattctttccagcgtgtttggaggttaa

SEQ ID NO: 245968 - DNA, 696 bp, Klebsiella pneumoniae
atgtcacaattaagattgaagtggatgagattgaaaatcagaaccagcccagaggcggtttttgattttatcaaaaacaccccttactctgatgctattggtgctggttttactaagtatgaaaccattcataatggtatgactgcaactttcaataaaaaaacagtcattttagaaccagtttccgatccgttcggtgaggtgctagagttcgaaagagttgtgtttgaccagattgctttttctatccaaaccatcagcaataagatatgtttattaaccttttacaacccgcctaaaacagttaaaccttttatcgattttttgtcccaggccaaagggataaatgttgcttacggcaacttgactgtagaccttaaagccttcatgaaggtcattcgagaagtctttgggattaaagtcttcgggatttctaaagtgaaggtatcaaatcttcctgtcactgaaaaaactagggcatgtttggagttgaattctagtggcgatgccttgcaagatttgaagggattcgttggggacaacgattttaaactcgacaaaataaaggtgggcggtttttatcttaattctaagcttagttttgaattaacaagtggtgcttccgccgtgattccggaagagcatgttttagtttttaatgatgccatttcaagtatggaactttctaagtattag

SEQ ID NO: 245969 - DNA, 234 bp, Klebsiella pneumoniae
gtgctccctgacttccgaaacctgtttatgtactcgcccaacggcaaaaaggatggtatccagatcatcccgctgtcagaagtggcggaaaaggatgagttcctcaatatcaaaaatgtgagcttggatgtcatgatggctgctcactgcgttccgcctcagatgatgaggatcacccccaacaataccggcgggttcggtgatgtggaaaaggccaaccgtgtattcgtgtaa

SEQ ID NO: 245970 - DNA, 318 bp, Klebsiella pneumoniae
atgagcctgtataacgatttagtccgccacgagttcggcaaaggcgctaccgatgatgagctggaaagcatgcagagccgcgcagaagaggccgtgagtgatttggtgctgggcattactgccattggcaacctgatgttctgggctacggacaatgaaaactacgccgaggaaatcgcaaggggcgacatgcgcaaaataggcgcaatgctgggcacggttggagaggtagtgctggcgctgagcgattccgcggcgaatgcgggcttttctcgctcgaactgcgggaagggatcagaagcgagggcgggcaaatga

SEQ ID NO: 245971 - DNA, 315 bp, Klebsiella pneumoniae
atgtcttcagcaaacaagaatacaaagtcgcagcttttcacagtcagggttccgcacgaggtggtatccaacatggaatcgttaaagcatgatggtgaatcctctgccgggtttatcgtctccgcgatgcagggagaaatcgcccgcaggcagactgaaggaaacgaggaagccttactgctatcctccctcgatgcgctgacgcgtgttgaagaaatcggcacgagagctggtgaggaaatccagcagatcatcagcgttgcgcgtgacgaactacagcgccggcagcgcaagaagcccaaagaatcggaatga

SEQ ID NO: 245972 - DNA, 138 bp, Klebsiella pneumoniae
atgaaaatctgtgattttgggtatacctccaatcattttgggtacctttcactgtgtacccagccggataacagtaaggttttacaggtgtcggcacatgccaaaactcacagacatgcagatccgcgcgtggattaa

SEQ ID NO: 245973 - DNA, 963 bp, Klebsiella pneumoniae
atgacaaatgaaagtagcaccaatgtatgggaaaagaacaacattcccgcccttgagtattgcacattgcccagagcagcagaaatcctaacctgcaaagtttccgacttgatacaccttgcagaaattggcgcaattgagttttgcatagcactcagagagtttgaagcctcgctactcctcccttttgattggcgagattcttctgaatgggaagaaagatttccaggcctgcatcactccgtgcataaatcagcacttagtagatttaggcctaaggcaagcttaagttattcaacggaactttcagaaaaacacataacctaccattatcaaaatgaaaattcgccaggccttaggcgacctctgatatttatatctggactgtggtcattatcagtcaccaatgctgaaatttcattttttaggaaattatctataaatcaagaggtttcattaactgctttagattttctgcttaaagaagcagatgtgccgttcataaataatacaagcactggtagtgatgaggtgatatttgtatcacctccgacagagcatttgtatcctgacggtggatttcttgatgaaagtaaattaaagaatatagccacgctgaccattaatgatatttttttaacaaaaaagcaaattgaaaaaatctccaatgggctaggggtagaattacctaactatattaatggtggggtaattaagccaacaaaaggagttgatgatagtgaacaatatgcttgcaatgtaaatcagaataaggtcggtgaatttattgaaatgttaattcgatgcgtaccagaattaggtgatgaagcgataaacacaagcgtaaataatcgatacaacatcttgaaggcattccttgagcaaaaacagagagagggtaagttcacagatatgagaatgccaagttcggcgactatagaaaagtacttcaaaatttggtga

SEQ ID NO: 245974 - DNA, 258 bp, Klebsiella pneumoniae
atggcaaaaccggactggggcgagcttcagcgacggttcctgtccgatcatgccgcaaccggcgtatcaccgaaggattggtgtgaagcgcagggactgaattacgctactgcccgccgatacatcaagaaacccactgcgcaaactgcgcaaaaacctgcgcagaagaaactgcgcaaaaggaaaagtgcgcagaagagctggtggatgatgatggcctcaccgatcagcaacgtttatttgtcgcagaatacctga

SEQ ID NO: 245975 - DNA, 144 bp, Klebsiella pneumoniae
atgtcatttaaaatgtcagtattaaaaaccgtccagattcattatctcggtggatatctctgcggcaaggatgttgaaatagatttaatttatacagtggaaattgtcaggcaggatatttctggcctagccttcgcagcgtaa

SEQ ID NO: 245976 - DNA, 900 bp, Klebsiella pneumoniae
atggaaaaaacaaacaactgtgagcctctggtttctgtgtatatccccacgcataatcgagctaacttgttaaaaaaagcagtattgagcatattttctcagtcttatagaaatatcgaaatattaatttgcgatgacggttcaacggataatacaggaagcactgttgatgatttaagaaaatcatccccattccctattatttacatcaaaaatgaatcacccatgggtgcttgcaacgccagaaaccgttgtatctcagtcgccagtggtgaatatataacaggtctagatgatgacgatcagtttactgaagatagaatttccacttttattcatgaagcctgtgttaacagccgaaatataatatctgcaaatcatacattttcagatggaaaaactttaaagaatggaccatcctactcaggtgaaataacttttgatgacatgaaatttaggaaccacattggcaatcaaattttcactaaaacaaaataccttagggaaattggtggttttgatgaaaatcttcctgcatggcaggattacgacgcatggttccggttactaaaaaaacatggaaattcgtttagagtttctgcttcaacatatgttgtcaatgttgaccatggagaaaatagaatatctaccagcagcaaggcatataaaggacaccttatgtttctagaaaaacatgctgtagaactatctaaagatcatgttaagagcctgaggctaatggacttaataaatagacgacaaaaaatccccctttcattcatttttaaaaacatttcaaaaagaaacattataacgatgataaaattatcactatcaaggaccatatcctctctccatctattaaaaaaacagttcagtaaaaacatgaggcgtaattag

SEQ ID NO: 245977 - DNA, 1602 bp, Klebsiella pneumoniae
atgattgaactggataacgatttgcagtcccggcagaacgcgcgggaactggtgcgcaacgccaaaaaggcgcaggcgattctggccgccttttcgcagcagcaaatcgacgccatcgtgaaaaacgtggcccaggaagcagcgcaccacgccgaagcgctggcgaaaatggccgcggaagagactggttttggcaactggcaggacaaagtgctgaaaaaccgcttcgcctcgctgcgcgtctacgacgccatcaaagatatgaagaccgttggcatcattcatgacgacccggtaaaaaaagtgatggacgtgggcgtgccgctgggcgtgatttgcgcgctggtcccctcaacgaacccaacctccacggttatctacaaagcgctgatcgccctcaaggccggcaacgccattatcttctccccgcatccgggcgcgcgtcagtgcagctggaaggcgattgaaatcgtcaaacgcgcggcggaagcggccggtgcgccggagggctgcgtcgacggcatcacccagctgacgctcgaagccacctctgagctgatgcacagcaaagacgtgtcgctgatcctcgccaccggcggcgaaggcatggtgcgtgcggcctatgcgtccggcaccccaaccatcagcggcggcccgggcaacggcccggcgtttatcgaacgcagcgccgatatccaccacgcggtgaaagatatcatcaccagcaaaaccttcgataatggggtgatctgcgcctccgagcagtcgatcatcgtcgaaggctgcatttacgacgaggttcaccgcgagctggaagcgcagggcgcttacttcatgaatgaagatgaagcggcgaaaatggcggcgctgctgctgcgcccgaacggcaccatcaacccgaaagtggtcggcaaaaccgcgctgtacctcagccagatggcgggcttctgtgtcccggccagcactaaagtactgatcgccgaacagaccaccgtatcgccgaaaaacccctactcgcgggaaaaactgtgcccggtgctcggcctgtacgtggcagaagactggaaagccgcctgccaccgcgtggtggagctgctgaccaacgaaggactcggccatacgctggtgatccacacccgtaatcaggacgtcatccgccagttcagcctcgaaaaaccggtcaatcgcattctgattaatactccggcggcgctcggcggtatcggcgcgactaccaacatctctccagcgctgaccctcggctgcggcgcggtcggcggcggctccagctccgacaacgtcggcccgatgaacctgctcaatatccgcaaagtcggctacggcgtgcggtcgattgacgagcttcgcgccccgggcagccgccctgaaccacagccgaccatcgtctcaccggcgagcgatccgcagcgcagcattcttgatgacgtgcgtttcaatgccccgaccagcgccgcgccagcgcgctctgcaggcagcgatgaccgttttgccagcgcaggcgccgccagcatggaaggcgaaatcaacgagcaaaacgtggaacgcgttatccgccaggtgctggagcgcctcgctaagtaa

SEQ ID NO: 245978 - DNA, 861 bp, Klebsiella pneumoniae
atgctaccaactgatcagttaagaaatacaataatatattttttcatagacgagtcaggtgataaaggatactcgaactcaaaaccattccataaaataggagtaatggctggtttccttttaaatgactgggaccttccaatcctagaaaaaaaaatggagaatgggttaagtaaacttgacctagaaccattaaaaaaacttcacatggcagagttaaataaagatcagcaatctaaagttattgatctggttaaaatgtcattcaaagagttaaatttaaagtttttttattctgcaatatttaccgaatcatatgcgtcttttgttgggaaaagcccagagcaaaaaaaagagtccatgcactcccaactacttcagaacattttaatgaaagcattgtcactctgtactaaactaattgaaaaattcgaaaccaatatcacaattaaaattgtgagtgataatatcgatcctggcgtaataaaatcaatggaaaaagacatttcccgcatagttaacatctttaatggagaaaagaatagaagttacataaacaaaaagcgatatgtcgaatctgaaataactggcatgtcgcatgaattcagaccaaaaaatggaaagtttgacgttgaaatgagtgttgaaaactcggcagtcacgttcatttccgatgtactatcctatacaaccttccaacatttaattaagtttatggaagataatccgaccgctgaactcaatacaacaacgtcaacggcaggtcaccccttggaagagtccttaattttacaataccctccagagtttgaggaaacaaatttaatcggaaaaatttttggaccaggtagaaaaaattaa

SEQ ID NO: 245979 - DNA, 582 bp, Klebsiella pneumoniae
atgccaaagaactggacgcttcaacgtccgaaagcaagcgtaaaaagtaatacgtggttccgtatgaaggcgagcgccaacaacgaagcggatatctatatctatgacgaaattggttattggggagtgacggccaaacagtttgttaacgaccttaaagcgctgggtgatgtcagccatattaatcttcacattaactcgcctggtggcgatgtctttgatggcatcgccatttttaatgccctgaaacatcacggtgccgcaatcaccgttcacatagatggcctggctgcctccatggcttctgtcatcgcaatggtgggtaatccggtcatcatgccggaaaacaccatgatgatgatccattatccatcacactacctcatgggtacgcatgaagaaccggattcattcattaacgcattgttaattatgaagaagaaagaaatgttttttgcattgcttttctactgtttttcggcgttgcagctaagtgtgtattgcaatgtgtattgcagaatgaggttttatggctggcgagaacaagttaagcgacaaggcgctaaaagccttacatggtaa

SEQ ID NO: 245980 - DNA, 678 bp, Klebsiella pneumoniae
atgaacctacaagataagattgcagcatcgacgaatataataagtgcagtagctaacgtcagtatggcatcgacagcgatatatgttgcctttaaagcaaggaatttcttcaagtcaaagactcaagaaataatatttgatgagtcctcaaaattaattcaagcccttgatttaatacataaaaaagagagcattttcaatatcttctttcctttcaagcttgctgagaatgacttaaacctttgggctgacaatgatgattttaaagaaagagttgatggctttttaagcttcagcatccaactcagcgatgatatcaaaacaacatataatgaaataaaaaagagagcatctcatatacatttaaatggtggagttctaaataaaaaaaccaccgacatactcaatgagcttttatcattattgttttcggcacaaacacaaatcggagattataatttcctaacatccacactatttgacattaagagtgaaaaaactcatatcagccaatttattttttatgattttagtggcaaaccatttaaagaacgtattttattaatagaccctcatttagctcgaagcataaaaaatacatcagatttatttagtcgtatatttcagaaaatagacgaattaaaatccatatattcaaaagggaaatttactcgttaa

SEQ ID NO: 245981 - DNA, 159 bp, Klebsiella pneumoniae
atgttaaaacatgaaactctgatagctgcaattgaggtcgctgcggaatttagtcttaatgggctagaacagctggcggtccgcactaaaaaggccacggcactggaggctaaacagcgataccgtcagaacatggacgttccccctatcatacaataa

SEQ ID NO: 245982 - DNA, 351 bp, Klebsiella pneumoniae
ttgacaaatcaggcgaggctctggccggaaggagaggtctttacccgtaaggtgttgataccgacaaattacgatccgctatccgttgaggtggtttacgttgtcccaccgtttgagatcgtcgttgctctatggcagaacaaggagcatgaaaaaacttacccactgttccggcagtttattcaggactggagcctggaagaaaaactcaccgataacgtacttaaagcctttctggcggcttactcgggtactgcggatgctattttttatggttggtcagaatatatgaaaagtgcattagcggaaaacgagcatcttttagcagtgcagagccagaccgttaactga

SEQ ID NO: 245983 - DNA, 453 bp, Klebsiella pneumoniae
atgattgatagcaaagataaggggctgacctttgctgttttcaggggtaagacaaatattggcgccgatgatttgggttatccggtaacgggtgaggctattcgcattgtcccggttattgccggcagcaaaaaatccggtttgcttcagacaattatgggggccgtgctcgttgctgcaggagctattgcaacctttgttttcgatcagccatggggtgttaatctgatggtcgctggtggctctatgatggctggcggtgttatccagatgctttcccctcaacccggcggtttagcccgtaaagagtcctccgataataaagccagctatgcctttggcggtgtcactaatacggcctcgcagggctacccggtaggccttctatatggcaaacgccgaattggtggcgcaattatctccgctggcatttatgtggaggatcagctttga

SEQ ID NO: 245984 - DNA, 531 bp, Klebsiella pneumoniae; identical to SEQ ID NO: 160422

SEQ ID NO: 245985 - DNA, 489 bp, Klebsiella pneumoniae
atggctgataaaatcgcggtgcttttcggtggaacctccgctgaacgtgaagtgtcgctgaattcaggcgcggcggtgctggccgggctgcgtgaaggcggggtggacgcccatccggtcgacccgcgcgatgttgatattactcagctaaaaaagcagggctttaagaaagcgtttattgccctccacggccgcggcggggaagatggcactctgcaggggctgctggagttaatccagctgccttataccggcagcggcgtgatggcttcggcgatttcaatggataaactgcgcagcaagtggctgtggcagggcgccggattaccggtcgcgccgtgggtggcgctgacccgcgcccagtttgccgccgggctgtctactgacgtcgaacagcaaattgcggcgctgggtctgccggtcatcatcaagccgagccgtgaaggctccagcgtcgggatgtcgaaagtcagcgaaagttgtgtttag

SEQ ID NO: 245986 - DNA, 1080 bp, Klebsiella pneumoniae
atgtctcgaagttttgctgtttgggggtgtcgaaattaccatagcagttccaattcaggctataattccgaacatgtaaatttcattgatgaatttcatgttaatttttggaacgtcagcgcacattcttgcagttatttagattttggtgttacttttaaaacaccagatgatcctgcaatcactgatcacggtgccatttgtatattcattccatttataaaaaacaataacgattttacagacctcagcgaaaacctcgagtccagtagagatcttgttactgctgtatttaatgaatatcttatcgacacaaaaactatcgatggcagacatttaaaactcattctcgcgaataaaggggagctagtagttaatactaagctacctttccgtggaggagaattagaccatagagtaaagattactcatatacatgatggcactctaatagtgtttaagctaaaagactgtctaacatccgaaaacttatgtaaccattatattcgatttagaataaacttaaataaaactgatatatcaggtttagtaaaaacattttatccgaaagatctatttttaaaaagtaatattgagcgctctgacattattgatttcaggattaatgaacaaagaaatctcccttctgagatatctacaactttggcaagtgcggcttgcactcctttaaagtgtcatctttttataattagagatatggttgatgattgttcagcttcaggttcgaactataaaggttgtcggatacttgaatcagaaacatggacaaaatactttaatcgtgacgtctcatttggtaaagacgacccgatgatttaccattggaagatctcgaataaatctgactctagactgaatgatttttctgttgttgttaaattcaaaaatgtaaagtcaaaattaagtaaaatttttgcatacatattttacggcgcagcattaacattcattatgaaatttgtacctacagagcacttagacaaaaaaatattcatccttgggtctttatcgttaattgcattgtacataattgctcattttttaaaattcagaaaatag

SEQ ID NO: 245987 - DNA, 1038 bp, Klebsiella pneumoniae; identical to SEQ ID NO: 242933

SEQ ID NO: 245988 - DNA, 627 bp, Klebsiella pneumoniae
atgcctgattgtcttaaaaaaaagatagatcagttaaataaaatccttgcaccttatggtgcaaggaagctgtccaatactgaattatctattcttgatgaaaaatatatatgtgtctgggaattacctacagatttagtattcaatgacgactcaattgtattacaaataaggtataaaagtttaacacagcatgatatcccagaagtatttgtatcatctccagcaataaatgtatgtcaattacctcatatagaaaaaaatggtaaactatgtgtttggccaaatacatacattattgatttgagtgataattcatatgttcttgaattattaagtgatgcctattcgatgttgaaaaaaggcatcaaaggagatcttagagatgattttattgacgagtttcagaattactggatttatcattgcaataaaatagaacgtgttattagcctatgtgatttgaacataaagaacacaagattagtatacggctacaaagcaaaaacattaggatggatatattctgatggtgaacaaaaattaattaattggttagataatcagaaactactatcttccaattcagataactccaataagagatttattcaatttaatcaatga

SEQ ID NO: 245989 - DNA, 1299 bp, Klebsiella pneumoniae
ttggtcttaaataaaaaatcccatattgatttaaaaacaaaagaattaccaagtacaaaaatcattaatactgctaattataattcatcacataaatttgtttcttgcggttatcctgcaattaatgaacatcaatctgttcaacctttgcactataataattttagtttatttagaaatgaaaaaatttgccttcaaattattagtgatacattgactgcattagaagatcctaaaaatggtctttcaggaaactctggtgcagggatcattttaaattcatctagttgtgtgggattactagggctttataccgatactggtgattatggtatttgttatggtgatatagtcgatttttctataaatgaacttcttacatcttctggatacgtccctttagaaatggaagaggatctgtctaataattttaaagcactaattcagtctgattttatggagtgctttgttcgaatggaatgtgatttaaatttagacaaaaatcggattgttaacctttataggctctgtttagatggtaaaaaatataactatgttaagattggtgagcggttaattgattgtattccatcattttctctttcccgtaagcaattaatgaggtgtcgcgagagaaatgcatttggaaaagctacgctatccgcgatacgtaattttttgaaaatagaaaggaagactaagatatccgaaatgttattacaaggatttcttgaatcgtacctgcatgcgcctaaactttattcatttgatgaaataaataatgcaggttttcatggcgcccatgttaaattcaataagaataggaatgttgagttaatccattcggctgcatttatatctaattcgttatcggatggcgtttcatatgcgatagatgttattcttaaagcatttcctgagttaagatcgttggatggtttgcttggtaatacatttttagaaacaaactttactgaagatgagtgccaaatcctagccagtcttcttatcccgggagagtcttcgtactcgcagggttatgaagacagattggctatatttattggctataaccataagattgaagagtcactcatatatgagaatgcatctaggtttccgtctttgcttgaacaaaaaattattctcaatgttcagcaggcactagaatatcggaaagaggaaatcaataagttatcaatagttaatgcaactattgattgtttttttgttccgttcgatgatgtgaataaatttaatgacgagttcattgagagtctgaaaaatgaagaagattga

SEQ ID NO: 245990 - DNA, 300 bp, Klebsiella pneumoniae
atgaaaatttatattgctggcccgatgaccgggcgcgagaactttaaccgtgaggcatttaacaaagaagccgaacgactgacccgacacgggcacaccgttttaaacccggcaagcctgcctgatgggctggagcaacgcgaatacatggatatttgttttgccatgctccgttgcgctgatgcgatcctgatgctccccagctggcagacctcctccggtgctacggcggaatatcactatgcctacaaaatggcgcttccggtttataccacggttcactatccgccggtcgcatag

SEQ ID NO: 245991 - DNA, 1062 bp, Klebsiella pneumoniae; identical to SEQ ID NO: 242897

SEQ ID NO: 245992 - DNA, 285 bp, Klebsiella pneumoniae
atgaataattttaaaattgaatacgttgatggcgctttgaccgttctggagacggatggtcattcacggatgaatgaagccgtacatggcatccattttgagcatgtccagggcggtcgcccactgctgaaactgacgattgcgcatgatattgccccggcctcgactccggccccggctgctgcgtcggctcaggaacctttagagggtgagctggtacaggagcaacaatccccgctgcctggcggtcgccgttcccgccatcgccgtggaggtaagcaatga

SEQ ID NO: 245993 - DNA, 390 bp, Klebsiella pneumoniae
atgatagagctggcgattaagggtgcgctggagcgcatcaccggcatgaatgcgtatccgcttttactgccggacacagtccaggaaggagcgacctttcagcgtatctctgacccggaaatggtctcgggaatgttgcgaacggggatcgtctctgcccgtatccaggtgaatctgtaccgtctcgatgattacacctcactgctgcagctggataaaaaaatctgggcggaactgaagtccgtcgttcatggccagctggagggtatcccggttcagtatgtggagcgaggcggtatccatcaggataaaaaccagctgacgaatcgtcgcattcagtatcgcctgacccgcgatttcatcattcactacgtggaggactcctcgtga

SEQ ID NO: 245994 - DNA, 423 bp, Klebsiella pneumoniae
atgaataacaacgcaataaatacattactctcttgtaaaactccaaaagacattcaggcttgcattaatgcaggctccgatattaatacactggattcgtttggaagaaatatactgttttactgtaaaaacccaagaatgattgacactctggttaaagcaggaatagattttaaccatgctgacaactatggtcacaatgttttgtttaaccagcgaaatcctcacatactgaaaaaattgattgattccggcgtagatatacaccacaaaaatggtctcggccaaacctgtttatgctcgttagctgataatatatcctgttgcaaaaccctgatcaatgctggaattaatgtcaacaatgtggataaatgcggaagaacactacttttttacgtaaaagtcactctatctttgatttga

SEQ ID NO: 245995 - DNA, 357 bp, Klebsiella pneumoniae
atgaagtttatggtggtatttatttgtgtgattttagtgctttatggattttacgggcttaccgtgcgtgaatcgatagtgtttacatttttggggttcagcatttcagctatttttgctgcttttgctggaatgtggattataactatggccgcaacagtgtctttattaggtggttctatgatgaacgcaaggataattgcatgccagttatttgccatagctatgtggatgttaattattgatgttgccggagtgactgaatcaacgcaattgttagccggcttttttttgttgattatgtatgacatctgtcatacagttgattgtgtaatgaacagcaatttttccacttaa

SEQ ID NO: 245996 - DNA, 1092 bp, Klebsiella pneumoniae
atggccagaagcaagatgtggaatgcggttgttgctaatgcgaaagccaacaacatcagtaatgaggagtctttccagcagttgatggatgagtctaggaagggaacggtatcaggtgagatgtatggtaatgctaaatggagtagtggcgaccaattggtcgggaaactgggtaaatgggctacaggactcactgctgaagggggggctaaaattagtgctggagcgaatgcatcaagtggctctactgactcgacaaccgaatctggaagggaatctcatgacagtaggcacgataccagcagccaggcggcgaaagactttaaggaagcatccgattacttcaccagccgcaaaaccaccacatcgggtaatatcaccgataataatgccagctcgcgtgttgaccagtttgccgcgtcactctccagtgccaaaaacagctacgaccagtatacaaccagccggacacgcagccatgagtacagtgagatggcgtcacgcacagagagcatgactggccagatgagcgagaatctcactcagcagtttgctaactttgttcagcgtcgcgctccacaggatgccgaggctattctgaccaataccagttctcctgaaattgcggcgcagcgtgaagcactggcgcgtgaattcgtcaaagagcaggttgaacccagggttgatgccgcgtatcaacaggggcgtgaaagcatcggacagaatatggctggggtgtcaggtggtggggacaatggttcggtaatggctgactacggacaaaattctggtcgtatcgatgccatgacgcaagacgctggtattaaggataatgtgggtcagaaagtggatgggatgattgcagagaataaacaacagcatcaggaaacccgtgaaaacatacaacagcaaggcgttgaagtgaaaaaagagaatgctgaactggaaaatgaccacaaaacaaaaggaaatgatttcaaaaattcttataatgataagaaagagcatcaaaccagactgcctggcgcggattcaaccaaagaactactggataaggcaacaaaattagaaaacgagaaaccaaagggatag

SEQ ID NO: 245997 - DNA, 510 bp, Klebsiella pneumoniae
atgaatattgatgtcgaaaaactggtaaaacaattaggtaagctctatcaggatattcttaaaaacggcttgattccttacaaaactgaaccctacggtgcagtcgatgatgatgaatctatattaaatatgaaacgtgaagggatgtttttggtctttacgaatgatcctgataaaaaatttaaagaaatatctttaaagttagaagatgaaggaaaaactgattggttgtttcctaacccgatgccatttggtctggagccggtgatgaccctgcagtgggtgcgtgcacgcttcgggctgccgatgatttatgttgatgcgaaagtggttatgactctctatagaggagtaaaggagttttatccgctattagctcctgatcaaaatattgttgcgtcgtttagctataacaaagatttctttgtagaaagtgtgactttttatccgctggaacgagcaaaggagattcaggttgcgctggagaaaaaacgacttggtggcaaatga

SEQ ID NO: 245998 - DNA, 381 bp, Klebsiella pneumoniae; identical to SEQ ID NO: 234463

SEQ ID NO: 245999 - DNA, 282 bp, Klebsiella pneumoniae; identical to SEQ ID NO: 61246

SEQ ID NO: 246000 - DNA, 378 bp, Klebsiella pneumoniae; identical to SEQ ID NO: 234431

SEQ ID NO: 246001 - DNA, 510 bp, Klebsiella pneumoniae; identical to SEQ ID NO: 211394

SEQ ID NO: 246002 - DNA, 639 bp, Klebsiella pneumoniae; identical to SEQ ID NO: 199696

SEQ ID NO: 246003 - DNA, 150 bp, Klebsiella pneumoniae; identical to SEQ ID NO: 187346

SEQ ID NO: 246004 - DNA, 252 bp, Klebsiella pneumoniae; identical to SEQ ID NO: 30842

SEQ ID NO: 246005 - DNA, 162 bp, Klebsiella pneumoniae
atgcccctgcttgactacatcaataagtactacaacggcaaccaggcatccttcgcccgtttgacaggcgttcagcctgcacaggtaacgcaatggctggaaaaaaaattcatcgttgtggatcacacgctttacagtccgcgccgcaagctcggcgtataa

SEQ ID NO: 246006 - DNA, 726 bp, Klebsiella pneumoniae
atgaaatggatatatgctgatattgcctttcgcgaggatatttcgcaactgggttgctctgttgtcgccgctcatccctggatttatggcattggccagcagactgaaaatggctcatacctgagtccgggaaatgccgtcaattatctttccggcatattatcaggtgtaaatcaggcatctgaggtcgtcatctttctggtgtgtggaaacaaccatgacgattttatgcaaaatctgggcgcgttcactgccatattgccatttccggctttgattcaggttaagcgcctggctcagtcagcggctgatctggaacatgaaaaaatgctgatcccggccgcagcaatggcattcccggcatccatgccactttcaacactgacaacccgtgctgcgctgaatgcacaacgtgtcgcgcaagcgcagacgcaagctgcatccgggttcagcctgaagagtgcaaaagcggtactggcggactttatccaggaaagaggcaatattctcagcgaagtggccaatagcctggaatcgctgaaggggaaaagcgctcgcgcctgggcgttcaccgcgcagggtgatatcaccaccacgctgcgcactatggttaaagatattccggctgcgtcggcagtgcattgcgccgcggtgatgatggtcggggagaatctggcaggactcagggagatgatacatgaactcgatagcgactctggcgcttaa

SEQ ID NO: 246007 - DNA, 2613 bp, Klebsiella pneumoniae
atgagtcagacggtgattacttccgcctttgaacagctgaaagcccaggaagcggcgaacggtggcgttgtcattcttgatgagttcgtgtttgccaacgtcccaaatctggacattaccagcccaattgatcgcggcgaaggggtgccggacgaggcgctgattgtccatcgccaggctgtgggtaaaaccgggatggtgaataacaacgctgtggtttactccgtggtgatgggcgcggatgtgggggattttgacttcaactgggtggggctggttaacaaaactaataacgtggtggcgatgattgtccatgcgcccacgcagaagaaaatcaaaacggcgaccggccagcagggtaacgtgttaacccgctctttcctgatggaatataacggcgcgtcagagcagacccagattattaccccggcagatacctggcagattgatttcaccgcacgcctgaatgccgtggatgaacgtatccgtaaagagaatattgatatttacgggcaggccgctttttttggtgacggttatcaggttgtcaggagtggagccgggtattacgtccataaaggagcgggttacattgctggcctgcgctcagagttactgtttaatcaggatattgttgttactgacaaacctgcaagggtgtgggttgatatctgctggcaggggacgttaaccagcacatgggatgcatacagccagattcgggttgcggcagaactgaacgattatattgatggtgatgaattccactatgtatttgccattgctgacattatggctgatggttcagttaacgacctgcgaccggtcagtgcactttccgaactgtcaggtattacgccagaagagaacacgttccctttttttgatgaacgtgccgaaatgaaactggcccgtgccagcgaattttccagggggatgatggctaaagaggaggcgacggaacttctggaatatctggagttgagaaaaccaggcggagccaggcatgtttttcttgatgatgccggcaccgtcaatgatgtgatttcctgggaaacgccggaaaaatactatgatgcctctcatggcgatgatgacactatttctgtgcagcgtgccattgatgccgcgggcgatggaaccgtactgtttgagaaccgaacctataacattacgcgtctgcttatcagtaaatccgtgaccttgcgcggacagggaaagcgctcgaaaactatcctgaaagccacggacggcagtccgggaagcctgattgccattggtaaagggaatgccgccccgaccctggataatattaatcttacaggggactggactgacagaggcacgttaaagaatccggttgcccctgtcagtggacccctgaacgcgatttatattgaacagtctgattcttattccgtctctgtacagttgcgtgattccactattgttggcttttcggggtacggggtgtacgcaaagaaatcccggaatatgggtatgctgcgctataccagtattctttcatgtgcaaagcagtgtgtttatctcctgtcggcagttgactggatgtttattgactgctcctttggccgttcgctgactgacggactttatctgaattgcgattccgtcaggatgattaactgtgagtcttatgaaaatcagggcaagggaattgttatggggccgctggccactgtcagtaagctgatctgcaatcatattaactcaaataaaaaagacgggattcattatgataatctgggtggggcagaatctcatgttctggtatcaaatgttttctttgcaaatggttcggaatccttaacggatgatgatgttatccgaaatggctatgcaaatatcagggtaacatcctcagtcagactttttaaagcgatggccaatggtcattttaattatgatgattctcagaataaacgtgtggcctatatctttgcagcagaatccaccggctcatcaacgaactgggatgcgtcagatgatatgatcaatccggttgcgactggtctgtcgtcgcaatcggctgcgattggagtgtcgaactaccctgcccgggtatcctggtcagataatggcgtggaggtgagaagttcagccagaacaacgacccaaaaagtcccggatgccagtgctattgcttatggtgtgattaagggtggggaaagtaagccccgatacggcgtttcggcttccggcctgtatcttggggatggtgtaaccgacccggcaaggcggatctcctggagcggaacaaagctttatctggatgaactgggtgggcagacagtcgtttataaagagataaatcccggtgcggtttttgatgtcaaaaacctgccttatgaatattacagcctgtcatctgaagatgcgtattttacgcttccggatgccagtacggttgtgagtgggtttaaaatcaggttcaagaaaatagtaaagtccgccagttatacgataagaaccagtgcagagcagactatttatggcgctgacggtggggggctttctgtagttgtgttatccgaccccggagcttatgaatttatatggaactcggcgcgtcgctgctggattgcagcataa

SEQ ID NO: 246008 - DNA, 213 bp, Klebsiella pneumoniae
gtgcaggatttatttgttgagactattgcgcttcagcggattgcgttatttacaaagttggttgctcggggggattgctctgttgatgaaaaagacgtggcgatagcatggctgggggagttgacggaggcgttatccagaaagctggatgagaatgaagctaatagcccccagagcgggggcatttcacgcggcgggtgtggctttcagtag

SEQ ID NO: 246009 - DNA, 621 bp, Klebsiella pneumoniae
atgaatctcaaaaccggaggtcaggctgtaataaccaggctccttgaggcatacggatttaaaacaaggcaggcgctatgtaatcagctcaacgtatctaccagcaccatgggaacccggtggatgcgtgacgtattccctgcagactgggtgattcaatgctctatagaaacaggggcatcagtagagtggctatcatttggaaatggcgagatgttcccgaacggacacagcacacattcaaatgaaacaaagaaatccgcaaatgaaaacttgctgggtgatgtagttgctgtaccgaggaaaaaaatagttgatggtaatttgtacgattcaaatttctacatgttagacaaggcaatccttcccgagaatatcgtcaagccgttaatcatcattgatgatgaccgtacttatgtagctgaacatagtattagcgaaatttcagatggaacctggctagtagaaattgaaggcaaggttagcatcaaagaactgatccgaatcccagtcggcaaagtgcgtgtttctgcaccaaccggaggctatgcatttgaatgcggcattaatgaccttactccgctagccaaatgccattactacttaatgaccaatgtttaa

SEQ ID NO: 246010 - DNA, 4911 bp, Klebsiella pneumoniae
atggcgctggtcggtattaataacgaaaacgaattttactctaaccactatttgggcgaagtctttaccagcgatattcgcgatgtactggaaccctggattgagcaggaaaatgccgctcgcgaagctgaacgcgcagcccgtgaacagggcaaagaggttgaggcgggctaccgcgcgccgtggaaccagcttaacagcctggcgacagagtttttccgtaaactcactgaacatgaaaaacagcgccagatcccgctgcgtctagccgatcagcgcagtcgctggcagccgctgttaaaggcattgggttatgaactcaatccgcacattcagatgctggatgacgatacgcctttgccggtactggctcgttacaacagtaccgacggcagcccgtggctgtggattgttgaagcacatgatcaggatgaaggaacgctggatccgctggcgctgtcgctgctgaccgcgcagttcccggcagataccgataaacataagcgcgacagtctgcgtaaaaaagcgaacggcgaataccttagctggcaggatctgctctccacggtggtcttcacgcaaaatgaaccgccgcgatttgtactgctgcttggcaatcgccagctgttattgctggatcgtactaagtgggcgcaaaaccgtctgctgcgttttgattttgaagaaattttaagccgtcgtgaaacggatacgttgaaagcgacgtcggtgttgttacacaaagactcgctgttacccggcagcggtgcgccatacctcgattcgctggatgacaattcgcacaagcatgcgtttggcgtgtcggaagatctgaaatatgccctgcgtgagagtattgagctgttgggcaatgaagcgatgcgttatctcatcgacaacgagctggcttattataccgggaaacgtgctattaacccggatgagttgagccgcgaatgcctgcggtatatgtatcgtctgttgttcctgttctatatcgaagcgcgcccggagctgggctatgcgccgatgaccgccaaaacctatctgcagggctacagcctggaaacgctgcgcgatctggagatgatcccgctgaccagcgaagaagatcgcaacgggcgctacttccacgatagcctgaatatgctgttcaaactggtgcgtgacggctacagcggcggcgtgaaaatgcagagtgacctggagagcggcgaccggatcactattcatagccatcagttcagcgtgccgcgtctggaaagccatctttttgaagcgaataacacccgtattcttaaccgtgtggtgttccgcaacgaaaccctgcaacaaattattcaggcgatgtcgttaagccgcccgggtaaaggacgttttaatcgccgggggcgtatctcctatcgccagctgggtatcaaccagttaggtgcagtgtatgaagcgctgctctcttaccgaggattctttgccagtgatgacctctacgaggtgaaaaaagccggagaagagtttaacgaactggaaacgggctacttcgtcagcaaagatgagatcggcaaataccacgacgacgagaaggtctacgaaaaagacggcagcctgcgtattcatcgtaaaggcagctttatctatcgcatggccgggcgcgaccgcgaaaaatccgcctcttattacaccccggaagtgttgacccgctcgttagtcaaatatgccctgaaagagctgtttaaagagcagattgatccgattaccgatctgcacgccaaagccgatgcaatcttaaacctcaccgtgtgcgaaccggcgatgggcagcgcagcgttccttaacgaagccatcaaccagctggcggaagcttacctgttccacaaacagcaggcggaaggtcgccgcattcctcaggatcgctacacccaggagctgcaacgggtgaaaatgtacattgccgacaacaacgtattcggcgtggacttaaacccggtggcggtggagctggcggaagtgtcgctgtggctgaatgccatcagcggcgatgcatttgtaccgtggtttggctaccagctgcactgcggcaactcgctggtgggggcacgccgtcaggtgttcaacaagagcgagctgacctacaaaaaagcgaaagatccgagctggcttaacagcgaaccggccgagctggcgatgaatacgccgcgcgaagagaagcagattttccacttcctgctgccggatagcggcatggccaactacagcgacaaaaccgtcaaacagcgctatccggatgatttcaaagcgctggacagctggcgcaaagagtttactaaaagctttgccccagatgagattgttgatgtgcagcgcatcagcggcaaagtggaagcgctctggaacacgttccgtcagcagctgaaagccgagcgccagaaaaccgccgacaattacccggtatggcctgcggaaaacacggctcaagttcgctcttctttaagcagcaaagatgaaaccttcagcggccgcctcgaagataacagtacctatcagaaactgcgctgggtgatggactactggtgtgcgctatggttctggccgatcgacaaagtggatgaactgccggatcgcggtatgtggctgatggagatggagacgctgatcgacggtattgtcgtcacggaaagagtcactgaaaccgcagaacaggccaccggtgagctgtttgcctacgagggcatggtgcgtgaagagtcatcgctgttttccggtgcaggccgcctgaaaactgaagtactgttccgtcatttgccgcgtctggcgattgttgatgcgctgaagaagcagcaccgttttttccattgggatctggaattctgcgatctgttcgccgagcgcggcggctttgacctgatgctcggaaacccgccgtggttgaaagtagaatggcaggaagcgggtgtgctgggcgactacgagccggagtttgtgctgcgtaagctgagcgcctcgaagctggcgacgttgcgtgttgatacctttaacgccattccggcgctggaagatgcatggcgcagcgagtatgaaggctgtgaagggatgcagaatttcctcaatgcacagcaaaattattctgtactggcaggccaaaaagcaaatctctataaatgtttcttaccacaggcgtggcgtttgggggctgaaaaaggtgtggcgggattcctgcaccctgaaggtatttatgacgatcctaaggggggactgttgcgcacggcggtatatccgagattgagggcgcattttcaatttcataatgaacttagtttgtttgcagaagtacatcacgcaacgatgttcagtattaatatttatgggtcacagcaagctaaaccttcatttatcaacatgtcgaatgtttatgctgtcagtgcgatcgatgcatcgtttgaacataacaatcaaggacctgttcctggtattaaagatgaacaggaaattgacggaaaggtaaaagtattctggaatattactggccaccgttctcgtctcattaatgtgggtttacacgagctctccttattcgcccggctttatgacagcgaaggaacttctgcttggcaggctcgtttgcctgcattgcatacacaacaatttgtgaatgtcatggagaagatagttagttgtggtaattttttggccgacaataagttttataaaacaattgatgttcattatgacgaaacacaagcacagaaagatgggtttatttgtccaacggtgaaattcccatcaacttctagtgattttgtgctttcaggccctcatttttatattgggaatcttttctataaaactcctagatttgttagtaagttaagtagcgattttgataatttggatttagaagttatacaggatgattatatcccacgaagtaaatatatcgtcaataaggataggtttggctttttatcaagtattcctcaagtgaaatttgatggtatagattatcctattactgatttttatagattagcacaccgaagaatgtttggccctacggcagagcgttcactcatcaccgccataattccgaaagagatttccaatattaatactgtagtcactacggtatttaaaaatacaaacgagttgactaattttgctactgcgactcattcattggtatatgatttttatctaagaacatcgggtcgttctgatctttatggcgcgcagttagctagatttccttatatagacgtgcagaaagctatagttttaggtttagtgcttaatgcgttaagcagtttccataatgatctttgggaggactgttttgacaaaaaatttaccaaatatcgttggagccgcaatctcccacaactcccacaagatttcttcgccaacctcactccagaatggcagcgtaattgcgcgttacgcactgattacacccgccgtcaggcgctggtggagattgatgtgcttgtcgcgcaagctttgggattaaccctcgaagagctgctgactatatatcgcgtccagttcccggtaatgcgtcagtatgaagccgatacttggtacgatcaaaacggccgcattatctttaccccaagcaaagggctggtgggcgtcggcctgccgcgtaccgcgcgtaaagcggacctgaaaaacggttttgtctttaccgtcgacagcccagactggaccggcggcgattgcaccgatcaagccatcggctgggatgatgtcaagcatctgcaaaccggcactgtcagcgtcacttttgatgactatacccgcagcgatgaaggcgagcgccgaaccgtcatttggcaggctccgtttatcaaacccgaccgcgaagatgattataaagtggcctgggcattctttgcacaagataaggagagcgcctga

SEQ ID NO: 246011 - DNA, 219 bp, Klebsiella pneumoniae; identical to SEQ ID NO: 233538

SEQ ID NO: 246012 - DNA, 234 bp, Klebsiella pneumoniae; identical to SEQ ID NO: 215601

SEQ ID NO: 246013 - DNA, 897 bp, Klebsiella pneumoniae
atggttcagcgtattgctatggctccccaggggccggaattttcacgttttgtgatgggctactggcgtctgatggactggaaaatgtcgcctggcgagctggtcagctttattgagcagcatctcgatttaggcgtaaccaccgtcgatcacgccgatatctatggcgattatcagtgtgaggctgcctttggcgaagcgctgaagcgagcgccgcatctgcgtagccggatggaaatcgtcagcaaatgcggtatcgccacccgggcgcgcgctgagaacaccattggccactacattaccgaccgcgatcacatcgtgctcagcgccgagcaatcgctgcgtaatctggcgacggaccatctcgacttgctgctgatccaccggccggacccactgatggacgccgacgaggtagccgaagcttttctcgcgctgcatcatagcggtaaagtgcgccattttggcgtctcgaactttacccccgcccagttcaccttgctgcagtcacgtctgccgtttaccctcgccaccaaccaggtcgaaatttcaccggtgcatcagccgctgctgctcgacggtactctcgatgagctgcagcaactgcgtattcgtccgatggcgtggtcttgtcttggcggtggtcgcctgtttaacgacgagggcttccaggcgctgcgcgatgagctggcgcaggtggcgcacgagcttaacgccgacagcatcgaacaggtagtttatgcctgggtgctgcgtctgccgtcgcagcctctgccgattattggctcgggcaaaatcgagcgcgtgcgctcggcgattgtggctgaaaaactcagcatgacccgtcagcagtggttccgcatccgtaaagccgcgctcgggtacgacgtaccgtaa

SEQ ID NO: 246014 - DNA, 1146 bp, Klebsiella pneumoniae
atggctattatcagtgacgaattagcgaacagtattcagaagtgtttcgaccgcacctatgtagatttagcgaaccaacaacaatttttattcggcgccggagatgtcacggtcacgaaaccggacggaacaacggggacggtaaaatcgtgggcgcagttcctcagcgaatacagttcccgccagactgctatcgatggcgcgatcacagcagcagggaagaacgttgccagaacgtcatcaaccaacacgttcacgcagcctcagacattcagcaatggcgtcacattcagcgccacaataaccgctgctgggcaaatactccggaataacagcggcacacaatttacggcgattgatgccggaagtctggaaatcagcagcgataccacgccctatattgattttcatcataaaggtagcgtagcggattatacgcacaggattatcacggaagacggtgcgctggccgtctaccctggccttcgtgttcgcggtggttttggtctttatggcgtggggacggtttacggtgatgcttattcgcagggatttattgcgcgtcttaataatgatccaaacgcatctattggagacattcttgcttctccgcgtttcacggttcggtttaactcacgaggcagtgacagtaacgtagacggcgggcagggggcaatgtggtttgaagagcaggtgggcaccaaccatcgccttgtattaatggccggcgggtttagtgccaacgttcagtactggcaatttctggcagacggcaggatttatagtagccagaacggaaacgttcaatggcaaggaacatccgatgcacgcctgaagcacgatattgaacctacagatggccagttgtctgtcgaacgtatccgcaagctggagttggtcacgttcgtctataacgatgacgagcagaacaggacacggcgggggattatcgctcagcaggcacagaaagtggacccgcagtacgttaagcaggtgaacacgtcatacatgaggaacggtgagcaggtaaacgacgatcgcctgcaattggataataacgtgatcatgatggacacactggcggcggtaaaagtactgcttgagcgagtagacgaactagaggagcgattatcggcacatggataa

SEQ ID NO: 246015 - DNA, 309 bp, Klebsiella pneumoniae; identical to SEQ ID NO: 230657

SEQ ID NO: 246016 - DNA, 711 bp, Klebsiella pneumoniae
atgcgtcagaaaacgattaaggccatccaggaacatgcggccgcagaatatccgcgcgaggcctgcggcctcgtcgcccagaggggccgagcggagcgttatttcccctgccggaacctggccacagagtcgaaagataattttgtgctggcgccggaggattatgcggaggttgaggaatggggaacgatcaccggtattgttcacagccatcctgatgccaccacccagccgagcgaactggataaagcgcaatgcgacgcgacccttctcccctggcatattatcagctggccagaaggcgatctccgtaccatccacccgcgtggtgagttgccgctcctcgaacgaccattcgtgctgggccactacgattgctggggcctggtgatgagctattttcggcaaacccacggcatcgagctgcacgattaccgcgtcgattatccgtggtgggaaaaggagtatccggacaatttttatcaggactgctggtatgaatgcgggttccgtgagtttgatggtccaccgcaaccgggtgatatggtgatcatgcaggtgcaggcggataagtggaaccacgccgggattctgctggaagggaacctgctgctgcatcacctgtatggccatctcagcaagcgcgtgccgtatggtgggtactggatggaaaggacaatgaaaatcgttcgatatcattctctatgttaa

SEQ ID NO: 246017 - DNA, 3336 bp, Klebsiella pneumoniae
atggcagacgtcgcatctttagcggtcgggctgcacctgaacgcagccagttttaaatcccagctgctgggagcgtatggcgatgcggagaaccagtcacgacggtttaaccgtaatgcccaggcggacgcgaaaaagacggaggacgcctataagaaggtcggtctgtcgatatccgggatggccagccggctggcggggctggcaggagccggcctttccatcggtacgatcgtcaccacgtccagacaatatggacaggcattatcagacctgcaggccatcaccggtgcgactgctgctgaaatgaaagcgctggatctggctgcgcaggaaatgggacgcacgacagagtacagcgccagccaggccgccgaggcgctaaagctgatggcgtcggctaaaccggagcttttaaaaacgtccgatggactgcagaaggctacgaacagcgcgcttatcctggcgcaggccgccggcacaacgctgcccgatgcgaccagaacgctggcgctctccttaaaccagtacggggcgagcgcgcaggaggcggatcgttatatcaacgtgctggccgccggcgcgaagtacgggtcgtcggagattgtggatacagcggccgccattaaaaatggtggcgtcgcagccgcacaggccggcgttggttttgagcagctgaatgccgcgattcaggtgctggcagagcgtgaaattaaaggcggtgaagccggcacggcgctgcgtaacgtcatcctgaatctggaaaagggcacggacaagagtctcaagccgtccgtggttggtctcagccaggcgctgaccactctttccgggaaaaatctctccacggcccaggccgtaaaactgtttggcgtggagaacctgaatgcggcgtctatcctggtccagaaccgttcaaggcttgatgagctgaccgcttccctgaccggtaccaaaacggcgcatgagcaggcatccatcagggttaacaacctgaacggcgatttgctgggtctgagcagtgcgtttgaagggatggtcattaagatcggccagagcagtaacgggccactccgcagcgggattcaggttgccacggaggcactgaacagcctggcagacaatttcaacaccgtctccagcgtggcgctttacagtctgatccccgtgctatccacgaaactgaccgcagggctgcgggagaatatcgcggcctggcgggaaagccaggcggcggtaaaagcgcgggcgcaggctgatgcggatattgcccgcaaaacgctggattcgacagctgccatcctgaaacagaacgacgctgagtttggccactaccggcagatggagcggacggctaaacagtacgggatgaatatcagttaccaggatgagtttacccggcttatccggcaggaaactgagcaaacgaacctggccagccaggcgaaactgaaactggcggcggcaaaccggcaattgtcgatatcagcccgcgcggcctccgttgcggtggggctggcaagaggcgcattaaatttaatcggtggtccgttcggcgccgcgatgctggccggttcgggcctcctttactttcatgagaaagcaaaggaggccaggcagtcagccattgatttaaaagatgccgttgtcgaaaccagtgaagcgctgatgcgcctctcgcttaaccagctaaatgtgaagcagttcgacctggaggatcagtacgaaaaccaggtcgtgcagcgtaaccagctgatgaaagagattcaggatgccgacagtcgtatcgacagcctgaaagggtttgaccccttcggccagctggaaggggtaacaaaaggccaggcgcgtgcacgggcggatctcgaaagcgttaacgagggactccgcaaaaccgaggaaaacattaagcgtgtcagtgatgcaaaaacactggctcagctgggtttatcgggaaaaataacctcccttacggacgatctgaaaggggcgttaagcacgccccccaaagagaccggagatggaaatccatggggcggcgatggcggtaccggcacggggaaaggcagtaagtcccaggtcgaccagttcaaaacgctgcggcagcaaattgaagaagcccatgcatccagcctggccagaattaacctgcaggaaaaggacagcaacagggagctgcaggaagcggcgaagaaaaatggcgccagtgatgctgacctgcagcgcgcgctgttaatgaacgcagagaattaccagaaacagcgactggatctggccgcgcagtattcccccgcccaggaaactctgcgaaaagagcaggaagccagccgggacctggctgagcttttcaaagcccgccttcttgatgaaaaagagtaccaggccgcacgaataacgctggccagagataccgcgaaagagctgctgcaggcgcatgccgatgaaatcgctgcgccggcactggatatcgccggcgaagttgatccactggtctcgctgcgcaatcagcttgcgcagcggcaggcattgctgcaggcgtactaccagggcagcgcgatcagcaaagaacagtacgaaatgctgatgcagaaggcgacgaaagaatccgccgatgcgcagtatcagacgtcgctggagttataccgatcacagggagaattccagagcctggccgtcgggttatttgaaacggcccatgagcgctcaagcaacttcctgacgagcatgctgacgcggacgagaagctttaaggagaacatggctgacctgttttcctcgctcacgcagtcgatcataaaaaacctcgttgatatggccgctcaggcactggtcaccagttccgtcatgcaaaccattatgggcgtggtgggcgtcgggaccagcgttgtcacgggcgctgcgggcgcaggctcggggacggcgatccagaatgccgccagtaacttccagttcaactccaaaggcggcgtttacgactcgccgtcgctgagcgcatacagcaaccaggtctacgactctccgcagttcttcgctttcgcaaaaggggccggcgtatttggcgaggccgggccggaggccatcatgccactgacgcgtgccggcgatggttcgctgggtgtacgcgctgtcggtggtggtcagaacgccggcgcgtcggaagggccaaaagtctatatcacgattgaaggcggaaacacctcaacgcaggcgccgtctggttttgagcagtttggccagcagatcggctcgtttgtggagaaaaaatacagggagctgatggcgcaggatatgcgccctggcgggatggtctggaatgcagttaaagggcaacgctaa

SEQ ID NO: 246018 - DNA, 366 bp, Klebsiella pneumoniae; identical to SEQ ID NO: 230654

SEQ ID NO: 246019 - DNA, 390 bp, Klebsiella pneumoniae
atgatagagctggcgattaagggtgcgctggagcgcatcaccggcatgaatgcgtatccgcttttactgccggacacggtccaggaaggagcgacctttcagcgtatctctgacccggaaatggtctcgggaatgttgcgaacggggatcgtatctgcccgtatccaggtgaacctgtaccttctcgataattacacctcactgctgcagctggataaaaaaatctggacggaactgaagtcagtcgttcatggccagctggagggtatcccggttcagtatgtggagcgaggcggtatccatcaggataaaaaccagctgacgaatcgtcgcattcagtatcgcctgacccgcgatttcatcattcactacgtggaggactcctcgtga

SEQ ID NO: 246020 - DNA, 921 bp, Klebsiella pneumoniae
atgacaacgaaattaattaacctgccgcacctggcagatatggtctttggcgtgccgcattacgtgacgcggcaaacaatggactccgtgaaagcggtgctcatcccccgtattcaggggatcaccgaagatgccgccattcagatggcattgaatccgggtaaatcacctgctgctgagcaggtccagcccaccggcggggtggcggtgatccccgttcacggcattctcgttccacgccgggggcagattacggcgatgtgctccgagctgaccagctacgagcggatccgcgggcagttgcaggcggcgttaaacgacccctcaatcagcgaaatcgttctggatattaactccggcggcggcgcagcggtggggtgcaaggagctggccgattacatttatcagtctcgcgatacgaagcccatcacggcgattgtgaactacagcgcgtattccgccgcgtatttcatcgcatcggcctgcagcaaaatcatcgtcagccagaccagtggcgtggggtcgattggtgtgatcatggagcacctcgatacgtcgaagatggaagaaaaaatggggctgacgttcaccaccatttaccggggagataacaaaaataacggcacccaacatgaaccactgagtgaagagtcgctgggtatgttccagggcatgatcgacgaaatgtacgagacgtttacggggtcggtggccgaatatcgcggcctgaagcagcaggccgtcattgatacgcaggcggggctgtattttggccctggcgcggtgtctgccggcctggcggatgaagtctctgacccccaggcggcgatcaatgctatcgcggcaaagtatcagcaaccccgtcaaaaaacctccattcagatgcaggcagccgcgatggacctgcaaaccaaaatgtaa

SEQ ID NO: 246021 - DNA, 429 bp, Klebsiella pneumoniae; identical to SEQ ID NO: 236263

SEQ ID NO: 246022 - DNA, 537 bp, Klebsiella pneumoniae
atgggacggagatcaggatttgaaggttttatacgtgctacaggcagagccgtagcagcagcagagcgtgagcgtaagagagcagagcgccatcagtttgccgaggctcgccgaatagagcgcgaaataaaacgtgataatgctcagagacttcgcgagcaaaaggaggctgataagttagcaaaagccatgtatttggaagaacgtcaagatgaagtttccgatcttaacgctgagctgaacgagactatctccgcgctttcaacaattctggaacatactctcgaatttgatgattcgattgatttttcggcgctgaaaaaacatccaaaattcgaagaattcaaaacacctaagcatctcttaccagacccggagccagagataaaagttgtgcatgctccagctgcatggaagactattttcccatgggtaaagaacagatattatcgagaattgcagcaggcagaagaatctttcaataaaagtaaggaagatcattcaattaaacttttaagccagaaggggctttgttga

SEQ ID NO: 246023 - DNA, 801 bp, Klebsiella pneumoniae; identical to SEQ ID NO: 236282

SEQ ID NO: 246024 - DNA, 993 bp, Klebsiella pneumoniae; identical to SEQ ID NO: 236283

SEQ ID NO: 246025 - DNA, 135 bp, Klebsiella pneumoniae
atgaactccgaactattcaactacagcctgaaaacgctacaggtgctgaacgttgtcgcagatttggttttatcagtggcgctgtttggctttgggtacggtcttcttaacttgcttgagtggtggcttgcatga

SEQ ID NO: 246026 - DNA, 384 bp, Klebsiella pneumoniae; identical to SEQ ID NO: 236284

SEQ ID NO: 246027 - DNA, 207 bp, Klebsiella pneumoniae
atggaagataccgtcctctcaacaaatagtgaaaggctagacgctaaactgagcgatatcgatgcagtgttagatatggtttcggtggcgatggcatccccggaagccagtttacatatggctcaaacgatgcgcctcatttgtatgtcacgtcggatgttgcagcggtgccgggatctcaataaggttgaaggaagaaaccactag

SEQ ID NO: 246028 - DNA, 231 bp, Klebsiella pneumoniae; identical to SEQ ID NO: 236285

SEQ ID NO: 246029 - DNA, 477 bp, Klebsiella pneumoniae
atgaacagtttaaaacgtatggctaaagcctggttgctgatgaatggtgccttcgtccttctcgtgatggcgacgcaaccagcgatggcaaatgagagccagagtcttggtttggatctggattcaattctgagcgcccttcctgctggctgggccagcggcgtaactgccgtatttatcgtgctgtatgcggtggcgcagctgcgcgccgtactccccccgtcagtgaccaaaaggattcccacggtggtcatgaaaattctcgacctcgttgccgcgaactatgcccacgcccggaacgctgatgcgatcagcaaagttgcgcgggatgccgggaaagccaaaggcccatcagatgttgattatcgtgtgatggtggaaacggccaaaaacaatggagagcttcgtggaagccggattgagagtgctggcgattatcctggagatgatcgcccaggcagtaaaagcccgcaatga

SEQ ID NO: 246030 - DNA, 750 bp, Klebsiella pneumoniae; identical to SEQ ID NO: 236264

SEQ ID NO: 246031 - DNA, 243 bp, Klebsiella pneumoniae
atgatgatctcatatcaggaacttgttcgcaccttccttaacgcgtgtcttgaacgggcaaaccgtgcggactgcaatgatgccgatgcggagattgcccgggcacgcagcgcgatcgaactctggtaccacctggcgatggcgggccgtgccccggaagacgtctccgacagggaccatctgcgcctcaccggaatgctcctgcgcgctcccacagcagaacaacgttcatggcagcagtaa

SEQ ID NO: 246032 - DNA, 1311 bp, Klebsiella pneumoniae
atggtacatttctgcgatcaaaaacatcatgttgtcgtgataggggctgggttcggtggactctccgttgtcagagaactggaagagccgggcgtttcgatcacaatcattgaccggagtaaccaccatctgtttcagcctttactttatcaggtcgctggcgcatcactgccatcagcagaaattgcctggcccgttcgctctctgtttcgtcatcgtgaggatgtacgtaccctgatggccgaggtccaggatgtggataccgattcacgggaggttctgctgaaagatggttcccgaattgattatgacacgcttgtcgttgccactggggccacgcacgcttatttcggtcatgatgagtgggaacagtttgcgccgggactgaagaacctggatgatgccacgaccctgcgcgcacggatcctttccgcttttgaacaagctgagaataccactgatcccgcgttacgggctgcctaccagacattcgtcattgtcggggggggaccgacaggcgttgagctgtccgggaccattgccgaactggcaaggaaaacgctgaaaaatgatttccgttctattgatccgacagagaccagaattattctggttgaagccggacaacgattgctcactgccttcccggagtcattatcggaatatacccgtcagtccctggagaaactgggagtggaagtcagttttggccaaccggtaacggaatgctctgccgaaggcgtagtatatggtgggcaacctcttcctgccaaaacgatcatctgggcagcaggcgtcactgcttctccggctgcacgctggctcaagacggaagctgatcgggctggtcgggttatcgtgggagctgatctcacgctcccgttacaccctgaaatatttgtaataggtgataccgcggccgtgaccggagaggacggcaggatgatcccgggcattgctccggccgcaaaacaggaaggacagtatgtggctaaactgatccagtcccgtttaaaggatgaaaaacctgtcctgaaacctttccggtaccggcatcaggggaacctggcgaccatcggtcgcggactggctgtggttgatatgggacggttaaaactccggggagccatggcgtggtggttctggaaaattatccacctgtattttttgatcggaaccagaaaccggttgagtgtcgctatcagctggatctggaaccacagtatcggatacaggggagcccgcattatcacgggaggtaaatcacctgatccggataagagtgcggtccattcccgctcagaagagtga

SEQ ID NO: 246033 - DNA, 831 bp, Klebsiella pneumoniae; identical to SEQ ID NO: 204351

SEQ ID NO: 246034 - DNA, 1335 bp, Klebsiella pneumoniae
atgaaagagtcagcattatctgctatccgttctgagatgcaatcacccgaaaccgtgtacgggatgccggctcataaagacagaacggccgctgtcaatgaagtacatgcgcgtccgcacctgcttatcacatcaccacagaccctgctgcagtttgctttcatgactaaaggcgaccagtcaggtgaccagcgggtcatggttgagctgtcagatcgtcttggtttaacaccatcagaaaattcagcacccctgcacggtatcacgtggcgggaaggcgctttgtattgtgaaaaacacggtgagttttccacctacttatggagtaccacatgcgatccgcgtgacggacagttaaggggagagaaccccttccggcatggtttcacgccaccgggttcggttatctgtggtacccgtctggatattctgccatggactgcagaatctgaggctgcagtaacgaatttagatcctgtcagcaggtgctattcagtaacagaaaatggccgtgccgcaattatctctgattttcgccaggataaagacgggctgacacgcattctgatacttgaacgggacctgacagaggcacagctgggtgcactggttcagcggctgcttgagattgaaaattatcgcacgcttgctttgctttctttaccacttacaagaaccatggcctctgaactgaggcgagtggaaaaccgactggctgaaattacagaagaaatgcgcaccggagagcatcgtaaaaatgaacagttgctctctgcgttgaccaatcttgccgcagaacttgaagccggcgctgcagcgaatctgtaccggtttggcgcaagccaggcctactatgaaattgttgaggaaaggctgaatacgctctccgaaacgccggttccaggctactacacctggtctgattttttgcaacggcgcattgccccagccatgcgaacctgccgttctgtgaaagaacgacaggcgaagctgtctgacaaactcatgcgggctatttcgttacttcgctcctggatagatgttgaactggaacatcagaaccgtgacctgctggcttcgatgaataaccgggccagacaacagctacatctgcagcaaaccgttgaaggattgtctgttgccgccatttcatattatgtggtgagtctgatttcgtatctggtgaaaggggttcccgggatccacgatgtcatgccacctgagctggcggttgccattctcgtgcccttcattgtgctcgcgatttggtgggtggtgcgaagaataagaaactcgcacaccgaccctgaacataacgaaaaccgctctgactga

SEQ ID NO: 246035 - DNA, 399 bp, Klebsiella pneumoniae; identical to SEQ ID NO: 204353

SEQ ID NO: 246036 - DNA, 276 bp, Klebsiella pneumoniae; identical to SEQ ID NO: 204354

SEQ ID NO: 246037 - DNA, 1977 bp, Klebsiella pneumoniae; identical to SEQ ID NO: 204355

SEQ ID NO: 246038 - DNA, 147 bp, Klebsiella pneumoniae; identical to SEQ ID NO: 147100

SEQ ID NO: 246039 - DNA, 267 bp, Klebsiella pneumoniae; identical to SEQ ID NO: 204357

SEQ ID NO: 246040 - DNA, 714 bp, Klebsiella pneumoniae; identical to SEQ ID NO: 204358

SEQ ID NO: 246041 - DNA, 492 bp, Klebsiella pneumoniae; identical to SEQ ID NO: 15993

SEQ ID NO: 246042 - DNA, 228 bp, Klebsiella pneumoniae; identical to SEQ ID NO: 105755

SEQ ID NO: 246043 - DNA, 465 bp, Klebsiella pneumoniae; identical to SEQ ID NO: 161500

SEQ ID NO: 246044 - DNA, 627 bp, Klebsiella pneumoniae
atgattaggtcactctctaatatatttagtgataaagtcaatattcctatacaaactcaggataaagacaatttatttcttgttgtggttgaggaaggagcgcttagcgccataaaaagactattcctgcaagggctgccttctaatagttacgcaatttctctggatgttgatactgcatcgttaagtgaggatgataaaaaaattttctctcggataaatcactatttggacaaaaaaaataaagccggtataaacaaaagatgcgatcttgtcctttttacagagagtaatggtcaaagtagtgtttatatctttgacttgaagtcaagcgatccagagccaatggatgtttgcaatcagttatcaaattctgagatttatataagatatattttggagttggctagatttttttacaatgtagatgtttctcgagtaactttcttcaaggttattgcgacaacaagagttaggaagagagttccttatgctaatgttgagttaagagaaaaggttgcaagaaagaaagcgttatttgataaatacaatataaaagaagtaactgttcttcctgataacaaaaaaggctatcttcagttcagcgagttatcaaggctgttttaa

SEQ ID NO: 246045 - DNA, 1428 bp, Klebsiella pneumoniae
atggatattactttcgaaaatcttggctttataaaaaaaggtaatattaaaacaaatgatattactataatcttcggcccaaataatgtcggtaagacatatcttagttatagtatttattccatgatgaaggaatatcgtgattatttttttaacgcaggttacgtaagtaataagatggctaccgcacttatttctgatggcttttatgaagataccatctcttcatttatcagagggcttgatcagaatgaactatgcaataaaatatctggcggcctgcctagattctttaaagacacgcatgggttgttaaaagaggcaaaggttaaagttaatgaaactattgatggcaacaaacttaatcaagtaagttttagggttactatttcccttagtcataatttcaagatgttcatttcaaaagtaaaaggggatgataaattaaagtttaccattgatgaggctgagataagtgatgaggatgctgtaaaacaaataaggaagccaacaataaaagaaacgcttagcagaatgcagatcttgataagatatgtagtgacaactaagttttttgattttcttgaaaaagagccatttattataacgtcagagcgtacaggtatttctctttttcttaaggagatcgataagaataggaataacgttgtaaatacaattgcattggaatcttacggaattgttgaagactctgataatacaataaagaacataatagaagatcgagtttctatattcgctgagccaataaatcataatattaatgtgattagagattcatttggtacagcacgcaaaataacaatggaaaaaaaagatgtctcaaaatataagaaaataatgtcgacgctcatggaattggttggtggtaattataagttgcttaacgaggatattctttttctggcgaaatctcctaatggtgaatccataagtattccaatgtccatgacttcaggtgcaggtaagtcgatgtttttaatggatgtttttctgaggagatacatgtctaaaaactcttatcttatcatcgatgaaccagagctaaatttacacccgaaaaatcaaataaaaatggctgagttgttggttagattgtcaaattacggagtgaaggttataataacaactcacagtgattatattgtcaaagaaattaacaatagaataatggcgagttcagttcatgattcttctgtattaagtaaattaggttatgatagtattgatttaatatcacacgataaagttaatgcttttactatatcttcagaaggggttatatctgaggtcgataaagatgagtttgggataaacgcaaggctattcgatgaggctattttagatgtggatagcagatccgaaattctcattggtaatcttatggcaggggtgaaagatgattag

SEQ ID NO: 246046 - DNA, 1824 bp, Klebsiella pneumoniae
gtggcatgggttagaactacggacagcgctgcccttgcggatgagtacaaaaacataaatggggttctgacggctaccggacgtcggatgccttctcaggatgccgtggacgcactttcgcgccagttgctggattcgattgttaccggagatgtaccagggttctggctggcactgaaagactctgctggctggatttcatggggagtggatgatcaggggggatttggatcacgggctgcttacctcgggacagacaatattttggcgggaaatatcaaaatcctgtttaccgatgatgtcggattacggtttcaggaccccgagggattctatatcgatgtgctggataatttcggacgctatttgttgggagattccggcggcggttcttcacctgctgacgaagtcagcattctggatttgaaaaataaagcttacgcggcggaagtttcgcggcgcgtactgacacggctgaaatttccgactgaggcgtataaccattttttgatggagtgtcagagccttggtatgggatatatgagctggccggttgtcagcaaaacgcctaaatatgattcgctaatgctggggcagtctgttcgtccggcgagcacgacgaacaatgcgtttgttcccctgggcgtaaatgcgtggcaacctctgcgggcagttgtacagtcagtctctggcagcgccattctgtccgatgcggagcaacttgcactggcacgaagcgcggttaatgaaggggagagtccgatcgttggcgcggtgaacggattcagacgacatttccttgaggcgcactgtctgagtgctgaccctggtcgactgtttgtcgcctccacggtcggcgtgtccggccagtcaattgccagcctgatggacgataccaaatattttaatcgtgtcgttgaatgcgtaacgaaggcaaaggccctggctgacagcgaagggaaaacctattcggttaccgggatcgatttcgttcagggacaacgcgactatgatgacggaacgcctaaagccacatataaaacgcaacttgggcaactctacaacaaagtcaataataccattcgtgggatcaccggccagaaagacaatccagcctggtttatttctcagacgggatacacctacagtcctaatccagccacgcagccggtgaacgctgtcgagctttgggtgggaatggcgcaatgggagttttgtcaggaaacacccaactgtttcctcattgggccggactatcagttgccggataaaggtggccatctgatgaccaacggcagtcgctggctgggttgttattttgccaaagcaaaagatcgtgtactgaatcagcggcgtccattccagccactcgctcccacgggtattacctgtgcaggttcagattttctgttgagttactacgtcgatcatccaccattaaaatttaccagcccgttcaggaacggaaccagaacccccatcactaatagcggatttcgcgcctggcataggattgatgccgatccatctggtatagggacagaactgaatatcaccagcgttgctgttgcagccgacacggttattcgcctgacatgcgatacagagccgcaggggaaagtccgggtggcctatgcaacacgcccccagtatgggcagggtatggtaaccgattctgataattacgtaccggatgaagtgtacgaatatgacccgcagttcacccagtggccggaagagaatattccggagctgatcggcaaaccctatccgatggaaaactggtctattgccttttccatgaccttcaataaggatgaataa

SEQ ID NO: 246047 - DNA, 1602 bp, Klebsiella pneumoniae
atggaactacgtacacgtaacaaaaggcgaattctaaccctggccgctttagcaggattgagtatcaccgcaatgtctgctaatgcttttgcgcaggagctttcacctgtagttcaaatgagcaaggggactatcgaaggcgtcaaaaatgacgggtaccttcaattcaaaggtattccttatgcgaaggctcctgtaggcagtttgcgttggatgccgccggttgaagaagaaaaatggtcgggcacgttaaaagcgaaccattttgccaatacatgtgccaccaagctcactttgggtgggtttgggccagtaagcgctgctgaagattgcctctatcttaatgtttataccccagcggttttgccagaaaacaacagtaaactgccggttatggtgtggatacccggtggtggattaggttctggttcgggtaatgaatacgatgccagcaaacttgtcagtaagaatgttattgtcgtcaccatgaattaccgcctgggtatgtttgggtatttctcacatccggcattgaaccacgaggggcataaggcgattaattacggtaccttagatcagcaagctgccctaaagtgggtaaataagaacatccaatcatttggtggcgataatcataatgtcacgttatttggtgagtctgccggcgggcatagcgtattggcacaaatggcttcgccaggtgccaaggggttatttaaccgcgctattgtttccagtggttcatattccctaaagcagccaacagtggctgaagcaactaaaataggtgaactggttgccaagaatgtcggctgttcggaaggtacggaagaaaaaatggcagaatgtttacgggcagtacccaccgaaaccattctggataagggcgttaactatatgaccaccgcacaggttgtgaccgatggtgaggtgatgcctgaatcattggaggccgcttttagctccggccgctacaacgttgtgcccattattaatggatttaataccaacgagggcaccttctttgctgccatgatggagctggattcaggtaaaccaatagacaacatcggtttttacgagggtctgaaagctttctttggcgagagtgacgcaaacacgctaataaagcgagctgcaatccctgccaagcaggtcaatcttggccaagactacgcagatttctttggccgtgccaaatttatctgtcgcacgccgatgatgaataaccttttggctaaaaacacgccggtctacagctatgagtttgcggataaaacggctcctcagtttgccaaacctgtgtcgttcccgtacgcagccgcacacgccagtgatctacaatatatcttccgtgatttccatggcactaccggcgagttgcataaactcaatcctgcacaagagaaactttcaatcttgatggtggattactggaccaactttgccaaaaccggcaatccaaatgctaaaggcctgccggtatggggtgtctaccacccacaaaccgaatcgaccctttatctacacacccaaaacaccaaaatgatcgagggaatttcaaaaaccttcaattgtgatgagttcgcaggggtactctga

SEQ ID NO: 246048 - DNA, 204 bp, Klebsiella pneumoniae
atgacagaaagaaaaagatttattcgtttgcctgaagtgctggaaaaaaccggattaagtaaatcttggatttaccgactgatcggtagagatgaattcccttctcctataaagttgggtggaagagcaatcggcttcattgagagcgaagttgatgaatggattgatcaggtgatttttttatcacgtaataaagcaggttaa

SEQ ID NO: 246049 - DNA, 576 bp, Klebsiella pneumoniae
atgaatcagttgttatcatctgttgaagaatctttggcgaaggaaaattggttcggtgctttgtttattgccatttcactcccagatatctgtggcgccacagaaaacgctgtgcaaggaaatggtgccagatatagagattggtttaatcggtatcttaaaccgcgatacaaccccgacaacttctatgagtacatgctcgtcacttcgcctgactctatacagggaacgccgccagaaattatagcgcaatggaagcaacagcctctagctgtcgcatttactgcagaagactgttggagcttaaggaatgcatgtttacatgaaggggtggatgaaaatagattgcggaagtttaaaattacaccaccaaccaatgtgggcttatatatgcatatgaatagcataaatggcacacttcaacttgatgtcattgaactttgtagagacattgttagcgccgttcggcagtggatcggtgatatgcaacaaaaacctgatgtggttgctaaattagaaaaaatgatcactattgataaaagcacatttaaggggattgttgattttggggactaa

SEQ ID NO: 246050 - DNA, 306 bp, Klebsiella pneumoniae; identical to SEQ ID NO: 136289

SEQ ID NO: 246051 - DNA, 1332 bp, Klebsiella pneumoniae; identical to SEQ ID NO: 136285

SEQ ID NO: 246052 - DNA, 312 bp, Klebsiella pneumoniae; identical to SEQ ID NO: 27040

SEQ ID NO: 246053 - DNA, 414 bp, Klebsiella pneumoniae
atgagtcaattaattcaaaatataaaacaaaaacagaagaagaagaaagaggaagaattgcaagagcaagagatattgaacaaattaataaacagcaacaactcattaaacgaagaattgaggaggttagacgaacggacagccagctctcaaagtctattgaaacaacaaatgaaagagttagaagagatcgaagatcgatacaatcaattatatataatgctcgaagacacattagaacgctttcagcttattttagaaaaaacgaacacaaaagatattttgaagaaaaaaaacgactcgaagaagaaaaacaatttaaccaaaaaagaagaaaaaaatttatatattgaggatataaaatcaatgcttaatattttattagatcaatacgaaaaaaccgcgaacaagtga

SEQ ID NO: 246054 - DNA, 1413 bp, Klebsiella pneumoniae
atgaaagaagatcaagacgaaatacaaaacttgttagctgaaagagaatgggaagaatttaaaaaatcttcatttggtaaattctttacagcaaaacagatgaaggaacaggaattaacttatttaaataataaagcattagatattgtaaacgaagaagacttattcgaagtaatgtcattaattccacagccttttattaccaatgaaaatataaaaaaggctgatattttgagtgttatatataataatttcattgaagaaacagaaataccattaacacttccgatattttcattttttagctttttaagtgcttattgtgtaaaaaacaatattacatattcaatgccgttatctgaaaaaaaatctcatgttaatacttgggttacggttttagcaccgtcaggatcagcaaaaacctattcattaggaaaaatagaagacttaataccaataaaacctgatggagaaaaagtagttgagcaaaattttgtcaagccgtcaggcccagcaaaatttattgaagagttttcaaatcttccagactccagagacggaaaatctcaatatggcttttggattgaagacgaagtggctcaaatgttcaaacaagttgaaagagaaggaaccccgctttcagaaataaaagaatatttcttgaaagcctatgacaataaaaaattaacaagaaaaagcaaaaaagagacaatagaaactaaaaatctaatattggttttatttttcataaacacttttgatagttatgtgaataatatatcttccgagtctatgaccgatggtttaatgagaagatttaatcttgtttatacagaaaaagataagagccgagattttaccgatttccctatatacaacgagaaaaaaatcacagacgaaattttgtctgatagatttgaagatttatttttcaatatcaatccagatgtaaattatacattttcagaaaatgcttttgaactttacagaaaatatttcaagatcttttggcatagaaaatataaaaatattctcacagataaagaaaatttttatagaacatatatgatgcaaagctggaaatttgctgtattctaccatttaattttgaaaaaagaaggaacagtgatcgatggtgaatgcttaatatatggaatgaaaatttctttgttatttgccaacagtatgaaaaagttttttgattttaaaaataaaaatatatcagactcaaaaagagaaaaacaaaaagatactttattgaaatatgctgattttctcaattcaaaaccagatgcgacagttagagatttttgcagaaaattcagtattaaaaaagcagatgctgtttcaattttgaaaagtcttgaatgctcaggaataaaacattcaatatttgaagttgtgagcaaataa

SEQ ID NO: 246055 - DNA, 423 bp, Klebsiella pneumoniae; identical to SEQ ID NO: 168236

SEQ ID NO: 246056 - DNA, 354 bp, Klebsiella pneumoniae; identical to SEQ ID NO: 168235

SEQ ID NO: 246057 - DNA, 237 bp, Klebsiella pneumoniae
atgtgtccggtcgttccagtccctgacctttccgccgaacccagcaggtccgacagccctcgtggtcagcatgatgtgcgcatggggatttgttttatccatgtgatggaacgccacatcagcaatcatgccctgactgacaaagttttctctgacaaaggcgagaacggtttcccgtgcggcatcctgcggcagttcacgggggatagcgagttcaatttcccgcgcaagttgtga

SEQ ID NO: 246058 - DNA, 255 bp, Klebsiella pneumoniae; identical to SEQ ID NO: 7207

SEQ ID NO: 246059 - DNA, 693 bp, Klebsiella pneumoniae; identical to SEQ ID NO: 7206

SEQ ID NO: 246060 - DNA, 1089 bp, Klebsiella pneumoniae
atggaaaaattgcgacagcattaccggaaggtggagaaacaggacattcccgcgagtcagacggcatttgaaaaacagtggcagcagtggggggcatccggccttgcagctctcagagtccagttgcttaaacgtgaagaggaattgcgccggaaggagcaggaggatacagaacgtagtcgcgcggagcgacgagcggaacagctcaggaaaaatgacaatgccgttatggattcaggggtactgagcgcagtcgttacggggtatggcgaggcccccatgcctggtaacggggaaatgacctgttaccttctgcttcacaaccggaacggagaatacacgctctgggggaacgagctggagaaataccgcaccagaatctttgagcgtgttgatttaatgcgtgacaggagtggttatatctgtgaccgaagcgaaatcggtcaacatccaccactgcaacgtgtttattcctctgcgacctttgagcaacttctgacgcaggtttgccagacatggccgcaatatacccgcaatctccgccagccgaagacatggccggagtctttctgtcttggagaagaccgccagccagccatgccatcactggcagcaaggaaggtggattttacgcagggacgtctgctaccgacgctgatgccggtaatgagttctgtcgaccgggaaacccgccagcttcagcttttgctggtcatgggcgtggatgactctctgggcggtgttgtccggcttaatggtacgctgtatcccgcgtttgccgttccctcagccgataacagccagctggtcatcagtgcactgaccgataaggggttacggtatgcagggtatggtgttgccgtaaatcacgatgcagacagccacatatcacctgcgccggaacttatggagtttcatctgaaaacccgtgaggcaccgctttttgctgccgtcaacacaccagaaaaacagccggatcatctgttccgctctctgggtttcaatcgtacctgggatgaatggcggcgcgaggaagatgcaagaacacacaccaccgagaggagacatgatcgcggttggtcacagtga

SEQ ID NO: 246061 - DNA, 192 bp, Klebsiella pneumoniae; identical to SEQ ID NO: 225803

SEQ ID NO: 246062 - DNA, 420 bp, Klebsiella pneumoniae
atgtacggaacccgtgaagatctttgcaggatgctgaatgagcaatatcccgcagaaaccccgctgaacctgattatctggaccccggcggatattgaggcgctggctgacgggatggaatattccttttcagaacatgacgtaagggcagtactggaacgcatggacgctataccggaagaaaaacggcttgagtcgggcgtgtcagccggcctggtgatggcactgatagaccaggtgaaagagaacgggcagagggtgactgtgccggttgacctgcttgaaaccctgctgattaccgccgaacaggcattgtgggacagggaatggaccgcacgggatcgcaatctcccggtgccggaaagcgtaatgcgccgcctggcggatacagcaaaagtgcgggcattactgaaaagctga

SEQ ID NO: 246063 - DNA, 564 bp, Klebsiella pneumoniae
atgcatcatgaccttaaacaccgtattcaggcgatgcgggacaaactggaagggcgcgcccctgtcgctgaaattcagggtagctcgcaactttttgtcaccccctccccggaatgtcgccggctggttgagctggctgatgtccgggaaaccgatcgcattctggaacccagtgccggaacgggcgccatactgcaggcgatcagggatgcagtcccccgggcgaagtgtgacgccgtggagctgcacgccgggttagcccgtcacctgcaggcgcatttcccggaggtccggatctggtgcggagattttctcgaatatcatccggagcgccggtatacccgaattatcatgaatccgccgtttcatcgcggtgatgatatccgacatatccggcgggcattaactctgcttgagcctggcgggattctgacgggcatatgtctggacgggccgcgtcagcaaaaggcgctggagtccctggcggacgtctgggagccattgccgcggggaacattcacgtatacccaggtagcgaccgccattctcagaataaccgtctga

SEQ ID NO: 246064 - DNA, 255 bp, Klebsiella pneumoniae
atgattattaatggcaaaaagataaaagcaaaagatttagcgaaagctgctggagtatctcgttccactgttattaaatactatggtattactcgtgaggattacgaaaggcaagcctcagaaaatagaagtcttgcatattacttgagatcatctggcctaaaatggaaagaagtcgcggaaaaaatgcatacaactcaaaacagcgccatagcttattatagaagatacattgctcaaaccaacaagctatag

SEQ ID NO: 246065 - DNA, 726 bp, Klebsiella pneumoniae
atgaaagaaaaggcattgttaaaaaaatatatagggtttaataatagatattttgtcaatggcttggttttcgatatagatcatgataaaggttctatagcatgggatttggctggtttacctcgtcctaataccattatacagaacacgagaaatggtcatgcacatttgctctatgctttaaaaaagccggtattaaaaacagattctgcaagaataaaaccactgaaattagcatctattgttcaatgcggctttacagaaagattggatgcggacaaagcctatgctgatatattgatgaaaaatccgctaaacgaagcggaatggcgtacaacatggacggataccgaggcatatgatttaggttatttggctgagtttgtccctaataccattacctttaaaaataaaatgaaaagcacgatttatggattaggacgtaatattaatttatttgaagatttgaaatataaaacaaacaaagagtattatgctttttataatgcaatgttcttaacggctataatgctaaatgaccatagtaaccctgataatcctttaccacacaatgaagtaaaacaaatctgcgccagtatatgcaagtggacatggaaaaacttctcaaaagaacagttctctattattcagtcaatacgtggcaaaaaatcaaaaaaaacaaatgagaagttaagattagcaaaagcactggagatattattatga

SEQ ID NO: 246066 - DNA, 531 bp, Klebsiella pneumoniae
atgcgtaaacttatgttagtagcgggtgcggctgtcctgctgtcgggttgtggtgaaaagggtgactttgagaaagcgataaacgccaagatcgggcaggccagatattgcttctcactgggggataacaataccagtttccccgtccgtcttgccaaacctcgacttgacccgactggtacagggacgaattcggtaatccttgatggctttattgaacaaggaatgatggtttttgataaaggctacgaattcaatgtattaggaataacagacgaaggaataaaggctaaagtctggagcacaaaagatggtgcttgtgtaggtcgtcgggccgttgacgagattaaggaatggacagagccgggtaacggcggccagaaggttgttcgcgtatcctatacgtggaagcttgttgacattccgagctggattgacagaaaagcgttcgccagcgtcaagggaatgaatgaacctgctgatgctgccatgaatctcgttaaaaccagcaatggctggaaagctaattaa

SEQ ID NO: 246067 - DNA, 612 bp, Klebsiella pneumoniae
atgggctatgttgtgcaaagttcattcggtgaacttgccactgcactagatatgctggcgccaaaaaatgagcgaggagtacagcatcgcgtacggcttcttggcggaccaattagtaccaagtggcgacaattaccgcttttaccagttgaaatacgttcggctatgaaggccacacatgcgagagacatatctgccgttgattcagagagtgcagcttttcgaggtattttagctggagttggcgctcttggtagtacattggctgatatttggattcgaatgggttgggggacatggacttttattgatccagatcggcttcttccacataatttgtctcgccatattgggtttgattgtcatattggagtctcaaaaccccatattattcagcatattgccgaatctatttatccgcatgagcccctccctcaggcgatccataaaagtattcttgatgacgatgatgatattgccaaggcagtgaatgaggctgacttagttgtggatgtcagcaccacctttgaggtgccgaggactctagcgttaaaagatgatatacccagaatagttagtctgtttctgactccatcaggtcagtctaaataa

SEQ ID NO: 246068 - DNA, 348 bp, Klebsiella pneumoniae
atggatatcaacgagacctttatcagccgcggccgtgacaatcagaaacccttccgcctcatcaccacgctcaaacggagtgcttccgatcgcggccatgaggattggctgggcatctttacggtggatgaaatagggctgcttcttgtctccttcacgcttccattcaaaccagccatcggcaaagcagatcgcccgaccgtgctgccaaagaggtttaaacatcctgctgctggctgcggtctcaacccgggcattaatcaatggcggtttatcccaccaccctggcgcgtaaccccagtgaaccggatcgagctgcagctgttcgtcgcgttcgctcagaagtaa

SEQ ID NO: 246069 - DNA, 987 bp, Klebsiella pneumoniae
atgacaacctcaactgatataaaaagcactccttctttagctattgtggtaccttgctataatgaacaagaggcttttcctttctgtctcgaaaagctttcgaatgtactaaattcattgatagccagaaataaaattaacaacaatagttatcttttgtttgtcgatgatggtagtcgtgacaatacttgggcacaaattaaagatgcctcgaccgcttatcactatgtgcgaggaataaaattatcaagaaataaaggacatcaaattgccttaatggcagggttacgctcggtcgatacagacgtaaccattagcatcgatgcggatctacaagatgatgtaaattgcatcgaaaaaatgattgacgcttacagccagggatatgacatagtatacggcgtaagatgtaatcgagacagtgacactttttttaaacgtacaacagctaatgcattttacgcaataatgtcccacatgggtgtaaatcaaactccaaatcatgcagattatcgattattaagtaatcgtgcgttggaggctcttaaacaatataaagagcaaaatatatatttacgtggattagtgcctcttgtgggatatccctcgatcgaggtgcaatatagccgtgaagaaagaattgcaggtgaatcaaaatatccaattaaaaaaatgcttgcgctggctctcgagggaattacctcattatcagttacaccgttacgaattatagctatgacaggttttataacttgcatcatatctaccatcgctgcgatttatgctttaattcaaaaaataacaggtactacagttgagggatggacatcagtcatgatcgctatattctttcttggcggtgtgcaaatgctttctttaggtattataggggaatatgtcgggaaaatttatatagagacgaaaaatagacctaaatatttcattgatgaaagcgtaggtaatgatctgtctcttatacacatctga

SEQ ID NO: 246070 - DNA, 264 bp, Klebsiella pneumoniae; identical to SEQ ID NO: 149358

SEQ ID NO: 246071 - DNA, 1347 bp, Klebsiella pneumoniae; identical to SEQ ID NO: 31725

SEQ ID NO: 246072 - DNA, 2442 bp, Klebsiella pneumoniae
  misc_feature (1736)..(1745): n is a, c, g, or t
atgggcactcccgaggaagtgctttatgcagatgtcgccatatcgatttgtcgtatgaggcttgcagcatctgcttgggtaaccctctcccaatattcaggtttatcagtggatcattggcggccggtcattcagagggaacgctttcctaaagaactctggccttctcagattcttttaggggaaagagggatattcagaggtgactcgggcttgattcagatgcctacaagtgccgggaaaactaggtcgattgagttagttctgcgcagtgcattcatgtctgggcgcacgaagcttgcggttgtggttgcaccctttcgggcactctgccatgaaattgccttatcacttcggcaagatttggccggcgatgacattaaagtcaatgaactgacggatgccttgcagattgacttcgttgaacaaattgctgaccttctgggaagtgccccgccctcaacatcgaacgtattagtcctcacacccgaaaagtttctctatgtgctgcgtcagtcctctcaggctttgaaacacattggtcttgtcgtttacgacgaggggcaccagtttgatactggcgtgagaggtataacctatgaattgttgctcaccgaaatcaagggattgctgcctgatacagcgcagactctacttatttcagctgtgatgcaaaatccacaggccattgctagctggctgatgggtgaggataaggcacaggttattgacggcgcaacgctattacctacgagccggtctgttgcctttgcaagctggacagagtcgcttggacagttaatgtttcatgaaaatggatatgacaaagaggactactttgttccgagaataatcgaagcggcacagctatcgggaattaaagcagacagctcgatatttccgacccggacgaaatcgagcgacgtatcgctctatttgggtctacgcgttattagtaagggatccgtagctattttctgtgggacaaagttgattgcaaatggtatagcaaaaagggctgtccagattgcggatgcaggatataacacgttatggccttcaacctacgctaatcctgaagaagtcatggcactgaaaactattattgagggtaatttcggtagcaattcctttcttttaaaagctgcaaagctgggtatatacacgcatcacagtaatacacctcagggtatacgcttagcactagaacatggtatgcagaaaggactgattaactttattgcatgcacatctacgcttgctcaaggtgtaaacttgcctattcgctatcttatcgtgcagggagtatatcagggggtaggacgtgtcaaagttcgcgacttccagaatcttattgggcgtgccggtcgtgcagggatgcatactgagggggttgtaatcttcgctgattcaacagtttgggacagaaggaaaaattggcaggaaggatggaaatttcaaagcgctgtggagcttctctctcctgaccgcgctgaaggcgttaccagttcactccttttattgttaaaaccttttgcactcccccgtaaccaagaattgccctttgctgggggcgatttgctggattttatggataaggaggttgagtgggaaggctgggctaatctggtggcggattcagaccctcgcctcagtaagtcgcaaaaagatgctctagtaaaagcgctgttgagctccgcttgcggctcagggggaagagaaactaatggcagtgnnnnnnnnnngaaaaagatgacgcatacacttgaaagctatctaatggcaaactgtgctgcgatggatgcaaccgcctttgaacagagggccggggaacttgcacgcgagacattggcgtactcgcttgcctctgccgaagaggctgagaaacttgaagaatacttcagattggttgccagacgtattgagtcggttgagagctcacccttaaagcaggcattcttcggcaagacattgctgggcgcaaagcagactaaatttattgaagtatggtcaggcgaacatagagcaatgctgctagcgctggattcctctaatggatggctcaatgccgtctggccactactgaccgagctctgcgacaatcgttttttccgtagcgtcgagcctgcaggtgcagggttcgagatcgcactttcgtggatgtgcggaatgagttacggagaaatcttcaagaaagcatctcagatgcaggttaaaaagaaagccggtaagcgtaaacaaaaagtgagtgacgacgatattcttaagttcttggagagcacactggcatttgattgttcgctcattctggcagctcttgcacaattcctttttagtccagaggaaataatcggagagcaaggggcatcgctcgctcattttcagaagagcctaaaaaatggcctccctgacgtgctatccctgtctcttatacacatctga

SEQ ID NO: 246073 - DNA, 141 bp, Klebsiella pneumoniae
atggcctccctgacgtgctatccctgtctcttatacacatctgacgctgccgacgactccttacgcaagctattcgcgacgctctcctccaggatggatatggaggcagctcatttgatgaggctaggcaaaatcatttaa

SEQ ID NO: 246074 - DNA, 150 bp, Klebsiella pneumoniae; identical to SEQ ID NO: 133418

SEQ ID NO: 246075 - DNA, 144 bp, Klebsiella pneumoniae
atgattctgaaaggcgtgaaaatcacctttatgaaaaatccaaattacttaaaaatcagattttgcatacaattaattttgcagcagaaacagattatctatattcggttgaagaatataacccagatttgggtggtctggtaa

SEQ ID NO: 246076 - DNA, 1128 bp, Klebsiella pneumoniae; identical to SEQ ID NO: 118693

SEQ ID NO: 246077 - DNA, 261 bp, Klebsiella pneumoniae; identical to SEQ ID NO: 220389

SEQ ID NO: 246078 - DNA, 219 bp, Klebsiella pneumoniae; identical to SEQ ID NO: 139472

SEQ ID NO: 246079 - DNA, 315 bp, Klebsiella pneumoniae
atgacgctgaaggcattctggccacagctgttcgacggaaactcaccccgtctgctggcgacgggcatgcgcgagcagctgtttgccgacattgtgaaccgcgacctgccgctgtcgcataaacaggtcattaagtgcctgaagagtctgacccggtctgcgggctatctgtcccggatgaaggtgggggcctcccgctatgacctgcagggaaatgctgtggccaccgtcactgctgaagaagctcagtacgccagtgagcgcatgatgaaggagctgctgcgagctgaacgaaagatgagtcagaccctttaa

SEQ ID NO: 246080 - DNA, 240 bp, Klebsiella pneumoniae
atgggcatatttctcatcgagataatggtgccgactaagctggttttacctgcgagacagtccctcccccccccctggggtgactctaaaggtgcgatttccgtatttttaactaacaacagggtaactaacgattgccctgttcgtctgaaagattccctcttacatccgggatattaccgcatgtacgggcccaccattagtaaccggtcaaccatgagaatgacctgcacaaaatga

SEQ ID NO: 246081 - DNA, 231 bp, Klebsiella pneumoniae
atggtggatgtactggtcattggcggcggcaatgccgcgctatgcgccgccttaaccgcccgggaagccggcgcctcggtgctgctgctggaggcggcgccgcgggagtggcgaggcggcaactcgcagcacacgcgtaacctgcgctgtatgcacgatgcgccacaggatgtgctggtcgacagctacccggaagaggagtactggcaggatctgctgcgcgtcacctaa

SEQ ID NO: 246082 - DNA, 891 bp, Klebsiella pneumoniae
atgcttactgttggaatatatgggttcaatatcaccaaagtgactcatttttcttttggcactatatttccagtaattaaatccgcatctgaaataacaaaaataatgcgaataaaaacagaactacaccttacggcctttctagaattggacattaaggataacaatgagtgccaagacataatatttcatctttcggcaatattatctttcatagaacaacgtcctgtatcttttggatatgcattaaaaaaacacgagaccattgataatcttgacaatgattaccttaaggtaattactaatacactccctcttgttagcaatgggataatgattaaagaagactatttcgctaaaaactccagaagatattttattgaatccgcattaaacaaaattatcattgataaagaccatcaattctctcttctgctccataaaaacacgcaagttttcattaatcaaacaaattatatagatataaaatactatctattattttcgggtttagagtctatagctcgccaacgagaaaatgaccttaccagcggtatagcctctgtactgtataaataccttaaaaaattcaattttgatatcaaacaacaagacaataaaagaccctctcactctctcgatatttatgcgagtttacgcaatgcacttttccataacggcacataccaaactccccctttaaaaaggaatggtgcgataagcacatttttactaaaggattattactctatattccgacgtctaaactgccttgtcattttgaaagaggccggatttgacgatggaagaattaattgggattttgtgaatttcagatatcacttcaaacacactaatcaagtaaccagtgtaacaacgtatcgcgggtga

SEQ ID NO: 246083 - DNA, 339 bp, Klebsiella pneumoniae
atgaacaaaatcgcatacaagttacccgagggtgacctggcttcgcgcaatcaggctatcccccagcgacacaagattgaagtttttatcaaagaggggaactcagtagatctggatttgagcggcgtttattcaatttccgaatcttactctgatgaaatctttggtgtgctggttgtaaaatttggtgctaccaaagtcctgaagcaggtaaaggttagaaacgcatccccctcaattctaaaaagcattgcaaaggtaatccaacgtcgtagtaatgaggttgcatcaaagaaggtgcattctgttggatttgatggcgcgtatgctgtttgctaa

SEQ ID NO: 246084 - DNA, 975 bp, Klebsiella pneumoniae
atgggtttaggattaaaagacgctattgttcacacggctgcatttcatcagaaagatgagaacaagttacttttgccaaacaaccactggcaccccggatttattaccgtattagccgcttacgtaaaccatcatcggattgctgaggaaaactgtaccttatccagccctgactacatgagagccataaatttgcagggagcgttatggggacaggaccagtatcagcaagagcgtgttaatgttggaaaaaattacagtttagttacagctctaacgaatgttgaggctgttgataccgcaaccagtagcattaacagttgcgtacggcagttaactttccctgagcgtgatccgcgagactacccaaaggggcttacggacctgactcatgtgataggcgagcttcatgataacgtctggtcacatggtaaatccacaggcttctcctttgcacaacgatcggcagtccctcatacgaatagacaagagcattacttagagttttctttagccgattgcgggttgggctttctgagggagctacggcgagcaggcattcagggtattgaatctcatcgtgatgctatcgcatggtgtatccaggaagggcattcttcaaaacatgccgatctacaggatgattgggcgcaacagcttcctcaggattttatgggtggaagtatgtttggtaatggggttgctgtaaaagaaaaagagaataaccatcaagggcttgggttgtaccacttgatgaaattggtaaaaacatacaacggggaattgcaactggctacaggaaatgtatgcttagaggcaattggtgatgaagtgagctacactgagttacgtaatgattggccgggtgttgcgatttcatgccgctttaagattcatcaactggcagtagataacgataacgaagaaaatgaccctcagcttatggaaatcatgcgggcgttaggaggagagtaa

SEQ ID NO: 246085 - DNA, 1041 bp, Klebsiella pneumoniae
atgaacttttcagaagcacttgcggaaattcaaaaagaaagacgtacggttggattcgatacgtatgacataacaattaaacaacttattgatatggtcggtgaaaaaaacatcaatgtttccccagactatcaacgccgctttgtctgggatgcaacaaggcaatcacaattaattgaatcaatcttccttgggatccccatccctaatattttcatggcaacaaatccagatgcatcttgggaagtgatcgatggattgcaacgtataacaactatcctccgctttgcctcgcataaccttgcggtcattgatgacaaaatgttaggaccactaaaattaaaaggattagaaaaggtttcctctttaaatggcgtcttatttgaagaaatgccaaacaaccttaaacttaattttttaaccagacccctcagagttaccgtcctaaatgatcaaagcgattttcaagttcgcttcgatttatttgaaagactgaacacaggaggcatcatacttcatgatcaagagattaggaattgtgtattccgagggcgatttgccgagttcatcaaagaatgcgttaaaaaccctgacttcgacaatgtaattaaaagaagtgataaaaacgggcgtggaaatgtggaagagttagctcttaaattttttgcttattatgaatgcaggacactattcaaacattcagttaaaggtttcctgaatgactacatggagaaaaaaacaaaatcttttaataacgaaagagaattaagtgatatattcacgcgaactttctcagaaataaacagagtattacctaatggtatagtgcgtgcaaatcgtctgaactcaacacccttagtattatttgaggcaatttccgttggcgtagctgacatcctaaaggcaggaaatcaaatcaatgctagaaaactcaatgaattattagaagatgaagcactgaaggaattaactactggcgctacaaatagtcttccaaaactaactggaagaatagattttgtttcacagcaggcaatatga

SEQ ID NO: 246086 - DNA, 672 bp, Klebsiella pneumoniae
atgatgagctttgacaacgcacaaattgaaataagagataggttttcagaggcgaactctcttttggcctttcttcgttcaaacggtccagctcccctacaaccagcgagtgaaaatataaaatcccttaaagggctttggttagtctccatatacgccgcagtagaaagatcggtcaatgcagtaatggaagctgctctagaagttatttccaatcacaataataaaagtattgattgcattccttcgcttcatagcatctttcacttcaaaggaataacatcgataagggattgcggaagaaataaggttttcgacaaatcgatttcattattcgaagcgactcatagtgatgaagttatgaaggtgaaagacaaccccttatcagagagtttacaaaacgttgacgcgacaacgatctcttggatacttggtctttttggcgcgccaaacatagcagtttcagcgccatctattgggcgagttaatgctcttcgtgaaaggcgaaatgccgttgcacatgggcgtgaaagcgcctcagaagttggagaaagatatacaattcaggaattagaaaatatttacaatgccgcagatgaaattataactgctttttttctaagcctaagtgactattgcactaaacagcactaccttaaaaaccactcgtaa

SEQ ID NO: 246087 - DNA, 198 bp, Klebsiella pneumoniae
atgaccaagagactcacggacctgatcggttttgtacattcagtaacgcaggcttacgcgacctttatttttctcttttttaaccatgtacttagcaagctgaccatgatgaattttttggtatacagagccacgggaaataccttcccactccgcgaactctgcaggcgtagccatctcttttggtactcgaattga

SEQ ID NO: 246088 - DNA, 624 bp, Klebsiella pneumoniae
atggatcttaacatgacggaaatactgaaatacttataccccttgcttccagtgatcgtatcaatcattggcttgaaagcgggttggatatataaaagggacaaagtctttaactccagaaaagcgattagcgaattttcgtacagcctctataaaaacacaaatgacgaaaattttaagcgaattgctgaagaatacggcatttcagcattaactaaagactcaaatctgactccagaacaaaggagaatacttttacggtctaaagatccagtaagagatattgataattacagcaagtgccaaaaacttctgtatgtcagtgataattcgacaatatttcaatggacaaaaaaaagatatcgcttttggatttggcgaaaggctgtagaaataactagttgcatcatctattttatgagtggctttgtagtagcaatgcctttcatgtatagcactatgctcagtagtgacatggttgaaaaaataaacacatcatcagctatgattaaatttggtttggcttcttactgtgtactgattggaatcagtatagggatgctgttcctgcataaactttcgacaataaatgttgcagaaaagaccatcaaatctaaccgataa

SEQ ID NO: 246089 - DNA, 687 bp, Klebsiella pneumoniae
gtggtattacttgagtggtcagtcacccttgttttttccatcctactggcatacaaacaatcaacgcatccctcacccatattagctatcgacctgctgcagtctgctaaccttctactctcttctcttacttcaatatgtgcttttaccgtacaggggttagcatttgtttcattgccatttctgtttctaacggtattacataaaaatcaaattgagacagggttacttatcaccccctggtctgcgatggtcgcggttatggcaccaattgcagggcgactttctgaccgttataaaagtgaaattctcagcggtgccggtctacttattctgatgggaggaatggtctctctcgcaatggtatcagactcctcctttatgtttggcacaggagtcaaaatggcgatttgtggcattggattcggcttgtttcagtcaccgaacctgcgggctataatgggctccgtaccagccgccagaagtggaagcgcaagcggtattgtcgctatatcccgattgcttggtcaaacgtttggcgctgggcttgtcgcactgtgcctaagtatatttccaggcaaaaacataacaattgtactctggataggcggtggtgttgcaatgggtgggtttattatttgtactctccgctgggtgcttagcctaaatcatgaggcgataaaataa

SEQ ID NO: 246090 - DNA, 498 bp, Klebsiella pneumoniae
gtgtggctgctgctgctgttcgtggccgaagcctataccagcagcgtgctgcagcatttcgaagaggcgctggagtcggccattgcgctggccttctttattccgttactcatcggcaccggcggcaacagcggaacgcagatcacctcgacgctggtgcgctcgatggcgctgggagaagtacggctgcgcgatatggggcgggtgatccgcaaagaggtgtcgacctcgtttctgattgccttaacgctggggctggcgggctgcctgcgcgcctggatgatgggcatcggtatggaaatcacgctgatcgtcagcctgacgctggtatgcattaccctgtggagcgcagttgtctcgtcggtcattccgatggtgcttaaacggatcggcatcgacccggcggtggtttccgcgccgtttatcgccacgctgatcgatggcaccggactgattatctatttcaaaatcgcccagtattttcttgggttgaactaa

SEQ ID NO: 246091 - DNA, 999 bp, Klebsiella pneumoniae
atgcaattgctcaataggcagcaggaattaagtattgcaaaatctagcgctattggtaacgtacgaataatcgataatgcagtaacagaaccaaaacctattaaacctaaaaaactaatgattgtggcaataggcgtattcttaggcttactggtatctgtaggtttagttctattaaatgtatttctacgaagaggcattgaatctccagagcaattagaagatatgggggttaacgtttatgcaagtgtccctgtatcagagtggttaactaaaaatgttggtaaaaataaacggcgcaaaaatgaatcagatgcacttcttgctatagaaaacccagcagatcttgcagttgaagctatacggagtttacggacaagtcttcattttgcaatgatggaggccaaaaataatgtattaatgatttctggagcaagtcctaatgctggtaagacattcattagtacaaatttagcggcaatcattgcatctactggtaaaaaaatattatttatagatgcagatctccgaaaaggctatgtccataaaatgttagggtttagtgaaagtgctggtttatccaacatcctttcaggtcagaaaaaaattgaagatgttgttactactgttaaaaatgcaggttttgattatataagtcgtggtaatatcccacctaatccggccgaactactgatgcatccaagatttgaaaatcttctaacttgggctacaaataattatgagttggttattattgacacaccaccaatccttgctgttacagatgctgcaataataggaaagtatgctggaacaacattactggttgcaagatttgagtcaaatactgtaaaagaaatttcggtcagtatcaaacgatttgaacaaagtggtattgcaattaaaggatgtattttgaatggtgtcgtgagaaaagcaagtagctattatagttatggctataatcactatggctattcatatactgataagaaataa

SEQ ID NO: 246092 - DNA, 909 bp, Klebsiella pneumoniae
atgacacgctttgcaaaaaatattatttgtagtatgtctttggcagcttcagacttcatcagttttgttttttcactttatctttcattggccatactttctgttactctgatggattttgaaaatagagtacctgaaaatcagattgaaagttgggcgacattgcattggttattgggattatgttgcgtagcctggtatggtatacgcctccgtcattatttctacagaaaaaccttttggtatgaattaaaagaaattttgcgaacattagtaatttttgctgttattgaaatggccgtaatggcttttgctaaatggtatttttcacgatatgtgtggttattaacgtgggttttagctgctacgtttgtgccattggctcgcgtcggaacaaaatggattttgaacaaatgtggttattggttacgtgatacatggattatcggaagtggtaaaaatgctaaggatgcatttatcgcaataaacagcgaacataatttaggtcttcgggttgttggttttgtttttgtagaatcggatgatgagaacaatgaaggaattgaaggcatacaaatcagtgaagtagaaaaagattggttagataagatggacaagcgaacccagtttattgttgcagtagaatctcatcagagtgatgcaaggaacttttggttaagagagtttatgataaaagggtatcgctatgtttcagttatacctacgcttagaggtgtcccacaagccatactttcaattattggcaaaccaaacccttcatataacgaaggaaaaaacaaaaaaatcgctcctttatatagtgaagccagtgtctcttctgaaactttaccaacgaatttaacccgttccaatgcattattttttataagaaggtctgaaatcgcttga

SEQ ID NO: 246093 - DNA, 507 bp, Klebsiella pneumoniae
atggccgttattgacctttcccagctgccgccgccgcaaattgtggatgtgccggattttgaaaccctgctgactgagcgcaaggctgaatttgtcgcgttatttcaggcagacgaacaggaggccgtgggccgcaccttaacgcttgagtctgagccggtggtgaaaatgctgcaggaaaatgtgtaccgggagctgctgctgcgacagcgcattaacgaggcggcaaaagccgtgatggtggcctattccggcagggatgacctggacaatttaggcgcgaataacaacgtacagcgccgggtgattacagctgcggacgacaccacaacgccgcccacggaggcagtaattgaatctgacgcggattatcgccagcgcattccggcggcctttgaggggatgagcgttgccgggccagtcggagcctatgaatatcacgcgcttagctcggatggtcgggtggcggacgcgtcggcagcccgtcaccggcggaagtcgtggtga

SEQ ID NO: 246094 - DNA, 363 bp, Klebsiella pneumoniae
atgggttctagcaagataaatattggtaagatcagtgcaaaaaatgtcggtgaagttatcgcctcgtcacaacctgttgaagttaatattgctaatgggagttttgatagtgttaacaaagtagtgcatctgtactttgagaaagagaatgacccggaattagaagccgcctttgaaagggctcctgaacatataaaagaagagttttacaaggaaatgtccagcacaagtaaagaaggttggtttgaaaaaattaagcacttaaaactctcaacgtatcttagttcaactgaaaaaatagcggatgtttcgatgaaactttacaatctatgggacaaaattaaagatataaaattttcatga

SEQ ID NO: 246095 - DNA, 351 bp, Klebsiella pneumoniae
atgcatatcgaagtcgggcgcgttaaccatcgcctccagacggagaatatagttatcgttgaccatcgcggcaatttcatcatccgtgaaattatcgacgttgaaatctatcccggtattgtcgacgcggatgccaaagtatgggttattggcctgcacaacaaagaagccagcgcccatatcaatagcgcacagcatatcaataccaaaacggttgccagaaccgtctttcgggagtttccaggccatatattccggccagttgccgcagcgaatatggtggcgttcggcgatatagagcaccccgacatccagccctttaatgatggactgtgggtagccagactctga

SEQ ID NO: 246096 - DNA, 159 bp, Klebsiella pneumoniae
atgatggctttttcattaccggatctcatggatgtcgtacacaagcacaaccgcaatcccaccccaaaaccgatgcccgtagaggaagtggatcgcctgcgagtacggaaataccgcgatccgcaaaatagcgaaaccgtggcgcttccggaaatttga

SEQ ID NO: 246097 - DNA, 606 bp, Klebsiella pneumoniae
atgacgataagtgaagattggctgatcctaaggcagaaattaacaaaaatcaaaaatatgtctgacagttgggttttatccccgaatctcgtaactatgctgatttatgccgaagatcatagattcaatagacatcatggtgtagattttattgctatctgtcgtgcgtcatggagaacattattttgtcgaagaagagagggcgcttcaacaatcgcaatgcaacttgtaagagtgttgactggtcgctatgagaggactctgagtagaaaattgttagaaatgtacgcagcaatgcgtttaacaaaacatataaataaggatgaaatacctaggctttatctatttgttgcttattatggatggagaatgaatgggttgattcaggcatcgaatcgattaaatattgatttttctaattgtactgattatgaggcagctagtatagttgctcgacttaaataccctgaaccacaaaaatataaccagaatcgacataataaaattttagcacgaacgaagcatatacttttacaagctatcgtacatacagaagcaagacagccaaaaaatatgaaaaaaggtgataataatggaaccatttaa

SEQ ID NO: 246098 - DNA, 660 bp, Klebsiella pneumoniae
atggaaccatttaaagtctcccctcatctatccacgttattggatagctatcctgatgtacaactaattattgatgctgcaaaaaatggtggaaacccttccaaagaagctattgccaggctgtggctatcagaaggtataccctttgcattcaagaaatcacctgcactatacgaggtcgttagggtttggttagggactcgacttaatgttgatccaaaagaaatacatttatctggaagtgccagaattggacagtcattggcaccagctaaactgggcacagtttttgggagccactcggatttagacctatttgtggtttcagaatcgttatttgataatgttacagccgattttaacaactggtcatatgattttgaaactggctcagtacaaccaaataatgatacggaagggaagtattgggttgaaaataatactcgtggccaaaaaaatttacaacgcggttttcttgattcgtttatagtccctaatcgagatgcatatcctacaataaaaaaaatttcacaatcgatgtggttgcttaaacagaagctagatgttacagatgatgccccaagtataaagtcagcttcggttagatgctataaaaattgggatagctacgtccgacaagtagttcttagcttaacttga

SEQ ID NO: 246099 - DNA, 1203 bp, Klebsiella pneumoniae
atgagagaaaataatgaccctaagaagtttgaaaaacctaagatggaagcaaatgaagcaaaaaaggcgactgctagttcaggtgtaaaggcagcggcgattgcggcagaggcactatcggcaggttctttatctattacagatgtagtagcctctaagctctttgaaatgttcagttctacctcactaaataatttagagaagaaaataaaaggaataggtcagccagcggcagcaactgtattgaggaatctcaaaagtaattttaatgatgagaatctagttcttgtccttggggctggtatatctttggataataaaatacccacttggaatgaattgctgaaaaggttgctggcacgagccttggaagatacgaatgaaaataggaagatggtttctacattatttaatgaggtttttgggccgaatgctcttatagcagcgcgatatttaaaacttcattttgatagcgttaacactcctttggagaaagaaattcaacgtgtgctatacgagtattatgatgaagcggaaagtggtaatttaaaggctattaagaaattatgtatatcagctggtaaatctcctggattagactcagtgattacttataattatgatgatgttttagaacaagccctcacgaaagctgatgtgggtattaaatttaaagtaatctcaaaaactggccaacatgcgcgacataatgaattacctatttatcatgtgcatggttatcttccaatgcaaggaaaaatagagtttgatgatagtttagtattatcagatgaaagctatcatcgacaatatgttgacttgtatcattggagtaatatggtgcaattaaataaatttaaagatgggaattgtctttttatcggacactcatttacagatccaaatcttagacgtttacttgatactgctaagaaacttagaggcgatggttccaaaccccattatttaataaaatgcaggcattcaaaggaagaggttattggtaatattgataggatactgcgtaattctagtgccgattttgccagcgaattagaaaccaatattgataaaatagcagtttcactgcttgaaactgttcatagatttgaagaaattgatgctaactcttttggggtcaacgtgatttggataaacgattaccaagaaattggtccccttcttaacgatctgacgcaataa

SEQ ID NO: 246100 - DNA, 648 bp, Klebsiella pneumoniae
atgattggtcctggatatgttgtcgttgttggagcagtaaatgcaggttcgattcaatttttaggaacaggattttttatttctaacaaccaaatcattacatctcgtcatgtaattaatgggttttcgtcaaatctcgtaatttccgtatctgatataaatgaatttaatagttaccaagataccagtgttaatatgtaccgatgtatccccgctgagattgtcgatgaggatccagtaaaagatttgtgtgttttaaaacttaaagatgcaagttttagtggcccaaatcttaagctttcttcttttgataatattggtgtaggcgagagtgtcggcattttaggctaccctcactgtagtgagggtagaaagatattgacgttccaaacagcaatgattggtgctaaagtacttcttgcgagcagcaatgtgaagtctaagcatgcagttataaatattcaaactaggcctggtcaatcaggttcaatagtattcaatttaaaagataactcagtaataggtgtgttggtcggtgcttatgcaaataattctggaggttcaatattgattggggggattaaccctgcggagttacatcaaacaacctatgcagtttctgctgaatatattaaggatatgttatga

SEQ ID NO: 246101 - DNA, 186 bp, Klebsiella pneumoniae
atgctgaataacgaaccttcatttgcatcactacttgttaagaaaagcccaggaatgcacttcggtcaaggctggattgcaggcaaagatggcaagcgctggcatccgtgccactcgcaggctgaattgctggctgacctgtcaaccatcaaacaggggaaaccatggctattgaaggtgctgtaa

SEQ ID NO: 246102 - DNA, 591 bp, Klebsiella pneumoniae
atgtcaacatcaaagcacccaaatgagatcaaaataaatcccaatcagggtggcaaagctgcgatagaacgtttagtcaaagcttatggcttcacaacgcgtcaagcgctggcagaccatcttggggtatcaaaaagcactttagctaatcgttatatgagagatacgttcccagcagactggataatccaatgtgcgttagagaccggtgtatcactacgctggttgtcaacatctgatggtccaatgcgtttggatgcgagaactcaagttgcaagcctcaataaaacaaaaattatcgatggcaagctaattgatagcggttatattttgtttgatacaactttgcttccttgtaatgttgagaatataagtgcagttgaatatgagaattcaacgtatctggttcgacaggatgttaatgaagtaattgatggcaaatggatggtttcaatagacggtctgtattctattcgtgaattggcaagactgcccaataatcgaatcatgttagaaagtaaatcaagtaaaatagaatgcaatattaaagatatcgaagttattggtaaggtgatacttacctgcaaataa

SEQ ID NO: 246103 - DNA, 1995 bp, Klebsiella pneumoniae
atgattgttggtgttattttaaggaacttcaaaaattttagaaatcagcattatataccattaacagtgaatacccgttcttcttggttaattggcgagaatggtgttggtaaaagttcaatacttcaagcattggatacgattcttaataaaaatgactttaataaattagacataaacaatgatgcccgtagccaaggattattgaccagggaaccattcattgttcccatttttcttattcgtaaagaaaaaattagaagtaatgcatcaatttataaaactctagaagttattagtgatatcacatggcaaattgaaagtgaagattttaacttattacaaaggccattggctgaaaaattcgtggctcagaggactttgttagaagaaaactattctagctccgaatattttttaattccaattggattaattaagaaaggagcaaatgacatcccagcacctacgatgtctatatttgagtcaattgaagattaccatattgagttagaaagccttattccagactcaacatcagtaacatctaaccaacgaaaatattttttcgaaatagcattatctagaactcttgaccatattaaagaaatctataattatatttacttacctgctgaaattacagtatcagaatattcaaaaattgaaagcaatcttttacaatctctcttaggcgaaaaccttcaacaaaaaatcagtaaaataatcaagaagaaagatataactgaaataaatcttttccttaatgaattcgttaaacaaatttcaaaaaaactggatggacgctatcaattcaaaaaaccatctcaaagacaaaattcattcacacaaaggcatatggtagccaacatcatcgaatcctatttcagtgataagattctccatcacatagatagcgtaaataaagatacacccattcaaaatttaagttctggtgaaaaaagaaaggcattactagatcttgcaactaacttcctaaaacataatcctcagaaatctcaacaaagtactatacttgctatagatgaaccagagttatcattgcatgccacctcatgttttcaacagtttgaaaaaataaaaacaataagcaatattggaattcaatcaatttgcacgacacattggtatggttttttacccgtgacaggttctggaactgccatttatatagcaccttcacaaaatcaaattaaggctttagacttatctaattataaagatgaattaaaaaatcttaccacagagacaaatggttctcatttagatgttttagaaatgaaaagcaaccatgaccttacccaatccattgtttattcaatcacttcacaaaatagctataactggattatatgtgaaggtaaaacagataaagaatatatttctaaacatttggaatttgaaagtgttgataatttgattgtgctatccgtaggtggttcagttgctgtaaagaaaatctacaatcttttaatccttgctttagaagaccgaaaaaaaacgatttcagggaaagtatattgcttattggacaccgatcataaatacagcgcatttcatgcaaccgatactatcccaagtattaaaatccgtagattgctactcaacaaaaatatggatgatattattttagcaaaagtcactgatgatagtgtttatccaccaacagagatcgagcaagcattagatgctgaattttatatcgaaactcttagatcattatataataacggtgaggaagcattctcatttatgaaaaaccccttagttttacaatcatctgtttctggcggagccttagatttaaatataactgaacgtaaaaagattactgaatattttgacacgccaggtaaaaaatatgaattttgtaaaacctatattgaaattatgtcagagtcagaatatatccaaactcctggatggttaatggatattcgggatttcttccaaaacgaaggtgatgtatcgtaa

SEQ ID NO: 246104 - DNA, 471 bp, Klebsiella pneumoniae
gtggcggtgaaaaccactgccgccggcacgctgaatatcggtgagcgctgtaagcttgaggggaacacgaccaactacgtcatccggctggctaacaaagagcaactggggacagtgaagacgagaaaaaccaacttctgtcgtatccggtacaccgacgatggttcacagtcttcctttgctctgagagaagcggcacacccgcttaacggcacggtagtcggtcgggatgcggcgttccagtatccgcaccgtcgacccgggaaatacttcgtttcccttgagatacccgctaccggtggctcatgttctgtaaacaaaaacggcatgccatttttccagacgaacatagtcggtattcacggtattgcggttgacctgaaattccaggagcagcttttatttacgattaccggcggcagcgccgtcacactttctaacccccaatggcgatataccctggagacataa

SEQ ID NO: 246105 - DNA, 264 bp, Klebsiella pneumoniae
atggctttaaaaggtgagtttcatattctgacgtcgaacggcgacaccgtattccggtacgcgaaaatacagagctttggggggaatgctgcgtcaatcaacctcagcgtattttttactgatacggatgatgacgagatggcgccaggggcgatgaagaactacacattcacacccgactccggttcttcagaaagcattaccgaccaggggtacgcgtatctcaaaacgctgccggtattttcaggtgcagaagatgcctga

SEQ ID NO: 246106 - DNA, 1182 bp, Klebsiella pneumoniae
atgagcaaaatttttaaatcactgataacggttgccggcagggaaaagattgctgccgcgatagtgaacggggataaagttgttttctctcagatgtctgtgggggacggcggtggcagcgcgacaattccggacgatgagcagacatctctggtgaatgagcgtttccgtacccagcttaacagcctgaaattgtcggacacggaaaacattattatcgctgaaatggtgatcccgccggaggtgggcgggtttactatccgggaagcggccctgtttgacgatgccggtgtgtgcatggccgttgccaacgtcccggaaacctacaagcctgcactggcggaaggctcaggccgcttcaccattctccggatctggctggccgtcagcagcaccgaggtcgttgaacttgtggttgatccgggtattgtgctcgccacggttgaggacgtgattaacgcgggcaatgaagccaaagactatgtcgacactcacctcggcgaacatgccggctcccgtgatcaccccgatgcaacgctgaatgaaaaaggattcgtgcggctgagcaatgcgattgacagcgatagccaggtactagcggcgacacccgcagcggtaaaaaatgcgatgaatgcggcgatcaaggaagcggtggaggaagcggtacgggcggcatgggaggatgaaaaccccgtcggaacggtgaagttttacgccagaaatatcgatccgaatgaacggtggccgtggtcggaatgggtgtataccggagaagacaaaaccgtccgcattgcaaaatctgacggggcaaacgtcggtgcgaccggcggcagcgatagcgtcactatccagcgcgttaacctgcccgcagcgcaaatcagcatcagcgggacaaccagtgataaagaggcgcaggaactgacaacctcagagagcggcagtcacacacatggcggcgtggcgagtcgggttaatccgtgggagattggcggcgatatcagccagcgattcaacccggcgaacctgggggaaaccgatgcggcgggaaaccataaccatacggtgactgtccccgcgcacaatcataccgtgtcaggtaaaacagagaatctcgggagcggtcaggcgatcagcgtggtggaagcgcatgtgcttctgatgtgctgggcgcgggtggcgtag

SEQ ID NO: 246107 - DNA, 855 bp, Klebsiella pneumoniae
atgaaaaagaaagctgctctaataacaattcatggaatgggtaaaacagaaaaaaattatgctgatagctttttcaataaaataaataaaaaacttggaattcgctctgaaaatctgcacacagataaaatctattatcagaaaattttacaagataacgaggatttggtctgggagaagacgatgaaacatgtcaggtggcttgacctgaggcaatttatactcttcggattcggtgatgcggcaggtctggaagctaaaaaagagaacatcaatagtgtctatacccaagcacaggctgaaataggcaaagtacttctaaacacgtttaatcaaatagaatcaaatgcacctgtttttattcttgctcaatcgctaggctgtcaggtggcatcctgttacttctgggatgcacaggaatacctgaaaggaaatcaggtcaccgcaggagtttggaagagcaataatgatttagaatcatatattaataacaacataaagctggagcctgaccaaatacagtttttagctggcaacagatttagttatttttacactaccggctgtaacatccctatctttgttgctgcacatgccactgatgaaattttacctataaaacccaacggtagttttatctggaaaaactactatgacaaggatgatgttctcgggtggcccctcgaagatctttctgaccaatatagttccgtagtaaaagatcacccaataaatgccggagacggccctttcggatggattggcaaaagctggaatccaatgtcccacactcagtactgggaagataatgacgtcatggatccgttaattgaagatttaaaaaaattcgtgtga

SEQ ID NO: 246108 - DNA, 222 bp, Klebsiella pneumoniae
atgcagattatgttttgctccgggaaatcagccaaaacccgtcgcgccctcgcctgcggttttttccgaatggcaatcggggtgctaagaagtggaaatgcgataattgaagtcaaaaattatgaaggctccagggagagcattttgcagggtggaggcggcgtcgttgtcctggttgaacatggggaaatagtgtccgtaaggggcaaagggggcctgtaa

SEQ ID NO: 246109 - DNA, 387 bp, Klebsiella pneumoniae
atgtctgacatgcagacttcccatgttggtattcgcgtacaaatattttcgagagaagccactgagcgaatggaggcgatcattagaaacgccaatcttccctatgacagattggcgttaaatagcgtacaaagtgctttagattcagtctttttctttgttgcgcgtcgtgatgagatctcctggctctttaaatctcttttctccacttggccgaagaacccgagtgaaaatgagaaaattaaacttcacgtttgcaagcccgacggaaccaccattagtgtagaaatgggaggtgatacccagtcagagaaagttctagaagttctcggcgggagtatcagagacttaattgctgatatcggtcgcagtcctgacaatcattag

SEQ ID NO: 246110 - DNA, 759 bp, Klebsiella pneumoniae
atgtcaacaaatcatcttcctaatgcagataatacacttcgagcgacaggagtagttttaggattactgtcacaacttgccggcttaatcgttggttttacagcacttgcttatattattggctggaaagaagcttcggcctattatagcgagcttggagctccttgggtgacttccatgctcactccaacacaagtgatgcaaactagcatccctctcatctctactattgccgttgtaactcttattagtgtggccgaacttgctagtcaaaatattggagtgaggtggcttcgaagatgggccattatttttattattcttgctactattacatacttgttatcatgggctatagataacagatctggtgtcactgccttaatatttataagcagtatgctctgggctttttccacaggagcaacgataggtgagttgatcggttgtttagcacttaaagaaataaagtggggtggttatgaagtatatctattgtacttcattttatttttttgtttttcacaagctcctgaccttatgggtaaatcaagagccagtttaatcgagcgagcagattcaacttcactgccaaaagtaaatttggctagtactacagatgcatggagtttaatagggccttgtggtgataaactcttacttatttcgctgggccaagatcggcatgatagattgttcaaattagttgcttcagaaaacattgtaggaattcgtactacaaaaacagataaaaaatga

SEQ ID NO: 246111 - DNA, 426 bp, Klebsiella pneumoniae
atgatgaaaacaaaagctgacctgcttctgttattacttgccccactgtcacaacaggcgcatgcaactgactgcgaacctaacgggtatgggggaaccttttgcatcaatgatgacggaacgacatctgatagcataccaaacgaagttaatgggcaggatgtctactcaagcaacggtacatcaaagatcatttcacctgatgaatctggaatgaacgatgtcctgaatgataatgacgatgatgaaaactccgacctcaatggctccttggacccggactctttatcatctcagaataatacaaaccaaggctcgacgggtcacgatgaagccaataaccccctaatgggccgtgactggaactcgccagctaatatcaattcggatggttcagcaacatccagtatcaatcctgatgagtaa

SEQ ID NO: 246112 - DNA, 843 bp, Klebsiella pneumoniae
atgaagcatggaatgattttaacaagaaaaatgacgttagaaaatggttctatattagtaaatggaggctttgacccatcagctctaagattagccgttttatatcttgacggaatatgtgtaccacaatcacaacttgttggatttgggttaaccgaagagatgaaaacattaaaactggaaggttatctatctgaaaaatactatcctataagacagtcccaagcagcaggctcagatatattggtaacagcatatggagactgtttcgaagagttaaataaaacaaataacgaagtttggatggttcataactccctcaatactcacttaactaaaataaagacaactgatgatggcggagaatgcattcaattactaaatgcacttcctatgccaggtgaagatttccctcttggtgaccttctcgaattcaagagcaaaaggaaagacaacttaaaagagctgttattatcaatagaggagtttcgccttgaaataataaactctgaaaatcaagacatggaaataaagaaatcaataataaaaattgaaaagaacataatagacctacataaattaatcaaagaaacacagccagggtggtatttatcgagtttttcattggatatttcatcaaatgatttgcttgatgtttttacaaaaatttatggtgaggcgaaagaacttggaatggaagaactgaatgcattgctgacatctgctggtttaagtgtagcaacttgctttaatataaagggagggtatagatttaaagcaggcaaacccaattctccatatctttatgctgctgaagtgaaacagaaattcagaataaactaa

SEQ ID NO: 246113 - DNA, 264 bp, Klebsiella pneumoniae
atggctttaaaaggcgagtttcatattctgacgtcgaacggcgatactgtattccggttcgcgaaaatacagagcttcggaggtaatgctgcgtcaatcaacctcagcgtatttttcagtgacacggacgatgacgagatggcaccgggcgcgatgaagaactacacattcacacccgatcccgattcttctgaaagcattactaaccagggatatgcgtatctgaaaacactttctgtgttttccggtgcagagaatgtctga

SEQ ID NO: 246114 - DNA, 909 bp, Klebsiella pneumoniae
atggccgttattgacctttcccagctgccgccgccgcagatcgtggatgagccggattttgaagccctgctgacagagcgtaaggcggagtttgtcgcgctctttccggcagaagagcaggaagctgtggcccgtaccttaacgcttgagtcagagccaatcgtaaaaacgctacaggaaaacgtgtatcgggagctgctgttgcgacagcggattaatgaagcggcaagggcggtgatggtggcgtattccggcggggacgatctggacaacctgggcgccaataacaacgtacagcgccgggtgataacccctgcggatgacaccaccatgcccgcgactgaggccgagctggaatctgacgcggattatcgccagcgcattcctgctgcatttgaggggatgagcgttgccggaccagtcggagcctatgaatatcacgcgcttagctcggatgggcgggtggcggatgcgtcagcgttcagcccgtcaccggcagaagtcgtggtgactattctggcccgcgacggcgatggtactgcgccggaagacctactgcaggtggtcggtgcggcgctaaatgatgaagaggtgcgccctgtgggggacagggtaactgtccgctctgctgagattgtccgctatgaaatcgacgccgtgctgtatgtctatcccggaccggctaaggaacccattctggcggcggcaaaagcgcagggggccgcctatatcaacgagcagcgacgtctgggacgtgatgtgcggttatctgcgatttacgccgctttgcatgtgcagggcgtgcagcgggttgagctgatgaagcctgcggcagacatggtacttgataaaacgcaggcatctttttgcaccgactttaaagcagaaattggtggctctgatgaataa

SEQ ID NO: 246115 - DNA, 129 bp, Klebsiella pneumoniae
atgccttttcgttcgaaagaagggaaggtgctcgtaatgtcgaaggagcgattcattaaagaagctccttttaaagtcaagttcatggatttctttgcctctaagcgccaaggggtaaaagatgagtga

SEQ ID NO: 246116 - DNA, 987 bp, Klebsiella pneumoniae
ttgttattattcatccgctccagcgaactgcgctttgcccgctgggatgagatagacctgcataacgccatgtggaccattcccgccgagcgtgaaccgatccacggcgttaaatactctgcgcgtggcgcgaagatgcgatctccacatctggtacctctgtcacatcaggccatcgaactgctgcgcgaggtgcggcagcattgccgaccgggaactgagctggtgttccccggcgaccacaattaccgcaaaccgatgagtgaaaacaccatcaacaaagcgctgcgggtgatgggctacgacacccagaaagatgtctgtggccacgggtttcgcaccatggcctgtagcgcgctggtggagtcgggcctgtggtcaagcgacgcggtagagcgccagatgagccatcaggagcgcaagcgcgttcgtgcggcgtatatccataaggcgcagcatctcgaagaacgccgggaaatgatgcagtggtgggcggattatctggatgcgaaccgcttcaggcatgtggtgccgtatggcttcaaaaaatcgccgggaggcgcactcgaccatatgagcttccaggagcgcaatgaccgacaagtggaggagctgaaagcccggatactggctgactcggaatggctgacggcgtctgagttatcggcaaaagcgggttttcgttctgccgatcctgaagctggcccgaaaggctggaaagccgcaggtaagattttctcgctgaaggtcgacggggaggatttgtacccggattatgttctggatgagaaaatgcgacctctcaaggttgtcaggcttattctttcgctgttcaaagagcgtaaaacaccgtgggggctagctatctggtttggctcggcaaaccgcaggttgagaggtgggaagccgaaagatctgctgatttcaaagtcagagttggttctgatggttgcccaagaggaaattgagaagagggagcatgggtga

SEQ ID NO: 246117 - DNA, 378 bp, Klebsiella pneumoniae
atgcgtgaagaggcccaattactgctgatttctggcatcgatccgagcgcacaccgaaaggctgaacgccttgctataacgccggaacatacgtttgagtctgtggcacgcgaatgggtcaccagtaacgtgaactggtcggcggaacataagaagcgggtgctgcgttacttcgagctttatgtgttccccacgaacggcagctgtgacatcaccaaaatgaaggtcaaagatctgctggtgcccatcaaggaggtggagaaagcgggcaaactggatgttgcttcccgccttcagcagcgcactgcctgcgtgatgcgctatgccgtccagaacggcattatcgatcataaccccgcatcagatttaaccggctag

SEQ ID NO: 246118 - DNA, 177 bp, Klebsiella pneumoniae
atggcactaacagatcgcgctatagtccacgccaagccttgtggcaagccgtataagctcagtgactcgcatggactttacctgctggttaaccctaacggttcaaaacactggtacatcaagtaccgctctgtaaataaagagaaaaagctcgctttaggaccttatccgctttga

SEQ ID NO: 246119 - DNA, 843 bp, Klebsiella pneumoniae
atgaaacatggattaattttaactagagaaatgaaatttgaaaatggtgccataattggcaatggtgggtatgatccattagcaatcagattagctgtgttatatcttgacggcatatttgtcccgcagtcacaacttgttgggtttggattaacaaaagaaatgaacctattaaaggaggaaggttatctatcagagaaattttaccctataagacaatcaaaaggaacaggcgctgacatattaataactgcatatggcgattgctttgaagagttaaaccaagctaataacgaagtttggattgctcataactcactcaacaatcatctaacaaaaataaaaaaaacagacgattgcggagagtgcatacaattattaaatgcgcttcccatgcctagtgaaaacttccctcttggtgatctcttagaatttaaaaacaaacgaaaagacaatttaaaagagttgttgctaacaatagaggaatctcggcttgaaataatccaagctgaaaacaaagatattgaaattaaaaaatcaataattaaaatagaaaaaaacattatagatctgcataaattaatcaaggagacacaacccggatggtatttatccaatctatcatttgacatatcttcaaaagatttatttaatgttttccatgaggtctacggtgaagcaaaggaaatgggaatggatgggcttagcgcatttctggcttcaacaggactcactatagcgacctgttttaatgtaaaggcaggttacagatataaagcagggaaacctaattcaccatacctttacgctgctgaagtgaaacataaattccgattaaactaa

SEQ ID NO: 246120 - DNA, 264 bp, Klebsiella pneumoniae
atggctttaaaaggcgagtttcatattctgacgtcgaacggcgacaccgtattccggtatgcgaaaatacagagctttgggggtaatgctgcgtcaatcaatctcagcgtatttttcagcgacacggatgatgacgagatggcgccgggggcgatgaagaactacacattcgcacccgactccggttcttcagaaagtattaccgatcagggatacgcatacctcaaaacgctgccggtattttcaggggcggaggagtcatga

SEQ ID NO: 246121 - DNA, 270 bp, Klebsiella pneumoniae
atgaaatacaaacatctatccgtctacctgtatcagggcgacacagtagaaatttcattcaggtttaaaacaaatatctatttgatgaatagccgcgaatttatggcacttcaggctggcatgcaccctgcgggcaaaaatggtcaattcactcattccccggcacggctgattgcgccagccagcggcaactggcacatagtgatgttcggaggtgacgatcctgccgatgcaaggcaaatggtaaaagtcattccgaagcgtaagtga

SEQ ID NO: 246122 - DNA, 381 bp, Klebsiella pneumoniae; identical to SEQ ID NO: 237323

SEQ ID NO: 246123 - DNA, 180 bp, Klebsiella pneumoniae
atgcacacagtcgtcgtcggggatggtcatcaccgcgccgccgggaacctgatcgaaaaacccctgagcaccatcgaggtgggtttctgcaccgcaacacatgagcgaattgccagaaccggtgaaatttcgtatctgagagtaggtcgcctgacctatcaaactgaacccttcgtttga

SEQ ID NO: 246124 - DNA, 351 bp, Klebsiella pneumoniae
atgcatatcgaagtcaggcgcgttaaccatcgcctccaggcggagaatatagttgtcgttcaccatcgcggcaatttcatcatccgtgaaattatcgacgttaaaatctatcccggtattgtcgacgtggatcctgaagtatggattgttggcctggacaacgaagaagccagcccccatgtccagagcacacagcatgtcgataccaaagcgattaccggcaccgcccggagggagtttccaggccatatattccggccagttgccgcagcgaatatgatggcgttcggcgatatagaccaccccgacatccagacctttaataatggactgagggtagccagactctga

SEQ ID NO: 246125 - DNA, 1050 bp, Klebsiella pneumoniae
atgtctccgacaaaattattgtataacttactaaaaaccaaaagaatactattgtctgtgggggttttctcaatattattatctattgcaaaccactattttacttcgctttataattactttgttgaaatgtttggattaagtttatctcaaacctctctttcaattactctattttttgtagcaatcttttcattgtttttagtttatttgcaatctggaggaaaagaacctttagaggaaaatcattcaacttctctagcgttatctcttgaagacatagagtcgcgaattcagctaacgaatgagcaggtaattaatttaatagaaaaaatagaatcacttaaatcaaattcaggacttagtaaagaagagaaagagttaattatttctggtgcagtagcgaagacaggtgaagaagctataaagaccatctttataaacgagacaaataacctacgtgaaactatagaaagcagtttaagcctaaaaagactcattgacttgtccgaaggcattacccgcagactcagaagagagataactgacctcagacttcgctcgaatgttaatctactaattggaatggttattacagggggggggttatatttgttatgggcaacagtatctataattgactcatctgagttgttaaagcaacttgcttctgagggcgatgattcaaattataaatttattaaaaatatcgtcctccctataataccaagggtattattagttgttttcattgaggtatttgcctatttcttcctaaaactatacaaaaacggactatcagaaataaaatatttccaaaatgaattaactaatattgaatcaaaattagctgctgttgaattttcacacttgaccaaaaaccaagatgccttgaaaatttcaatcgaatctctatcgaaaactgagcgaaacttcattcttgagaaagggcaaaccactgttgaacttgaacgagccaaatctgaatctgagttaactagaaatattataaaaacaatccccgggctgtttaaaagaaccgggaaataa

SEQ ID NO: 246126 - DNA, 1506 bp, Klebsiella pneumoniae
atgcaacatccgtcgaaaccgctggcgaaaacccggcagggcacgctggccgggagtgcagagcaggggatccatatctggcgcggcattccgtacgccgcgccgcccgtggggccgctgcgctggcgcgcgccgcagcctccctcccgctggccgggcgtgcgtcaggccgacgccttttccgccgccagctggcaggacattgactactgccgcgaacttggcggcggggatcccggtcgcttcagcgaagactgtctctatctcaacgtctgggcccccgccagcgcagcgcagccgctgccggtgatggtctggctgcacggtggcgggtttaccatcggcgccggtagcctgccgccttacgatggcctggcgctggccagccgcgacgtggtggtggtgacggtcaactaccgtctgggccacctcggctttttcgcccacccggcgctggaagaagaggcgggcgagcggttgtataacttcgcgctgctcgaccagatcgccgccctgcagtgggtccaggaaaacattcacgccttcggcggcgacgccgccaacgtcacgctgtttggcgaatccgccggggcgcgcagcgtgctgtcgctgatggcctcgccgaaagcgaaagggttgttccataaagcgattattcagagcgggtataccttacccgatctgccgcgggaaaaggcgctggagaaaggccgtctgctggcggagcatttcgccttaccacaggccagcgctgagcaactgcgggcaatcccggcggaggccttctggtcgctttccgccccgctgaatatcgggccagcgcccatcgcaggcgatatcgtgctcccgcagccgatgctggagaccttttttgccgggcgccagcatccgatgccggtgatcatcggctccaacagcgatgaagccagcgtgatggcggtgtttggcgtcgacatcgccgggcagatccagaaactgcgccgtgagcgccgtctgggtctgggactgatcaaactcctctatcccggcgtaaaaggcgatgaagcgctggggcgggaagtctgtcgggatatggcgtttaccaccctcggctatgtggtgatgcaggcccagcagcgcgtgggccagccatgctggcggtactggttcgattatgtcgcggaagcggaacatgacgcctatccgcacggcgcctggcacggcaacgaggtgccctacgtgtttgataacctgcggctcaccgacccggtgcggcagtatgccagtgaagcggatctggccttcgccgctcaggtcgctgactactgggtccagtttgcccgcgtcgccagcggcgagcaggtgcttgccggcgcggtgcgctggccggcgtgcctgcgcggacgggatcgtttgctgcgcattggcctgcataagcgtgccgggtttaaagtggagaatcgctttatgcgcgcccggctggcgctgtttcgccgggtgatgaagcaccacgtgacccttgaataa

SEQ ID NO: 246127 - DNA, 600 bp, Klebsiella pneumoniae
atgaatgaccgtgaaacgcgctgttacagcggggaggtcagagccgagcaacgcaccgatgaacctacccgcattctgggctatggctcggtgttcaacagccgttctgaacccctgtggggattccgtgaaatcatcaagcccggagcatttgacgatgtgctgaatgatgatgtccgcgggctgtttaaccatgaccccaactttattctcggacggagcgctgccgggacgctatccctgtctgtcgatgagcgcggcctgcgttacgacattacagcgccggatacgcaaactatccgcgatctggtgctggcgccgatgatgcgcggtgacattaaccagtcatcttttgccttccgggtatcccatgacggtgaaaactggtaccaggacgatgaagggatcgttattcgtgaaatatcgaagttttcccggctgtttgatgtcagtccggtgacttatcccgcatatcaggaggccgactccggcgtccgatcgatgaaagcctggcaggaggcgcgcgacagcggtgcgctaaagaacgccattaatcaacgaatggcgcgtgagcgcctgctgacccttcttaacgcgtaa

SEQ ID NO: 246128 - DNA, 1494 bp, Klebsiella pneumoniae
atgatcgactatgaggccactggtcttaacgacacgctgagctggctggggccgttcctggtttgccctgaaaatgaaaccgtcgatatgttcgaggtgaatttctctttcccgaacggtatttgcggctttgacagtaagggcaaaaaacggattcgccacgttgagtgggagattcagtatcgcgtctacggttccggatcggggtgggtgagtcaccagggcgagtacgcgctgaaaaacatcaacgggttaggtttcactgagcggatcaccctcagttctccggggctggtggaagttcgctgccgtcggcgcaatgagcagggctcaaacaacgcgcgagacagtatgtactggcaggcactgcgtgggcgactgctgacacgtccttcatcctatcccgatgtgtcgctgatggcggtgaccgtcgagacgggcgggaagctggcggctcagtcggaccgccgcgtaaacgttgtggcaacgcgttcctatgactcaggaacggccagaaccatttcgggggcgctgctgcatgtcgggagctcgctggggctggagatggacgtcgataccatcaacgcgctggagtccgcgtactggacgccacggggcgaaaatttcgatttcgccaccggcgacagtatctcggcgctggaaatgctgcagatgatagccagtgccgggaaatcccgcttcctgttaagcgatggccttgcgacggtcaaccgcgaggggattaagccctggacggggatcataacgccgcatgagatggtggaggagctgcagagcggatttaccgtgccgtccgacgatgattttgatggtgtcgacgtgacgtacatcaacggcgtcacctgggcagaggagactgttaaatgtcggacacccgataatcccacaccggtgaaaatcgagaactacaaactcgatggggtgctcaatcaggagcacgcctaccagatcggcatgcgtcgcctgatgaagtatcttcagcagcgggttacataccagaccaccaccgagctggatgcgctctgctacaacacaggcgatcgcatcgtgctcacggatgatattccggggaacaacacgatttcctgtctggtggaggcgatgacaacggctggtggcgtgacaaccatcaccgttacggagccgctggactggtctttcgaaaacccccgtgcgctgatccgctatcaggatggctctgcatccggtctgatggtggcgagcagggtgggggattatcagttgtccgttccccatctgagtgattttgatgacccattgaagattgaccagacttcaccagccattgagccagtccgactggtgttctgcggctcaacgcgtcatgtctatgacgccattgttgaggagattgcccctcaatcagacgggacgtgtcaggttaccgccaaagagtaccgcgcgtccttctacgactacgacaacgccagttatcccggcgacattgcataa

SEQ ID NO: 246129 - DNA, 297 bp, Klebsiella pneumoniae
atgtttaaatcttttttccccaaaccggggccgttttttatttctgcctttatctggtcgctgctggccgtgatcttttggcaggcgggcggcggcgactggctgctgcgggtcaccggggcatcgcaaaatgtggcgatcagcgcggcgcgcttctggtcgctcaactatctggtgttctacgcttactatctgttttgcgtcggcgtgttcgcgctgttctggtttgtctactgcccgcaccgctggcagtactggtcgattctcggcacctcgctcatcatcttcgtcacctag

SEQ ID NO: 246130 - DNA, 1182 bp, Klebsiella pneumoniae
atgaaaatcagtaaagtaaaactcattgcttttatttcaactatgctcgttagcgtagatgttctgtcggtggcggggttacgcgttacactgctgccattatttttatatggtggttatatttttattaaaaataactacatagataaatgggcgtttttcgccttgacattttccgtcctttgcctcccatccctgtttttttcagcagagttttataaatcagtagggtatcttgtatggatattttttaactatatagctctatgcgtagtttataagagcttgattgttagatccctagataatacgttgcttggcgtcagagatgcatatagatttcagatttttttaggctgcttgctttatttctctggattacagccacgcgccgctgttctttattatgaaccttcatactttgctttatcattgacgccatacgtggttatggttgttagtagctatataaaatcaaaggggtacgttggtgatgtggtaaaaagaacctcttttatagatgtttttttacttctcgcagcgatttacacgactaaaagtgcaaacctaatgcttgtatgtgcactttcagtgttaataatttcttttcttggcaaaggtaaattaaaaaagatatgcatacttgcggttgtgggtacgatatcaatcttcgggttgtacttttactcacaaaacagcaatgacttaattgccgtaacaatcaataatttgttctcagcatcagatcctgttaaagctcttcttgatagaacgggaaataggtggccaagatttaaccttgcatatgatatatcattgtcgaatttttggggcgtcgggataggtgcatatgataaatatacattatcccacacgtttgttggctacacaggactccctttctacctcagtcctatagggtatcctcctataaatatatacttagagttagcatccacttgtggttggcttgctctggctgtatggttgatatggcactttaagatgattaaggcagcgaataaaaggccggtaggcggaccggtgattgtctgctctcttattgttgccatgcttgctctcttcatagagtcaagctttatgaggccatactactggatgttaatgggtatggttatgggtcagattgcgctaaacaagcgcgccagacaaaacagttaa

SEQ ID NO: 246131 - DNA, 432 bp, Klebsiella pneumoniae; identical to SEQ ID NO: 28367

SEQ ID NO: 246132 - DNA, 312 bp, Klebsiella pneumoniae
atggctaaacgtatgcaagacaaagagagcattgccgggatgtcctggctggttctgctgatcattgcttgctggggtggacttgtccgctacctgatagatgtgaagcagagcaaggcaacatggagcttgatcaatgctcttgcccaaatggtggtttcagggtttaccggcgttattgctggcctggtgagcattgaaagcggactgagcatttacatgatactggccacttccggaattagcggggcaatgggttctgttgctttgacctatttctgggaacgcattaccggagtcaaggcgccatga

SEQ ID NO: 246133 - DNA, 339 bp, Klebsiella pneumoniae
atgattattttttccctgctggcgctggtggccgtgctcgttctgttgctactgcgcaaatatacccagctggagtttgttggtcatgcccggttgctgcttaaaacatggtctgtccgcctgggcgctgccggcgcgctggttggcgtatgggcgcagtcattcccggatgccgcgctccatgcctgggcgatgctgccgacggacattaaaaatattctaccgcccaatgttgtggagatgattagtcctgctctggtggtgctcgccattctttctcagtacgtcagacagccaaagctgaaagataaagccgatgagcagcaggaggcgcaatga

SEQ ID NO: 246134 - DNA, 1401 bp, Klebsiella pneumoniae
atggctactctggtaaaaagcagcagtaaatttatgggtcgtaaggccgtcgctactgatgccccgctgcctgacaatgcgttaatgtatctggactttgaaaacggccagtttatccgcagaaccgcaaccggggcggtaattcgcagcaacagcataactgacgtgatgtcatttacccgcgccaccgtggcaacgtatttcggtgatgacggcctgctgaaatatgcagcagctggtgaacctgttattgaatatgaccagaatacgctcgcctgtctggggttccgtcccgaagtgcgggccactaaccgggttatcaacagccagaactttttagcggcgaactggagcaaaacggggatcgaggttaccgataatgatgccgtgtctcctgacgggaacaagacggccagcaaaatcatagagtccacaggagcggctaataccgttcactctcttgccacgacggtcacctatgctgcggttgtcggccagccttacacattcagcatttttgcaaaggcaaacagcggatctgttatgcagatcgcattgcctgcgggcgtcgtcgccagcgcgcagttcgctaattttgacctggtgaacgggaagatcacacgctcctctccactggtcatgcaggcgaatatggaaaagtgcccgaatggctggtaccgctgctcgctgacaatcaatcctgttgccgcgggcgaaccgggttttactgtctgccttaccggcggaaatacagcagctgaagcactcccggcctacagcgcaacaaccgtcgcatcgatttacatctggggcgcccaggcggaacgcgctgcaggctatacctcatacattccgacggcgggggccgaagccagccgcgatgcggatatattaacgaccccgtccggttatacactgattgattctgcaaaaggcgcgttctttgtctcggtggtgcatcctcacagcctgaaattattatcgacggcgtatgcttcgctggcctgcgccgtcgtgctggataatgcggtggaaggtgctcattaccgccttgcctggcgaggcagggacaacatgaacggacaggcggcatttgccgaactgaatgctgccggcgggacgacggtatccgtcaacctgccgccgttaatggcggtctcggattccgaacaggcagccttctgcatgttcagtaccggcgatttatccatgaaagcgtttgatggtcaggtatggaattcagcatcgcccacgatcatgcctgctgcgctgtcgcgcatctgcctggggcgctcatatatcggcgcatcaaactggtttaacgggcatatcaaaaagttcgtttactgggctgataacatttctcaggctgaagccgaggaatacttttccgtcttgtaa

SEQ ID NO: 246135 - DNA, 564 bp, Klebsiella pneumoniae; identical to SEQ ID NO: 110033

SEQ ID NO: 246136 - DNA, 390 bp, Klebsiella pneumoniae; identical to SEQ ID NO: 110021

SEQ ID NO: 246137 - DNA, 306 bp, Klebsiella pneumoniae; identical to SEQ ID NO: 110016

SEQ ID NO: 246138 - DNA, 249 bp, Klebsiella pneumoniae; identical to SEQ ID NO: 110015

SEQ ID NO: 246139 - DNA, 483 bp, Klebsiella pneumoniae
atggtctcaaaaattgcgggggcagcccttcttctggcgatcatgtccaattatgcactggctgattgttttgatagagccggatcttactacagtattgatcccgattacttacgtgcaatctcctggcaagaatctcgcttcaataacgctgctatcaatgggaaaagtgcaggaggtacgaccgactactgtatgatgcaaatcaatagtagaacccttgcggatttacgaagagaatatccttccctcaacaaggataagctctactcaagtccgtgcttgtgtattcatgttggtgctatgcttttgcggcgtaattttaacaaatatggtttaagctggcttgcggtaggtatgtataacgcagggatgagcaacaagcagaactctgtacagaaccgatataattatgcaatgcttataaatgatcactataaaaaaattaaagcaggtatcattcagcggccacatattgaatga

SEQ ID NO: 246140 - DNA, 231 bp, Klebsiella pneumoniae
atgccagagaatgaaacaggctttgcaggttacaggaaactgattctcattaagaataacgaagtcagcaataatttcattattatcgtcacgttttatattatggccactggtgcaaagtgttacataaccatgtgcatcaactgctatatgggtagctgttctctctcgaactatcccattaaaattaacttgttcgcgggtggttacagttcgtttaatgtgcattaa

SEQ ID NO: 246141 - DNA, 150 bp, Klebsiella pneumoniae
atgaccgccgacatcaccatgcagatgagacacatcaccaccgggctcagggtccagttagccgcccacgacgcgccaattggggccggcgtagtccacggcgtcagcgacaccacctggctcagccagccaagacgcgtcgcgccgtaa

SEQ ID NO: 246142 - DNA, 765 bp, Klebsiella pneumoniae
atgggtggcccggctacgcagcagcaggaaggccagcggcagggtagaaccgacgccgccaatcagcagatagtgatcccagaagccctgcaggtagacgtgcggcagtaccgtgccagccgccagcgccgcctggtttgccgacaggttggccatccagaacgggttcataatgccggtaacaatcagcgagccgtggataccggcgaaccagaaaatctggcacatcagaacagagagcaaaatcgccggcagcgagtcggaggcggaaaccagcggctccagcagatgcatgatcgcctgcggcaggatcatcccggtctgcgcttcgataaacagattcagcggatgcagagtcgcaataaccaccagcaccgggatcaagatttcaaacgaacgggcgacgccggtggggacctctttcggcagacgaatcgtaatgttgttttgcttcagccacgcgtaaacgcgggtggagtagatggcggtgatcagcgcggtgaaaatgccctgaccggacagatactgagtggaaattttgccatcggcatagggcgcggcgaccagcaggaaagccataaacgccagcagaccggacatcaccggatcgagctgaaactgacgaccgaggctggcgccaatgccgaccgagataaagaaggtcatcacgcccatgctgaggttaaacggcagcatcagctgttcgcggtagtgctgggagaaatcaagccagccgcgggcaaagccgttggtggtatcgggtga

SEQ ID NO: 246143 - DNA, 192 bp, Klebsiella pneumoniae
atgataaggcataaaacagtcacgccgttaaattaccggacgaccgttccggtcagatccgacttttcacgtataacaaagtttccggaagtgtaccacggtcagggaataagcaaagcggcgttttccggtggtgaacggccggtcacggggcaggggagggacacaacatatagcgtcaaaagcagctga

SEQ ID NO: 246144 - DNA, 297 bp, Klebsiella pneumoniae; identical to SEQ ID NO: 110052

SEQ ID NO: 246145 - DNA, 276 bp, Klebsiella pneumoniae
gtgagcttcgaaattattgctgggctggtggtcgtcatcctgggcgctatagctggcgcgttcggtattggtcatgctcgcggtaccagtaaggcagaagccaaagccgatctgcagcgtaccgaagagaatgccgccgccaccgtcgccgcggcagaacgtaaggcggaagttgtgaaaggggccattgatgtacagcagactgttagccatatgcctgatgacaatgttgatcgggagctgcgcgagcacttcacccgccccggtagtcgttga

SEQ ID NO: 246146 - DNA, 765 bp, Klebsiella pneumoniae
atgcattatgctcaacaatatataaaagataatttattgccgggacaggtgagtcctaacgttgctattacacatgttttaaatggtaatacatctttggaattggaccgttgtctaaaaaatgacggcattaattatttatattctgctcttatttcttacgctgaagctgttaaaggaatacaaacgggattttatagttgggctactgttaagctctattatagtgctttttactctttgcgatctgtactgtccagtgatggaatatgcattttttatcttggtactaaggggtatactttatttgtcagacaaggtgagtctcctgagaaagctgacgggacaacacacaagcttgttatgaaattattcaaaaaaaaatatcctttaagtccttttgtaaatcaacagatagatatggttgaagctttcgattggttgatggagcagcgtgaaactgcaaattataaaaatggcaggttctctgagcctgatgtgcctgtaatttacgaaagatgtaatattggattgcaaagactcctaacagcatacattcaagatgatgattataactattgtttcgaccatgagcatgcaattctttcattacctttggaaataattaaagaggcaagttcaagtgttattcaaaaaacaacatttagatttaataataatgatattgcttacttgaaaaaattgttgcgcgtgggagggcagccagtcacatcttttcaggaattaattgaaagaatgcgatga

SEQ ID NO: 246147 - DNA, 1026 bp, Klebsiella pneumoniae
atgattattgataacgttataaaaataaaacaaactcatcgcgaatttatattaacatccatgtccgctaaagttctcggagagattacctatactgctgttcgcggcatggatgatgaagtcggcgcagtgcaacggattttaattgaacgtcgcattaaaggtattaaagattttgtgctttcaggaggggattttccggcagcaatagttcttaactggacaaaaaaagataatataaaaatacacgacaaatcaatagagtttgatgttgatagtcgtttggcccaaattattgatgggcagcatcgtatcgctggtatcaaggctgcgattaaagagaaagcggaggtggaagatttacaaataccagttgttatttatataaatctatcaacccgtgaatgcgccgatatatttctagcgatcaatactgaacaaaaacctgcgcctcgtagtttggtttatgatctatatggcattggttctgatgcaaccattgatcccgcttcctccagagcgagagatatatctgattatttaaataaggatgaaacatcaccttatttttgcaagattaaattccctggggaaaaacgccgtaaaggtgggatcgctctttcgacagctgtcagcgctataaaaccactcgtcgaagaaaaagctatatttgatcaaatagggattactgaattagcacttcagtataagtgtttccataactatttttctgcaatttcagccgagtactctgaagattgggaatcaaattttaacgtgtttcagtatgctgcagggtttagtgcggcctgcgaattttttgtaactaagattattccttattgtactcaaaaaaaatcgtttgagttagatactatttcagagtctttaaatatcaggaaaaatggattaataaaacaggatgaagttagcaaaaaatcaggcaaagaagctatacgagtgattattgagcgtttagatagatcatttgaaccgaagattgagcaaaaggaacttagattctaa

SEQ ID NO: 246148 - DNA, 201 bp, Klebsiella pneumoniae
atgacaattgtgaaaacccataccgacaccgtgatcaccaaagacggtccgcaggtaaaaaaaactgcaccagacagagcgggtgtgggtcgtcggcaaaaacgagttttaccacaaagaaaccgggcgccgtcactttgcagaaaatacgcgccgccgctgctcggcaccatcaagcctgtcgaggtgaagcatgtttga

SEQ ID NO: 246149 - DNA, 615 bp, Klebsiella pneumoniae
atgagaatgtataaagctgaagaatacactgtctctgtccggctcgagactatcgaaggtgaaaattactttgttggccgcgttgctgaattgcctgatgttgaggaatatgcagataccgctgaagaagcaatggttttagcccttgataccgtccgtactactcaaagagtttttgctgaggaaggtcgagaatttcctgcgcctttgatctttgagacagactcaatcactgcaagtggaagaattacccttcgcctaagaagaactactcaccaaaaagcgattgaaaatgctaagagggaaggagttagccttaatgcttatctgtctgcaaaaatagaaaatgatattgataaacctgatatttctaatgttatcaacggattacattctctagaattgaaaatatcgaagctggaaaatcttatgcaggtacaagagcagccaagcgtcgaatacttgcacgtaggggttgtcacccaggtaggattgcaacaaaaagtagaacttcagcgtcgtgtacgtatcgatgaggctgatactgtctacggtgaaggattaggaaatatggctttctaccctagtttcattaccagcataggatgtatttga

SEQ ID NO: 246150 - DNA, 645 bp, Klebsiella pneumoniae
gtgaacccaattgagagccttaggcgctctgacgtaggtctcacagcatccgtaaaagatcgcagattgagtgatgaggaaatcaaaacagtttggaacatccttcctgaattgaagtacagacaacagctgataatgaagtttctcatcatgactggctgccggagtacggagatcaggacagcaagatgggagtggttcgatttccatgagcaaacgtggaccattccggcaagcgattataaaaccgggaaatcggtcagaagggcacttcccgaggcagtagtaagaatgatgttagcagagaagcaaacgtcagtttcgaaacacgttgtgacactgtcacgctacagagggccagaagatgacagaccgccactacaaccaaacgtcgctctgttttctgctcagattatagctaaaacaggcatgaagccctggtctctccatgacctcagaagaacagtggcgacacgcctttctgaattaggtgcgccgccacatgttgtggaaaaactgcttggccatcatatggcaggtgtcatggcacgttataacctgcatgattatctggatgatcagcgtcactggcttgctgtttggcaggatcatcttgagaagctggttggtcagcctctggtttga

SEQ ID NO: 246151 - DNA, 177 bp, Klebsiella pneumoniae
atgattactctctccagcttttacgtcatggcgtatcccacctttatcatttcgcaatgcttcaaggcgagaatgatgaatgcactcttgaagaactccgcaacatcattatttccgtcaccgatggtgatatccctaaaccatatgacctgctatctcttggcgctgagcaactga

SEQ ID NO: 246152 - DNA, 2502 bp, Klebsiella pneumoniae
atgagcaaagcatttctttcacattcatgggcagataaagaattcgttaggtccgtcgcgattgatttaggaagacagtattgtgtatttgatgagcagatgtttgataatgctgaatcttttaaagattctattgaaaatttcctattggatacgtctatttttgttttatttgccagcaaagcatcactgaaaagcatttgggtagactttgaaataaaagaggctagataccaagtgttattgaaaaacattcagaaggcagtggtttttattattgattcagacataaaacctgaagacttacctgcatggctgaatcgtgctaagatttcatccactaatattccaaaattggtgtctagagaaattagaactcatattgataaagttttaatgatgactcagaagtcttatttcgaggggcgttcagccgatcttgaaaaatttcaaattatgatgactcctattggtttgccagcaccaaaaatttcatcaatatatggtcttcctcatataggacgtcgtacttttttatctcatgcagcaagtctcacattagctttcaacaggctattacctatttctgtttctgatggagatgagctagtagacattacagttaaattctccacgcaattggaaccttactcaactaaagaaggttttgaatttcttattgacacgataagaagagaaagtgaggagcaactggttgaacgtatactaagtcttcttatcactgcagttgcaaataaagaattacctgttttaatcgatgatggtgggctttttacttcagatggctatcacaaacagtcagttcgtactattttaaaaaatataacgtcgaggggtgaaatatatttgtttgttatttccaatagaaaatcaaatgaaatagaaaattcattacaactcgcaccattatcacaggatcatatcaaacggttattatcaaaagtagcagttgacacgaaaattgtattaactgcacctcagataactgaattaagtgaatacgtaaatggtttccctccttctgtttactatgcggttcaattactgaaagaatatggcgttgatgctgtattgtctgataagaatagacttgtgcaattcagaacttcatttttcgttgattttttaaataaatatttttttgattccatagataaacaagtattaagttttctggggaaatatagcccggtgtcaattaacattatagttgaggtgctaaagctagatgtcaagcaagttacggcgagcattataaagttgattgaaaattccttagttgttttaaacgatagaagtttatattatatttcggagcctattttagatgctgtaaataatttatttcgagaggaaaaaggtgtcgatcatttagccacttatcattcattgaaattatatctggcatcacaaaatgaagaattgcctaggttagaattgatgaggttgttgtttagggctgcagcacggagtggtcaaccaattggcgaaatatttcatatgtcaaatgatttgataaggcttgccgaagattattatcatcaacgtgactataagcaatgtatccgatttgctgagttatctcttgaggaagtgagtgataatgaaaatgctaaagagcttctaattagaagctatatacaggatgaacaatgggagctcgcaatggataatataaactcctattcaaaatacgcagttaaaagaaatgtgtcttttctgcttggattttatcatcgaaaaagaggggagttacctgatgcgataaactcatttcatgacgctgagcggagcgggcacaggggggttgctgtaaaacgtgaattagctatgtgctattacttgtataataaaatggcagaagctaaacgttatgttctagaggcaatgagtcgtaatgaaacaaagtatcttattgatctatatattcaaatttttacacgtgaaggtgatgagataaaagccagggaagggttacttaaacttgaaaaaatggatacggtttctttcgttcaacatcgactatcaactgttgagttaaggtttgggaatgtgccagcggcattaaacgcagcaaaatatgcattggaatcggctaaaggagaacgaccaccctttggtatactttcccaactggtaacttgctatactcgggcgggaaagtttgaagaagcagaaggaatattgagcaggttatctagacagtttgacaataagaaaaatgatattaggctggggttggagtgccgtttagaaattgaaaaaggtcgttattctgttgcactaaaaattatttcgcgtataaaaaacaaagagttattggtttataagactatggagagagatgccttggttggtgagttaaaagtaagtgcgctatcagatcaactaagaattgaatattccaaaactgtttcattacttaattctgagcttgataataaagatgtgcttaattcatggatggaattaataatctga

SEQ ID NO: 246153 - DNA, 165 bp, Klebsiella pneumoniae; identical to SEQ ID NO: 206960

SEQ ID NO: 246154 - DNA, 951 bp, Klebsiella pneumoniae
atggaaaatctactcgaacaaccaagctatacaccccacttctccggtcatgagactttcccactaaagcagatgtggctgaaaaagtcttatgatcaaaaaaacagtgataacactcttgacaaagctacgtttactcaggaagaggctatcggtgtgtttggcgtaggcaaaaacatggtgtcctccatcaaacattggtcgctcgcatgcgggctacttgaggagtctaacaccaacaaaggcgttttcattattccaaaagaatgggatatgatccttcaggataaaggattagatcctttttgtgaaaatccaagcacagcttggctcgctcactggcgtttagccggcttaccggcagctaacagtaaacatcgctctacaacttggtgctatatctttaacaatataacatcatcttcattttcacgcgataatatcgtagagcgtcttaaagattacgcagcagaaagaaatctaaaaatctctgaagcaacattaaagagggatgttgaggcctgcattagatcatactgcccaaaatctgataacaatatagaagaaaacgcagaaccactattatcagaattaggtttaattcaagaggaaagtcgaggtctgttttccttcaagagaggacagaaatactccctcagcgaccatatttttattttttcactcatcgaattttgggagtcattatattctgaagcaaatacgttatcttttgaaactatagcatatggtccgtcatctcctggaagagtatttaagcttgatgaagactctgtcgcggacagacttgcaacccttgaagaaaaaacaaatggtttcttaaagtggtctgactcttcaggaattagacaagttgtaatatcaaatacatctgaaaaacaattagctaacttaaaaattgaacaaattattatggcttatggtgatttataa

SEQ ID NO: 246155 - DNA, 813 bp, Klebsiella pneumoniae
atggaaatcaaagatgttttcggggcgcagcccaaaagtgtttgggagtatctctgtgagaatggtcaaggattatatgtgcctgcatatcaaaggcaatattcttgggataagcctaaaataacacgtttaattgaggatatttgccatgggttcacaacgcttataagccgagatgatgcaataacatttttaggtactataatcgcaattcacgatacaaatttagttacggttgatcctatagttaagggagatgttccttccagggttatgactataatagatggtcaacaaagattgactacattactattagtgaatactgtattacatgaagagataaaaattaggttagttaaaaagataaataaaaaaagcgaagccgatgcagatatttggttagtcgaagaatgcatgaaggtgatcggtcgattagcaaaaacattcgaagaagacaaagattatggcgatgaaaattttcgatattatccgagaatgattagagcatatgacgactcgtggtctcgtaaaaaggataaggcgagttataagtctgctataggtcattatttgcacacgtatggtaaatatggtcgtgaggaaatcaagaaaaactttaaatatgatcctcctgaaagtgaacaagagaatagtagtaaatacaagccactatctgagggccggaaaacagtatatgctctggtcaaaaatatatgcaaaacaaatgattcaacaggaaaggcctctgtaaaatcagatcaaccagaattagaacttccagtcggagtttccagaatatgtgaaagataa

SEQ ID NO: 246156 - DNA, 981 bp, Klebsiella pneumoniae
gtgaaagataaattaataaagaatgatgatcaatcatttgaagaattgattcgattaattttatttgctaactttgtccttgaccgtgttgcgataactattgttactgccaaaaatgaagattatgcattcgatatgtttgaatctttaaatacgacaggggagccattaactgcttttgaaactttcaaacctaagattataaatgccgaaaaacttagtgggtatgaaagttcgaaatcacatcaatatgtagaagcgattgaaaattatctcgaaagtactggcaaatcaaatgataaacaggaggcgacaagtcggttgattgtttctttcgcattagcggagaaaggagagaagctttcaaaaagacttagtgagcaaagacgttttctcaaggatagctttgaaaaatttcctgaattaaaacaacagcaagaatttgtcagacatttatcgcatgctgccctatttataagatattcttggcctgatgataagtcattaacttcgttgatttattctgctgaagaagctcagactgatgaagttattttatgtattgatttacttcggaaatttaatcacacaattactcttggtcctttaattcgtttctactccgaaataagaagagtttcaccagaatttagaactattgcaattaataactttattgatgcggttaaagctattactgcattttctgttctctggaggtcttcacgtcgtactacagagaatattgattcgcattatcgtagattaatgatgtatggatatgaagatgttggtttaaaacctctcgcaagggatatgaatgaatttggttcagaaattactttaaatgtgattgggctaaaaaattcaaaagaattgaagtgttgtcttcgattaagaatagaaaacctacaagagaagcttttgcttttattttcgatgatcgagaaaatggaacagtacaagctgaatatgatataa

SEQ ID NO: 246157 - DNA, 837 bp, Klebsiella pneumoniae
atggcagaacgacatgttttaggtatctctggtggcaaagatagcgcagccttagcgatatacatgcgccagcaccatcctgaactcaatattgagtattttttcactgatacaggaaaggaattacctgaggtttatgaatttttaggaaaacttgaaggatttcttggtaaaaaaattgagtatttaaaccctgaccgagactttgatttctggctaaaagaatacaatcattttcttccttcgccacaaacaagatggtgtactcgccaattaaagttaaggccatttgagctatgggtcagacctatgcttgcatccggcgacaccgttaccagctacgttgctataagagcggacgaagaatatcgtgaagggtatgcttcaaagcacaaaaatctaaaaatcgcccttccttttcgtgaaaatggtatagataaagctgctgtgggtgagattttagaagcttcaggcgtaggctggcctgaatattataaatggcgtagtcgctctggttgcacattctgttttttccagcaaaaaattgaatgggcacggttaaaagaataccacccagatgcatttgaagaagcaaaagcttacgaaaaaaatgctatggaccacggttcaccatttacatggacacaaggagaatctctttctgaacttgaaaaaccagagagaataatacaaatattcaaagattatgatgagagaaaagcgagagcttctgcaaagaaaacgctaaatccattacgcccagttgaaatcgaagatattgatgatatatatggtgatgatgaggggaatggttcgtgcaatatatgtcataaataa

SEQ ID NO: 246158 - DNA, 438 bp, Klebsiella pneumoniae
atggtcaaaaaatataactttagtaagaccacctttagtaagcgttcccattatagaagcggtagcgaaacgaagcttccacagaagcaacttcgttctcattgtgtgagtgtcaggcttaataatgaagagctaacgcttctaaatgataaacgtggcagccatcgcaaaggggaatggcttcgtttatcttttcttaatgcgcttcctggtgttgttccagctattaatatagaagcatggagatatttagctgacctttcacagaaactaaataaaattgttgcacaccttgataacaaaagtaccggaagccacctgacaaaaacggaactatttgcagtgaagcgacaaattgccgatcttcgcttacatctcatcaccgccgacttgtggggagactccgatgaagggaatgcaaaagatccgcagaggtaa

SEQ ID NO: 246159 - DNA, 1269 bp, Klebsiella pneumoniae
atgaagggaatgcaaaagatccgcagaggtaagaattttatcgggatcgtcctctatacgttaaaaccagattctcatcatagggtagctcctgtcgtgatcgggggaaatatggatggatgtgcagcgaaagatctgatcactgaattcaatctaacaaaaacgcttcgccctgatgtggataaacctgtttggcacaattcgcttcgtttaccaaaggacgaagtgctaaccgatgctcagtggtccgctatagctgatgactatatgaagcgcatcggcttctcggaaacgcatctcagatgctacgtgttgcatgacgatgcggtcggtcaacacatccacattatcgccagccgcatagaccgtattacaggcaaactctatctcggaaaaaatgaaaacctgattagtacacgcattatccaacagcttgaacacgactattcgctactaagaaccaaaggccctaaaacaaaaacctcttcagcattgccctgccctaaactaaaacgaaaaaaaacacgaaatgaagcgatgcaagagaaaaggacaggtgaacaatgcccaaaaaccatcatccagaacgctttagagacgttagtttctaaaagagtatcgaccactgagtttgtccaacagctttttgaacgaaatattaatgcattacccaatatcacatctacaggtaaaatgaatggtttctcattcgaatacgctgggattgctttcaaagcttcgcaattagctaagtgttattcatggtcgaccttgcagggtaaactcgattatagaccggaacgcgataacggctttctgtttgacctaaaagcaactatcactaaagcgaatgcaaacgaaatcttaaaggaaaacgttaaaaactccttcgaagcatttattattgataggcatgcaggtaaagacgaaagtgctgtcgcttatgtagaagagaagtgttcctcggaagctttagcagggagtaataaagcgataacaactaaagccgtaaaagagatgcctaatcaaagctacgaggtctcagcattcagatggctggaaaccataccttaccttgatacgatttatcgtctgctgaaacaacttaaaatcccaattcttaaacgccccgcaaagcaccaagtcatcactgaagcgatgaagatagaaatccatcccatcaatcccaaaaacactcttaaggcgcctttacttgacagcaatttagtgccaccaaggcaacatgaccaccttacatgtagattttag

SEQ ID NO: 246160 - DNA, 174 bp, Klebsiella pneumoniae
atgcagaatacagagtttaatattatggagagatatttgatactgctcgataagtttgtcgataaaattatcgaatcaggcgtttctgaacaacaattgatcgagaagtcgtatctgttctgtgcagggtattatattaagtaccagcaagaaattgaaagtctaacattctaa

SEQ ID NO: 246161 - DNA, 204 bp, Klebsiella pneumoniae
atgaagtacgttgtaaaaactcactttggatatagggctacagccagagctaatggaatgacgcagaacattggcacgttctatagccctgaaagggcaagcatagctgtcaggttatatcagcattggttaaaaaaatttcagtattccgatgtccccagaaagcccatgcatcctgatgcgcttaatgaatttggcttttaa

SEQ ID NO: 246162 - DNA, 144 bp, Klebsiella pneumoniae
atgactaaagcagaaatgattcagtacctgatgagccgttatcaagtttcctaccgcatcgcgcaggatgcattaagcgataacgactgggatttgatgatggctgcaggtgatattcgcgacgagctgaatgcggaagtatga

SEQ ID NO: 246163 - DNA, 228 bp, Klebsiella pneumoniae
atgatcagaaaaattctgtctcgcattaaaaaagaccctgagcgcgcgagttatgacgagtgggttaagcgcttctcggctcaggttctggaatgcactcgtagtgaagatactgtcaaagcagagcttgaatgctggccgttcgttcctgaaaacagcatctataactggcgtgatgccgaccctgttgacgccgcaaatgaagcgctgagctattacggagactga

SEQ ID NO: 246164 - DNA, 843 bp, Klebsiella pneumoniae; identical to SEQ ID NO: 122286

SEQ ID NO: 246165 - DNA, 492 bp, Klebsiella pneumoniae; identical to SEQ ID NO: 122287

SEQ ID NO: 246166 - DNA, 378 bp, Klebsiella pneumoniae; identical to SEQ ID NO: 122288

SEQ ID NO: 246167 - DNA, 231 bp, Klebsiella pneumoniae; identical to SEQ ID NO: 122289

SEQ ID NO: 246168 - DNA, 372 bp, Klebsiella pneumoniae; identical to SEQ ID NO: 122290

SEQ ID NO: 246169 - DNA, 819 bp, Klebsiella pneumoniae; identical to SEQ ID NO: 122294

SEQ ID NO: 246170 - DNA, 543 bp, Klebsiella pneumoniae; identical to SEQ ID NO: 122295

SEQ ID NO: 246171 - DNA, 468 bp, Klebsiella pneumoniae; identical to SEQ ID NO: 122296

SEQ ID NO: 246172 - DNA, 312 bp, Klebsiella pneumoniae; identical to SEQ ID NO: 122297

SEQ ID NO: 246173 - DNA, 267 bp, Klebsiella pneumoniae; identical to SEQ ID NO: 122298

SEQ ID NO: 246174 - DNA, 504 bp, Klebsiella pneumoniae; identical to SEQ ID NO: 122299

SEQ ID NO: 246175 - DNA, 615 bp, Klebsiella pneumoniae; identical to SEQ ID NO: 122300

SEQ ID NO: 246176 - DNA, 237 bp, Klebsiella pneumoniae; identical to SEQ ID NO: 122301

SEQ ID NO: 246177 - DNA, 885 bp, Klebsiella pneumoniae; identical to SEQ ID NO: 122302

SEQ ID NO: 246178 - DNA, 630 bp, Klebsiella pneumoniae; identical to SEQ ID NO: 122303

SEQ ID NO: 246179 - DNA, 1593 bp, Klebsiella pneumoniae
atgagtaaccttaacaactatccgacagatgtatttccttcagttttacgtaatgtcattacgacgctacatgaagacacccttatccccatagaaatgattggcagtacggtgctggcggcattatcactggctttgcagcctcttgttgaagtggcctctcccttcggaaataaaaagccagaaccctgctctctttattttctgacgctcgcaaaatccggtgaggggaaaagccccctccgtgaattgcttatgactcccttcgatgaatttgcttctgagatgcatgaggaatatgaagatttacttgatgtctacaaaaaagaccatgctatctggtcattaaaagaaaaagcactaaatcgtaattatcagaaagcagtaaagaatggtggggaaggtgaggttgaagaacttcttctgcgcgagcatcaggctgctgaaccgaaaaaacccagagcgtttgaaatgttttatgaagatgcaacgccagaaggtatcattcagggactgagtgaatatccgtatgctggcgtatttgcagatgaagccatgactttttttaccggccagttaaaaaacaacctcggattgctcaataaaatatggaaaaacgaacctctttcggtctcacgtaaaaaagaaggcactatccgtcttaacgcatatctgacatttcttcttatggttcagcctgaagtatttgaggagtatctggaacgccatggaaaaaaagctgtatctagcggattccttgcccgttttttatttacagaaacagtaagcactataggtcagagaagaataaacctgaaccaagataactcaaggcaagcactggacaatctattcattcatttaaataaattcctggaagagcaaaaggaacatttttacgataccagcaaatctaaaaggacactaacattaactgaggatgcgaaaaaattatttgaagggaaagtaagtcagcatcaattaaatatagcccaaaaccagtgctgggagcacatcccggaattcgtgtctaaagcaggcagtcaggcaatacgcatagccgctatttttgattgttattctgaaagtgatatatcagaacaatatttaaagaacgcatttgcgattactgaatggcaccttaatcaggcagctaagtatttttataaactaagtgcgcaatatcaacttcagcaagatgtataccagttgttcgactggataaaaaatcactttgttaatccgactggtgtaatgaaagtcactaattttcaaacagggcaagtgactggtgtaagaattaatccctggcagccgttctcaaagaatgaactggagacgcatggtcccgccagactcagaagaattgaacgtttaacacctgcactcaaccaactcattcagctcggtctggttgtcacaatatgctacccaccacaacgtgcgatttatatcgcggcagcacaattagatgcacatggttatatttatcccctcaatccatttttcaataaatttaacacagtagactacagaaataatgccactccaccactgagtggttacgatcccaacagactgcaatggcaatga

SEQ ID NO: 246180 - DNA, 243 bp, Klebsiella pneumoniae; identical to SEQ ID NO: 122306

SEQ ID NO: 246181 - DNA, 1017 bp, Klebsiella pneumoniae; identical to SEQ ID NO: 122307

SEQ ID NO: 246182 - DNA, 1698 bp, Klebsiella pneumoniae
gtgaaatatcaagtttacccatcgataatgacgcagtttagttctgcgccaaagtcttactcttatctgactctgttaattactgcggctttaattattttggtgggtaatgcatcgggtgatatttatcccctggttactgccagtggcgcttttatttttttttgtgggctggtttatttgatttctgcgaaagcgatgttttccgtgtcagctggcagcctactggttatcgtgctgcagtttattaatcaactcaaggtgcattattataaagataaattgatgttccctgacttctacatgttggcagacctatccaatgcggatacgctgcttcattacccggccgctggactggccctagtcgggctgggtgcttttgtcatcttcactctcattgttggatggcgtgcggtaccgcgccggcatggatttacaccacaattgattgctatttccatcttggtagccagcggttggttggtaagccagtgtgttatgcgttatcaaaacgactgggtaggtcgactgccgggaggaactggcgttgtgtctaatttggttatgtcgagtagccagacggactatgatccgccgtacttttctgatgatagagaaggggatttcatcactcgcgcggccgtcctccacagagaaactaaagccgcttcaagtctatatcccgacattgtgctgctgttgcaagagtcaaccactgatccgcgattgtatcaagtgccgactccagcgttgctaccgcatttatccatgtttgaacaaggaaatgctgtgaaagcacaaacactcttgagggtgcaaacatttggaggagggacctggctatcggagtttgcagttctcacgggactgcgcagtgatgattttggtgctaggaaaaatgcggtattttactcggttatcgaccatgtgaatgatagccttttcaaacagatgaaagccaatggttattataccgtggtactcactccattcaataagtcagcctataatgccggccacgcctatactatgatgggggtcgataagattatccagccacaggagctgggttatcccggtagtctgcaagataatttgtggcatatcaccacagcagacatactgcattacatcaaaaaaatcttagatattcatactgataagcctatttttgtctatgcacttaccatgtatgagcatggtccttacgcttctgatcatagggatgactatcaactatcctcggtggtaaaaaacaaagattctgcatctaaattcagtcactatatggaaaaaataaaaaattctgacgtagcgatgtcagaatttttccagtttgtcgaccagcgccaaaagccaacaatgtttatgtattttggtgaccatcagccgagcatagattgggctaacggctatacgacatcgctaacagatgcctctcatcttacgcagtttagcctgagagataacaccaatatgcgaacagtatcagacctgggatcggtgactgatatagcttttctgggagggatactgctggaacaagctaacttgaaggtatcaccattctaccaggccaatatcgacatgcgtcatctgtgtaaaggagctttgaacgattgtggggataaaccgcttcttaatagctatagacactatatttataacaggttacatgctgcctctcggaactga

SEQ ID NO: 246183 - DNA, 2016 bp, Klebsiella pneumoniae; identical to SEQ ID NO: 149390

SEQ ID NO: 246184 - DNA, 696 bp, Klebsiella pneumoniae; identical to SEQ ID NO: 149391

SEQ ID NO: 246185 - DNA, 225 bp, Klebsiella pneumoniae; identical to SEQ ID NO: 149414

SEQ ID NO: 246186 - DNA, 252 bp, Klebsiella pneumoniae
atggaggctgtatttgttttattcacaaagttattattagcactcggcctttcattttcagacagagttgatactttaggagtattttactgtattagtgagttcttggggcttactgctattgttctaataatgtttgttttatttgtggctttaagacaatttattcataatttcaaattaaaaagaagttatgattacaaaattggaaaaatgctctcagatatcattgatagcaacacagaggaataa

SEQ ID NO: 246187 - DNA, 150 bp, Klebsiella pneumoniae
atgatgtggaagttgtctgccataagcacaagcgatttgtggatccctaaaggccacagtaattttttcaataaaatcaggttcaggaatagtatcttgggtaagaaatattattatatcgtaattattaatctggtcttcgacggctag

SEQ ID NO: 246188 - DNA, 561 bp, Klebsiella pneumoniae
atgacttccactaccgctattgctatcgctgccgactaccagaacctgctgcagctgctggaaacctccgatgacctgactccggaaatgatcgccgatacgctggaaggtcttgaaggcgcgctggccgataaactggatgctgtcatggtcatcgcacgcaataacatgggcaacgccagcacctgcgacgacgaaatgaagcgcctggccgagcgtaagaaatcctttgagaataaggataaagcactgcgcaagtatattctgtcctgcctgctggcggccgggctggataagatgaaaacggctaaaaacacgttcactgccaggaaaggaagcgtcagcgttgtgatcgataataccgatctgctgcctgatgaactggtgaccacgcaggttgtcatcgcgccagataaaaaggccatcaaggaggctatcgagtcagcagaagccgcagccgcacaaatcaccgccgaaggtggagaggtgccggcagagctgttaaatccggtaccgggcgcccacctggagatcggcgaacgttcattacaggtgcgctga

SEQ ID NO: 246189 - DNA, 2202 bp, Klebsiella pneumoniae
atgaccatctaccacggcctttttgagccgaaaaaatcagccatcaaagacagcggcgccgtgccgctggccatcgctattgatgcaccaaacaagaaggttgccgaaagtattatggtcggcaagctctgggagttttacccggcaaacggcgataactatttcaaacccaaaatatgggaagactccgtgggtcagccacgccccgccgtcggccagttcgatgagcagttcgcccaggaaaacaccttcgacggtgaaaaatgggtggttaacagccaggacgccggaacgtcggacttacctgctggcgatgacattattgatctgatgaccgtatcccccagggagcgttttgctgctgtattactcttcagtaatgcagagatgaacggccatctttattcgcaggttgtagattatcttgatgatctggataaccacgacgaatccatggaagaggatgatcgttttaatttcaatgtgctttgcgccctgcacaacaacgagccggttaaacacatgcacgttgaagggctgaataacctgattcaggggatcttttccaactttgaaaaccagaccccgggcaaagcggctatttctcagtttgtaaaacgctggcttgaaaatccgggtaagcgggatgaaattctcgcgaccggtaataaatcatcttcactcggcgctaacaattccgccgatgatgccggcagctttaccgttgcacctcagcgcggctacaaacatacctacgcaacgctggatcaggaaattgccgtcgccctgctccctgcttcacctaccgcgcctgtattgtctggcaacctccgtgatgcagaaaagattattgccgatgatcgagaggattttaaacggtggtcggcacaactgcgcaccactccggagatactcaaatacgatcgcgccagtatcttcggtgttgtacagaatgcaccagcgaatgatacctaccattttcccgagagcttgcgccgtcatattgtttcatggctggaggcaaacggccgctttgaagaaagcgagaacagcaaaacaaaagctcctgacgtccaggttaaaaaggtcgcaggcggcatgttttctgtcgagggtctggcgcaggaacccgcctcaaatgaaggcgaaaaagcggaagtagcgccgccagttgtaaccgacacccaggcgaagcaggcgcgtgaggcgcttaacgatatgggttatggcgtttatgcgtccgacaaagacaacgccagcgaccccgaggaaaaactgagcatcaaagcgcaaagaattgctgatgatgtggagaaactggttgagcaaatagaccagaaagaaaccatgccgagcgctgaagaagtcgtgcgttcagtcggtagtcctggaaccgaacaggacaacctggcgctgtggaaacgcgtcttcaaaaccgatgagcgctttaccaaagcattcacgcaaaacggcggtggcacctcaatcaacggcacgtatcttacgatgctggctacccgtgagttcggcctgaaaggaagcggctggggcgtcgatatactggaagaacgctttgacgatggagcgccaattacacggacggtaaaaggaactgacggtaacaatacatgggaactgatctcagatggtaatggctgtttcctcactgaaaaacatcacgtaattaaaattcggctttggtatctggtaaacggtgttcgcggagaagaatacgcctacggctgcaccccctacatttacggcagcaaatacggcccgatctgcgacggcgaagccgctaaaaaatccctcaccgatgcaactaaaaaagcattatccggcctcggctttagcggagatatctttatgggtctctatgacaacccagagtatcgccagaaaaacaaagcggagttcgacctcaagaacgccagtgaaaccgccgaagatgccgcgcggttgcggcaggagttcgacgacaaactttcccgcgttgctaacacgctgtccaccggcgtatcggccaatgaagttaacaaggtgtttgccccaatcgcccgcgagctggagatccaccgcaaggatgctgaatcaaaaggcgacactcagcgctcacgccacctgagtacccgcctgcgccgcctgactgatatcaaaaatgcacgtatcgccgaactgaataaatccgaggagaaagcataa

SEQ ID NO: 246190 - DNA, 246 bp, Klebsiella pneumoniae
atgacaaataactcattcatcgaaaaaataatcgattctggattgtcagtatttgagcacgaaaataatagcgactttggctcaggaactatgcatatcacgattatcggtggtgttcgtcgcgttgagttctacccaacaaccggtaccgtttacgccaatgctgaaaaggggaaatttccggcattccggcagaaaaaagccggaattaaagttgccatccgtatcgctaaatccggcgcgtga

SEQ ID NO: 246191 - DNA, 1311 bp, Klebsiella pneumoniae
atggatctttttaaattacttgacagaccgatcgcctttcaacgtagttttgtccggcttggggctggtatttctggcgcgttatttttatcccaggctgtttattggaatgccagaacttctgaccctgacggatggttttttaaaacccaaaatgagtgggaggaggagaccggtcttaaacgtactgagcaagaaaaggccagaaaaacattagtgtctctcgggattctggaagagctgaaaaaggggattccagccaaattatattaccgggtcaatgaacataagctagcccttgcattacagggagagatccaaaaagtaagtttggatgaagtgattttgatcttctcatcaacgttgaaaagcatgtctaaaaccggctatatgcgtgcgctgaatattggtgtggaagctgaatatatcgattatgtcgaggtattaaaactgcacggtatgacatgttcttgctgtggaaatccaatcgtttttgggccaggtaaaaagtcaccgtgcttatcattcgatcatgtcatcccattagctaaaaatggtaggcatgtctttgaaaacctacggcctgcgcattttggatgcaattcttcaaagggcgataaatttgaagcaaacaaggatgcctacactaagcaaactggtatgcctatacaaggcaagcagtcgtgcctagacaaagcaaacattcatacagagattactacagagattacagatccccctaacccccaaatgggggaaggcgacgagcgtattatttctgatgctcaaaaagccctggatttctacaaccagcagacccaaacccgctgccgtgatctgaaaccatttgtgatgatgctgacagcgaccactacccgtgacgggtacacgctggcagaactgcagttggttatccgctgggtgctggccacatggcgccgccgtggcgatagcctgccgaagccagcgaacatctgccgggttaaccgctttgatgggtatctcgctgacgccgaagtctgggcggtgaccgaagcggatattgatcctgatgctgtcatgaacggctacaacgagattttcgccgacgctctgccagtcgcagaactggatgccgaccggcgccggatgattacccgcctggctgcccacatgaaaaataaaactaccggggcattcctgggttacttcgaaaaattccgcgctgacgctcctgatttttatttcggtacagatggcggctggcgcgcaagctttgactacctgatgaaaccagaaacgctgcgtaaaactcgcgagggcgcgctatga

SEQ ID NO: 246192 - DNA, 162 bp, Klebsiella pneumoniae
atgaagaaacttttcgaaattgattttatgcactgcagtcggcggtctctgctgctgttcgtgacagcagcaagcatcattgggtgggtggcaattttcgccgctctgtatgtggcttgtctggtgatcgagtgggttggggcacgaagtttatcaagttaa

SEQ ID NO: 246193 - DNA, 723 bp, Klebsiella pneumoniae
atgctggaatcacttaaagagtatttttcttcgaccatcaatacagctgctaacagaattagtaatcctgcttttggtgcatttgcactttcttggagtgcattcaactggaaatcgatactttatcttttccttagtgattacggagttttcgacaagatcaattacatttctgaaaacagtagttggaaaacggttatcctctatccatgtatttctgtagccatcctatgcttaggcctgccctggattaataacatcatttcagcatggcaggataagccgctggataacaacgactctattgaaaatcatcgtaaagccaaacgcatccatcgcgctacgcgcctacaacgattaagagccaagcatgatgtaacctatgacagggttaaaactggtgccgagaaagacattcaagacatgaaggaagaaattactcaatcaaaggaaaggatgggagatttaaccaaagaacgcgataatcttaagtctgataatagtgaattaaagaaacaaaaagaaatccttgaaaataaaataaaatctcatgagtcgataattcgtgacataaccactgacaatgaaaatctcaaaaaacaattaaatgagattagaggatattttgatctcgatactaaaacattaattgatagaaccatcccattaattaacaacagctataattcaatgggagagaaacttaatagcatgaaggaatag

SEQ ID NO: 246194 - DNA, 165 bp, Klebsiella pneumoniae
atgcagaatttaattccgtccttaagagcagcagataaatccaaaaagtgtcatggcgccccgcgtacggaaagaacaatattctgttcagtctcctttttcattctggcgggcggcgatttttcccttctctatgctcgcgcgcgcgcgcgtttaggagcctga

SEQ ID NO: 246195 - DNA, 408 bp, Klebsiella pneumoniae
atgggcagacccagaaaaatcgttgagacgccggggcaggaaaatgcggcatctgaagaaaaaacgtcattcgttgaagaggggcggttaattactaccgaacaggccgccgtgcagcagaacgttgcaacgctgcttgatggtacccaactggcagagcgcaatgccattattgcgacgctcaacgcgcagggcgccgccattgttgcccacttcgaggaatacgtattcaccgacgcgctcggacacccgctgaccaacaacctcgattttctcgatctggtacgtaaagccactgacgttgtaaccggcggtaccggcctgatggtgacaaacgaggaaggcaataaacaaccggtaccgggaaaaccggtattaaccgaacacggctggcacgttccaggctaa

SEQ ID NO: 246196 - DNA, 234 bp, Klebsiella pneumoniae
atgagcacgaaaaaagtatcaccagcggactacaaacgcattttcgaggaaatgccaggcggtgccgaagtgctggccgaaatcacccgccgtttcgggcgtgaagcgtacgtgaaaggcggtaccgaaggcgaccgcgaaacctgttaccgggccggacagcgttccgtgctcgatttcattctgatgcaaatcaaccgtgcagatggagtaaacgacgatgtggaagattaa

SEQ ID NO: 246197 - DNA, 849 bp, Klebsiella pneumoniae
atgtggaagattaaacacttattcatgaacgccgagcaaggcgctgaagcgccagccggcagcacagggggcaacgatggtggcaatggcggtggtgctgaaaatccgggcgctggtaatcctgctggtacttcgctactcagcaccggcggcgacgaaccgggcgcgaatgactggatacctgaaaaataccgcgttgtgggcgaagacggaaagctcaacgttgaaggctctgcccgcaaactggcggatgcttacacgcaccttgaaaagcgcatgggcagcggcgacacgccgccgaaaacggctgatgattatgcacctgaggtgaaagccgagggattcaactgggatgagttcaaggccgatccccgcatgcagtcgttcatgaaatcggcgcatgcaaaaggcatcaccaacgatcagatgggcttcatcatcagcgagtacgcgcagattgcgcctgagctggttaacggcgccgcagcgctggattcggaagcggccgccacgcagctgcgcgaagtctggaagactgatgccgaatttaaaaagaacgttggttttgctttccgcgcgtttaactccctggccgacgagggcgacaaagggcgcatggacgaaatcggcaacaacccgatggtgatccgcatgctggcgaaaatcggtgcggaaatgcaggaggattctccggtggatggtgagggtaatcccgaagaacagcagaccattcgcgacctgatgaagtccccggcgtacatggactcgaaacacgccgaccatgatcgcgtttctgcgcaggtcaaagcgtactaccagaagcgtttcggcgatcaaactgtagcgtga

SEQ ID NO: 246198 - DNA, 333 bp, Klebsiella pneumoniae
atggacttgtttgatttattagcaaatcgaggggttgaatcttttttttatttccctgatgaaagggcaatttatgatacgtccggcaaaatgcttggggtaaggcatcataaaaagcattgttgggtggtctatccccatccattaggccctgctcttgaaaaacataaaatcgctataagaacggcaattaatttcaataaaatcactaatatagaaattgatgcggaaaataatggagatgcgattagacaaccttgttacgagatagagaccagtatctacggtaaaacgagattcatgttgcttagccagccctttgatattaagtaa

SEQ ID NO: 246199 - DNA, 651 bp, Klebsiella pneumoniae
atggaaattttctggatagttgtcggtgtggttgttgtaatcttgttcgttattaatcagaacagaacaaaaatcactaatcgaaccgttataaccagagataaaactgttaaaactgaagatggcgaaatccgtattcagcaaacacaagtaattgatagtgcttcaacgcagtatacgaaacctaatacattaaataatggaagccactctgaatatgataaagctgctatatcagattattacaagcagctttctcatcagaaagctgttgagtcattgcgtactgagcagcaaccctttatccaatctcagagggttgaaaaagtggtcaacccgcccacctcatcaacgattaagccaacgttaattgaaagtgcctctccagttgctagtgggagtaaaacttgtacacgatgcagtagaaacctgtcattcgataaattcagaaagtctagtaaacatccagatggctatacaatttggtgcgctcactgtctggatggacctaaaaacacgcagcatacgaaatggtgtccgatttgcgaaattcgccgtaaacgtacgagttattacaaaaatgcgaataaccgtgatggtttgatgtcatggtgcaaaagctgctgggattcatacaaaggtaaacgctaa

SEQ ID NO: 246200 - DNA, 2649 bp, Klebsiella pneumoniae
atgtcggtacccaaccagaccccctataacatctataccgccaacgggctgacgaccgtttttacctatgagttctatatcattagcgccagcgatctacagatcagtattaatggttcggttgtctccagcggttacaccgtggcgggtgttggcaacaaagacggcggagatatcacattcctgaccccgccagcgagtggcgctgtcgtcatgctcgaacgtgtggtaccaacgtaccgcctcaccgattaccaggacaacggggacctgctggccgataccgtcaacaaggatttcgaccgtatctggatggctattcagcgcgcgtttatcgatctggggtttgcgttaacccgtcctatatttggcggaggccctttcaacgctcacggctaccggattgccaatctggctgaccccattaacgatcaggatgcggctactaaaaagtttgttattgaaaacggaaaaacaaacctggctcggacactgcgtgttcctgagttatctgtagctatattaccaagtgttcatgggagaaagaataaactccttgccttcaatagcgaaggtgatcccattacagttctaccagagaatggatcagcatctgacgtcctcatagaactggcagcaagtgacggtttttctttgctcggtagcgtgtctccgcgctctggattgcgtaacgttaaaaccagttataacggtcagtctgttctgatgaaacgggctgtgactggaggcccggtactaaatgctattgcgacccacaaaccggggatgacggcagcagatgacgattattcaacgtttattactgctgatggcgatgtctaccaattcgatatttctgcggggattgacttcaggctggcgggagtgctgcttgacggaagcaatgccggagcatgcataaagaaaatcgttgatactgaagtggcaaaagctattgctgctggcagtattgatgcatgcaaaaaaatgataacaattagtccactgggaaataacgatttaactcagttaattctcgacacggatgaaacgtttgttattccgtcttttatggggttgtggcatatcggccaggtcagatataaattcaacgggctgactaaaccggcattcaggatatgcaatgaaattcctggactgacgtcaagcatggttgattttgttgaccggcagggcgcagagatcattaaaggaaatggctatctggtagaaatcatcggcccaaacccggcaacatatgacgagtggtacgcactgactcagtcaaacccatcagctgtcagttcagctgcggggattgagttcgggaatacctattcatccaaaacgctgctcgactgtcgcgataccattattgagaatgtggcgattgagcgatttcatggtggtctgcggttgcatgggttcgacatgtatatcaacattttcaggaatctgaaaataacatcatgtgcttataccttctacgaacctgatgcagataaatctaatgccggagaaaatatccgtttcgagggcgggacattcggcaactgtcaccgctcacatttttatattaatcaggttgggctgagcagaatttacgttggcagctcatttgattacgctcgccagaatttcctggaattacgctcgtcaggccggggaaatgattttatctatgaaaattgctggatagagggttttggtgatttccttattcgtcagtatccgattaccgatacctggagttttcgaaaaaataaaatcacttttagtggcggtaaaattgtcggcgctaaaggcagtcagactgagtgggcaccacgtcgtaaaatcattctggccccgacggataacaataaaattgagtttatcggcactcagatagagtggcccagcccgccatcagaaccccagattgccctgatgggatacaccgacgataccattaaatacaatcccggtcgctacagctgccctggtactgcctatgaagatgagttgttaaactatgcgtatggactgaaggggaatgcgtataaatttgccggcaccgaaggcgcaagtcttaagaataccaaagatgccgcaacaaacatttcgttcgacaccaataacaatgctactggctttacagttgaatacgggccattggatagcgacggtttgaggtgtgtaaaaatcaccactacggcaacaactgacctggtggagttaagtgataaacgcctgatggttaaagcgcctcagcacaccgttgttaatgccggtatctcaatcaagatggcgaccgttactgcaggcgctgtaacgttcggtatgcggttacgcgcctataacaacccggtatccacagcgaatttaactactggcaccgtcactaaaacgtatacgcttaacggttctctggcgagcgacccctacaatgtttcgtcgctactgagtgccgccggtacacctctgacaacggataagtatgtcggggtacagacttcacgcgacctggctttcgacagcactgtcgccacccactttgttccgacaatgaccgtgaccggttacgttggcacaatctatgtgaaacttcccgtgtggtggatttctaacggctccgcgcctgctgcatactctatcgaggaatcataa

SEQ ID NO: 246201 - DNA, 258 bp, Klebsiella pneumoniae
atgaaaatgtatatgagctgctctgccagcagcaatgaaagtgccgcagaacctcagcaattcaaggacggttcgaattatttcttttaccgtcctgcgagagaactcacgccactggagtttcaggtttctgaatcgagaccggataacgtcctggcggagatcgaggcgggcgacagaaacggcattatggagcaggccatttctgttgctgaactgcatgctaacggcgcacctcattcggtgcgttttgtttaa

SEQ ID NO: 246202 - DNA, 150 bp, Klebsiella pneumoniae
atgaaaataaagatttcttataaaggcagcgaattcgctcaggccataagcagtatgatgactgctttaataatcacacactttacagacaacttttggtggctgtttttagtggcggttctttatggactcagcgttgaaaaggaatag

SEQ ID NO: 246203 - DNA, 225 bp, Klebsiella pneumoniae; identical to SEQ ID NO: 194919

SEQ ID NO: 246204 - DNA, 747 bp, Klebsiella pneumoniae
atggtaatctcattgaatcaggggggaattaagactgatgggcggggtctgcgtgctgccaatatttttacacgacaggtgttgacggcacacagtctaaataagttgctgccagtgctgcgcaatggagatgatcctgatatggctgtgtgggatttaaccactatagctcttttatccagaagcattatggaaaatttccaagcgctttttttttacggcacagaaataatttcggaagaagaagctgatttacggtttcatattctccaaaaagacagaaattataaatggcgtgatatcagagtgaaagcaggtgaacctgttgaaactctcgaggagtttaccactggtttacttgagcaacaggcacggatagtcaatcatgaattctatagctcattgtctaaaggacaaaagaatagcctaaaaaataggtcggagatgtattactctaaagctgagtttgaggcacgatgtccacggctggctaatattgggcttagtcaccaattactgtcaaatctggcccaccctctgccactagctatcgagaggatcgatgaactcaaggggcgtggtaccccaaatgatgctgatatcaatttagccatattctcgctgaacgtggccactgattgcctcatcggctcgattgaagagatgggaataaaatttgctgataatatcggtgtgccgtatcgttcactgatacaggagcttgcaaaatacccagagttaacttaa

SEQ ID NO: 246205 - DNA, 669 bp, Klebsiella pneumoniae
atggcatttactgatgaaacaattacagcaataaaatcttatatcgacgcacatctgggaggctgggattggcataaaaaaagattcgacttcatttcagatgaaacacttcagtcacgacttgcagacgaattcatctcaactgggtatatatacaaaatactagaaggaatgaatgctgacgagtggcttttgagagctcaaatccgcttacaagtattagcatacgcatcgatatatgaggcagtactccaccatattttatttacagaaatgtcgtcaaataagcatgtacaagcattaacagagtttgaaaccaaaaaagaaatatcaatcccacagaatcaaagaattattttagccaaagcacttaaacatgatgagaaagatatcattccgacatataaaagtaccgcaaaaacagacataacaaaagtgcgatttgataaaaaagcagaatgtgctgaaaggctaggtttaattgatgcaaaactcaaggatgaactcattgaattatatgaagccagaaatgccattcacattcatgctgaaattaaaaaaaatttagattatcagctagacttatccaagagagcatatatgcgaatggagcctttcgttatgcaaatcaaggagaatttaccaaaaatattagccaatcaaaattga

SEQ ID NO: 246206 - DNA, 837 bp, Klebsiella pneumoniae; identical to SEQ ID NO: 196500

SEQ ID NO: 246207 - DNA, 351 bp, Klebsiella pneumoniae; identical to SEQ ID NO: 196501

SEQ ID NO: 246208 - DNA, 873 bp, Klebsiella pneumoniae; identical to SEQ ID NO: 196502

SEQ ID NO: 246209 - DNA, 1029 bp, Klebsiella pneumoniae
atgacacgaacaagaaaaaacccggatgataataaactgcctccacgggtatataaaaacaagtacagttattattacaaacccacatcaaaagagtgtatttctctgggtaaagttaaagatatgactattgcccaggtgtgggcgaaatacgaattgctgattaactcaatggcaaacgtaatgacgtttggaaagctatgggataaatttttatccagcccctactatcgggaattaggccagcgaacgcagaaagattacctacagcaccaaaaaaaactattaaccgcctttggtaaagtcagggcagattatataaaacctgagcacgtcagggcgtacatggataaacgcggactgaagagtaaaactcaggctaaccatgaaaaatccagcatgtcgcgggttttcaggtggggatatgagcggggatatgtgaagggaaatccgtgccagggtgtgagtaagttttctgttaagtcgcgtgattactacataaccgatgaagagtatatcgccatatacaaagaagcccctcccgttttgcagtgcgccatggagatcgcatatctgtgcgcaaccagggttggcgatatccgaaacctgacgtggcagcaagttatggataagggcctgtttattcagcaggggaaaacggggaagaagcaaataaaacgctacacggagcgattaagcctagctctcgaacaggccaaattgctgggcggccatcattatgtgatttgtaacaaatacggtagccagtacagctatactggttttaatgacatatggcgcaaggccagaacagcggccagcgaaaaggtcggacatcccatcgaggggacgtttcacgacctgaaagcaaaaggaatttcggattacgaaggcagcagcaaagagaagcagattttctccggacataaaaccgaatcacaggtattgacctacgatcgcaagactggagtaacacctacgctcgacattcctgtgttaaatgtcacagtatctgacagtaaaaagtga

SEQ ID NO: 246210 - DNA, 1101 bp, Klebsiella pneumoniae
atgaaaaaatattttagaattgataaggattggggtttcactaaagcattagacgaaatcaatcaatgctatcgccctggtggaataggttcaggcccagctcgcaatgtgcatattgaaaattgggggcttctcgtaggcagaacacgagctcttgccgaggttaaacttgcaatcgaagagcataagacaaaaacaaatctttgcgattatatccacatgtccaactcaacattaaacagactcatcgattttttcaaagaactaccagatgatagtaccaataataaagtccaacaaggaacatccatatcctcacacttcctcatgcgccaagttgggaaaggtggtaatgcggttgtctggaaagttcgaaaaaatgacggatcaacatgtgttatgaaagttgtcaaaaaacccaaaggaatagccctaactcgatttaatgacgaaataagcattttaaaaaaaataaaaacattgggtaacccttctattcatgtgatacctattattgatagttatacgcaactggaggacgataactttgcctggtataccatgcctgaagccacccccttagaaaagcacatcacagacacatccccttcaatattatcaattttgaaaggattgctagatatttgcattactgtcgaagccttacataaagaaaaaatttaccatcgagatataaaaccaaacaacttcttactgtataagaaaaaatggtatttaggcgacttcggaattgcaacattcccaaataaaaacaatgttactaaggaaggggctaagcttggttcattacatttttacgcaccggaaatgctctcaaacacaaataagtactcttgcgagcacgctgatgtttatagcttttcgaaaacaatgtgggtcttgctaagcggccaaaaatatcctttaggtggagagttgagactagatcgtgaagaggctctactttcaactttctgtagttttaaaaatatatcgcttttagatgaaataatttcccgttgtacaagccacattcctaccaaccgtccaacaatgacaattatccgtaattacatacaaaaggttatagataacgtgtaa

SEQ ID NO: 246211 - DNA, 1248 bp, Klebsiella pneumoniae
atgagcaaatatctaaaaattgatcttgcttacgactttttgatagaaaaagaaaaacaaggagaaacgttcaaacttaccgagttatcacaggctagcacttggtctataaaaacatgttctacacacatttcgaaaaagctcagcacttactttcaaagagaaggtgatgattatataaccaatgggattttatttttaagtaagaatgattttagggcagcattaagtcaaatatcttcactaatcaataactattcaagaaaaggtattctactcaacaaatctaaagagtttgctttgttaggggtctccacatacaacaatcctctaattaaattcaagacttatggatttattattaatatgacaattgctttcacttcactttttcatgctattttcgaaaaagaagggattgactattatcacaaagatcgagatggtaatacgatttttatcgatggtgaagaaaaagcgtgggaacttaagcaatgctgcgataattactgggaaggagaagagtctgccgttaaatccaatattttattcctagttggattgagaaataaaattgagcatcgttttttaccaattgtcgacttaacctgcagtggtgaatgtcaagctgcattaacaaattttgaaaacatccttactaaagaatttggtgatgaacatgcccttttggtcaatctagctgtatcaatgcaattaagtcgtgcatcacttgaagcaagggtagaagctctaaaacaatttcaatctcaaaactacgctgttgttagagaattcatggaaatgcagcacagagaacttagtaatgacattctgcaaagccaagagtatagaataaaagcttttctagtacccaaaataggaaatcatgcttcatcatcagacatctcaatagagtttgtgaactttagaaaattgaacgaagaagaacaggcgcaatatgagcaaggaatcgcctttataaaagaagtccaatctccatatattcacaagccatctgatattgttgagaaagttaaagaaacacatcaattctttaatatggccttacatactaaatgttggaaattttttgaagcacgcccaaatgaaatgaatggagaatttaaaggtaggtatgctggattcattaaaggctacaacaactacctttacaccaatgattggatagcattcctccaagaacagttggcagtagaagcaacattagcagatgttagagcagcttaa

SEQ ID NO: 246212 - DNA, 1158 bp, Klebsiella pneumoniae
atgagcaaaatatttaaatcgctgataacagtagcgggccgggaaaaaattgctgcggcaatcgtcagcgggaataaagttgttttctcgcaaatgtctgtcggtgatggcggcgggagtgcaacaacccccggcgacgagcagaccgccttagtgaatgagcaattccggacgcaactgaacagtctgaaattgtccgataccgaaaatatcatcattgctgagatgattattccgccggaggtgggcgggtttaccatccgtgaagccgcactgtttgatgatgccggagtatgcatggcggttgccaacgtaccggaaacctataagcccgcactggcggaaggttcgggacgctttaccattctgagaatctggctggcagtcagcagcaccgaagccgtggagctggttgttgatccgggcattgtactggcaaccgtggaggatgtgattaatgccggtagtaaaattaaagactacgcagacgagcagttaagcgaacatgcagagtcaagaaatcacccggatgccacactggaagaaaaaggcttcacccgactcagcaatgccattaacagcaaagaccaggacaaagccgccacgccactggctgtaaagctggctattgaatcagccatccgttcggcgtgggagctggacaaccctgtcggaacggtaaagttttacgcgcagaacatcgaccctaacgagcgttatccctggtcaaaatgggtttatacgggcgaggataaaacgattcgcgtcggtaaggttgacggttcggatgtcgggcagaccggcggaagcgataccgtcacgctccagaaagctaatctgcccgctgtgcagattgatgtcaccggcgaaaccagtgagctgccccagcagaagctgaccacgaaagccgctggcaggcacaagcacggaggcgtgccgagccgggaaaatccgtgggagattggcggcgatatcagccagcaatttaacccagcgaacctgggcgacacggatgaggtcgaagatcatgagcatgatattgatatcccgccacatgaccatgacgtcaccggcaaaaccgccaacctaggcgacggaaaatcgttcagcgtggtggaagctcacaccctgctaatgtgctggagccgcgtcgcctga

SEQ ID NO: 246213 - DNA, 192 bp, Klebsiella pneumoniae
atgagcgagcttgaaatccagaaagctaaacagcaaggcgcgatagaggcgcttatgaaggttcggattgtagccttagctatggggacgataactggaattaatgaccaagaggctggaaaagctctttgtgaaattatcaatggtgtggttgaccaggtattaatcggttatccggaggtaaaatcatga

SEQ ID NO: 246214 - DNA, 354 bp, Klebsiella pneumoniae
atgtcagatgcaaaatcaatcccgccggatgaagtacaaaactcacaaaatcaaactgtgctgttagacgctagtcagttcaactcgcttgtaaccatcatgcagctatctatgcaaaatatgattcgtacagcgatgttagacaccatgtcagtaaaagacttcgccgccgcccgtggcgttagcgagcgcctggtctggcaatggattgatgagggcgtccttctcaaagctcccaccaaagatgttaccagcaaagaaaaagccgctaagcgtggccgaactcttatcaacgtcaaagcctggcgcgacaaacttacccaacaagcgattgattgtcggtatatcaactga

SEQ ID NO: 246215 - DNA, 1272 bp, Klebsiella pneumoniae
atggcgctcactgacgctaaaatccgtgccgctaaaccggatgaaaaaccttataaacttgccgacagcggcaacatgttcttgctcgttcaccctaacggctctcgctactggcggctccgctatcggtttctgggcaaagagaaaacgctcgctctgggggtctatcctgaagtctcgttatcagaagcaagggaaaaacgcgatacggcgagaaagctgatagctgagggaactgacccatgcgaacagaaaaggatcaaaaagtcggtacccgaaacagctcagacatttgaaggcatcgcaagacagtggcataagagcaacaaaaaatggtcagcctcacacaatgagaggatactgaaaagcctcgaaactcatgttttcccctttattggttcacgtgacattaccaccctcaggactcccgatttacttgttcccgttaaagcagccgaagcaaaggagatatatgaaatcgcagcgcgccttcagcagcgtatcactgcaatcatgcgctatgctgcccagtcaggcattatcacctataaccctgccttggatatggctggcgcgttaaccacagtgaaacgccagcaccgccctgccctcgccttaaatcgcatttcagagcttcttgaacgactggatgcctacagaggacaacctctcacccggcaggcaactaaactcaccctgcttatcttcatccgttccagcgaactacgctttgccaggtggtctgagatcgacttcaagaaagccatgtggaccattcctcctgagcggaaacctattgaaggggtcaagtattcccatcgtggctcaaaaatgcgaacagagcatcttgtgccactatctactcaggcggtgaatatactgaagcagatccacactatcagcggagaacatgaactgattttcaccggcgatcacaatccatggaaacccatgagtgaaaacacgatcaataagtctttacgcgtaatggggtatgacacacaagctgaggtctgtggtcacggtttccgaacgatggcctgtagttcattgattgagtcaggattatggtcaagggatgctgtagagcggcaaatgagtcatatggaacgtaactctgtacgtgctgcttatatccataaagctgaacatcttgatgaacgcaggctgatgctgcaatggtgggctgattttcttgatgcaaacagagaaaaggccatctcaccttttgattatgccaaagtgaataatccctttagtaatcatcgttaa

SEQ ID NO: 246216 - DNA, 924 bp, Klebsiella pneumoniae; identical to SEQ ID NO: 122187

SEQ ID NO: 246217 - DNA, 1224 bp, Klebsiella pneumoniae; identical to SEQ ID NO: 149265

SEQ ID NO: 246218 - DNA, 1647 bp, Klebsiella pneumoniae
gtgacggaaaataatcatagcgtcgcggacgttgagaagataaaacgctggtcgccggtgtggattattcccatcgtgaccgcgctgatcggcgcctggatcctgttttaccacttcagccatcaggggccggtggtgacgctggttactacgacggcggaagggctggaagcgggtaaaaccaaaatcaaaagccgcagcgttgacgtcggggtggtggaaaccgtcacgctgagtgatgacatgagcaaggtaatggtgcaggcacgcctcaattccggtatggagaaattgttgcaccaggactccgccttttgggtggtgaagccgcagatcggccatgaaggcgtctccggcttgggtacgctgctctccggcgcctatatcgaactgcagccgggcagcaagggtaaagacggcaaagacaactatcagctgctcgacgcgccacctttggccccaccggatgccaaagggctgcgcatcgtactggacagcgagaaatcaggccagctcaatgccggcgatccagtgctgttccgcggctatcgtgttggctcggtggagaccagctacttcgatcctaaagcgcgcgccatgcgctatcagctgttcatcaccgcgccttacgaccaactggttaccaccaatgtgcgcttctggaaagacagcggcgtggcgttcgacatgtcggcgcagggcatgcgggtggagatgagctcgctgaccacgttgtttagtgacggtgtcagcttcgatgtgccggacggttggggccgcggtgagcaggcgaaagagaaggcggaataccagctgttcgacaaccagcgcagtacgcaggattcgctgtataccgagtataaggaatacctgctgttcttctccgattcggtacgaggcctgcagccgggcgcgccggtcgagttccgtggcatccgcctgggcacggtggcgcaggtgccattctataaagagggcatggcgcagcgtctggataacgattatcgcattccggtgctgatccgcatcgaaccagatcgactgcataaacagctgggcggcaaattcgatatcgaatggcacttgaaagacgccgagtcacgcggtctgcgtgcttcgatgaagtccgccaacttgctgcttggttcgttgtacattgatctcgacttctatccgcaggagaaaccgtggaaaggaccgcgtgaggatttcggttatccgctgatgccgaccaccagcggcggtctggcgcagatccagcagaaactgatgctggcgctggataagattaattcgatgccgatcaatccgatgatcaacgaagcgaccaagacgctggcggaaagccagaaaacgttgaagtcgacgcagcagaccatgaagtcgttgaacgacatcatcgccagcaaagagatgcaggcgctgccgcaggatatgcagaaaacgctgctggagctgaaccgcagcatgaaaggattccagcctggttcaccggcttacaacaagatggtaggcgacatgcagcgcctcgaccaggtgttgcgtgagctgcagccggtgctgcgcaccctgaatgagaagagcaacgcgctggtgtttgaagccgccggcagcactgaccctcagccgaagaaggccacgaaatga

SEQ ID NO: 246219 - DNA, 558 bp, Klebsiella pneumoniae; identical to SEQ ID NO: 149263

SEQ ID NO: 246220 - DNA, 225 bp, Klebsiella pneumoniae; identical to SEQ ID NO: 149262

SEQ ID NO: 246221 - DNA, 777 bp, Klebsiella pneumoniae; identical to SEQ ID NO: 149261

SEQ ID NO: 246222 - DNA, 234 bp, Klebsiella pneumoniae; identical to SEQ ID NO: 149387

SEQ ID NO: 246223 - DNA, 3054 bp, Klebsiella pneumoniae
atgaattcctctaaacctaagaaatttaacctgtcggcttgggctcttgctaatcagcaactagttgctttttttatgctagtggtcaccattgccggggtgatgagctactacaacttgccacgaaatgaggatccggcatttactattaaaacggctgttgtttccgcgagttggcctggagcctctgtggaggataccgtcaatttcgtaacagacccattggagaagaagcttcaggaagtcccctatctagattatttagaaagttatagccgacccggtgagtcggttattttcatatatctgcgcgataacactccgccggataaagttgaagaactgtggtatacggtcaggaaaaaagtaaaagatatttcccctcagcttcctgccggtgtcacttcacctgctgtcaacgatgaatttgctgatacctacggcactatttatggcttcacgcgtgaaggtttcaccgagcgtgaattgcgtgatatggttgatagagttcgcacagaagtcttaacactgccagatgtagggaaagttaacctgctgggcataaaagaagagcaagtcattttatcattctcaccgcagaaaattgcgggtatgggattgacgctcgataaaatcaagaacgccatcagcgcacaaaatgccgttactccggcgggagaaatcagaaccgataaagataaagtcatgctgagagtcagcggcgcttttgcatcagaagaaagcctcaaacagctgacattacatattcaggatagatacgttcctctgacggatattgcaaccatctctcgcgaggaagtcgatccgccgactccggcctttagagttaatggggagtcggcgatcggcttggccatctccatggcccctaccggcaatatgttggacttcggtaaagcgcttaacgaaaagatggatgatatttccagccgcttacccgcaggtatcaacgtaacaaaagtggccgatcagtcgactgtagtacatgacgccgtggggaactttatgaaagtgctccttgaagcggttgtcattgtgttggctgtttctttcctctcattaggaactcgtgccggattagtcgttgcagcctcaattccgctagtattggctatgacattcattggtatggaaattgccggcataggtatacagcgtatctccctaggtgcgttaattatcgcgctggggctgctggtcgatgacgccatgatcactgtagagatcatgatgtcgcggttagagaaaggagaacctgtcaaaaaggcggcgacagcagcctggacgacgacagcttttccgatgctaacaggtacactggtaatgatcgccggctttataccggtcggtttcgcaacgtcaagtgcgggagaatactgttattccctgtttatggtggtgttgatttcactcgtcaactcttggattgttgctgttcttttctcaccactgataggcgtgtggcttttacctaagatgatgaaggaacactcccacggtaaaggtaaaatcctgcaaaagtacgaaagcgcattgcgatacatccttaagcgcagagggttgactggtatcgtggcggttactttgcttgccatatcttttatcggaacttcatacatggaagaagagtttttccccacttctgacagacctgaattgctcgtcagtctgacgttgccgagaaatgccgtgcaggaagatacggcaaaagaagccatacgtttagaggagattcttaagaaagatcccgatattgagtatttcacgacgtatgttggctcgggcgctataaggttttatttgccaatggatctgttacttgataacgaaaatatcgctcaattagtggtggtgaccaaagggcttgaagaacgcgatgctgtaaagtctaggctcgaaaacattctacaaaaagattttggtcatcttgttactcgtgcttcggcgttagagctaggccccccggtgggctggccgttgaaatatcgcgtttctggcccagagcttactaagatccgtgagatatctactgagttagctggaaagttaggcgaaaacccgcagacgagagaagtcaatctcactgcgggtgagccacaacgagaactctatataaaggtcaatcagacggaagcaagggccttgggactaagctctcaagatgtcgccagtgcccttgctgaaatgtattctggttcggctgtgacgacgatcagagacaaaaatcgtcaggttaacgttttattgcgagcttcagaagattcgcgtcgagatattgaaaccgttgcggacttgcaattgactacagccgatgggcgtgttgtaccattgaaacagattgcaacgataagttatacgttggctgagcctatccagtggcggcggcaacgcgagcctttcatcacggtgcaaacagatattgcaccagggctgaatgcgtccggtgtatctaagggcttggagcctgttgtcgatgaattacgtaaaagtttgccaccgggataccacattaccgaaggcggaagtgtcgttgaagccatgaaaggtaacagttcggtattcgccgttttgccagtgaccctattggtgatgttgatcttgctgatggtacagttgcgtagtttttcacgcatgatgctagcgctgttgattgcccccttcggtttgattggtgtcgttgccgctatgttgcccactggaacgccgatggggtttgtcgctattcttggtgtgattgcattatcgggcatgattattcgcaacgccgttatccttattgaagaagtggaagtaaacagagcacaaggtgcagacaatactgaggcgataattgaggcagcattgcatcgttccagacctatactcttgacggcttgtgctgcaatattagggatgatccctattgcgtttcaggtattttgggggccaatggcctatgccattattggtgggttattagttgccactatatttacccttactgtattgccggctgcaatcagtgccgttctgcagtgggagacgtctcgataa

SEQ ID NO: 246224 - DNA, 1110 bp, Klebsiella pneumoniae
atgtcagtaggtttattcagaacaataaatacgctcaagagcgtgttcctatttcaatactggaaactgtttattattccagtgtttgtgctattgccagggtgtgatgataatgcaaagaaggaggaggtgcctatacgttccgtacgaacccttgtcgtcgataatccggttagcggagttttgataaagcataccggagaaattcgtccccatgaagaatctcaactctcgtttcgtattgacggtcggctcctcagccgtccagtcgatgtaggggcgaaattaaaagccgggcaaacgatcgcgactttagaacctaggaataacgagaatcaggtgcgtagtatgcaagctgagctggcaggtgctgtttctgcggagcgcctagcttctctaaatttcaaaaggttgcagtcattgcttaaaaccggcgctatcgcacaggctcaggttgatgaagcaaaggtcaatcttgaagtcgcagtgacaaagcgtgtttctgcccaatcgaatttgaaaattgctcaggaacaattgagttacacccgcttagttgcgccctcagatggcgtcgtgacttcggttagcctgaatccgggacaaactgtcagtgctgggcagggggtcgttacactctctcttgataagggagtagatgctgtatttgacgttccagaagctattttgtatagcgacctacccgataataaagtcaagattgcgctgctttccgatccttctgttgtgactgagggcatgatccgtgatgttaatccacaagctgataagcaaacacggacctggcgagtcagagtctcgctgccccaccctccggagaaaatggctttaggttctacggtacagggaagcattgtgattccaggtcaggaaacgtttgttctcccggcatctgcgttgacacgtgatggcgccgatcctgccgtttttatcgtacaatcggatacatcaacgctgacgttgcacaaagttaacattattcgctatagctctgaggacgtctttatttctgatggcatcaaaccaggtgacaaggtggtgatcgctggagtgagtaaattacggtctggtgagaaagtaagcttgtag

SEQ ID NO: 246225 - DNA, 1185 bp, Klebsiella pneumoniae
atgaacgcgaaaaataaaagagtctctctctggaagtggatctgcgtgagagttatttctcagtccattggtgcggttgtcattatagcgttctgcatgtggttgcggtttgctatttataattattggattttgtatcatgaaatgccggaggatgttagaaaggaattcctgcatttgcttgcaaatccaaatgaagatttgtacaggttttatagcctttttcactattggtatggctttgatttcgcggatccatcgatcgcctcggcggattggattatgctagggattttaattattgtagctattcctttaatgattacactggggctttatatgtcaaggccgttggcgaaacaatttttcaacttggtttctgcagcaaggaaagtcaccgatggggatttctctgttcaagcaaaaatagaaaataaagcaccggaagaacttcttgctctaacttacaatttcaatgagatgacccagaaacttacttattatgaaaatgagcttcgagcctctcatattgcaatggcgcatgaattacgctctccactgacggcttcaatcgcacggcttcagggaattatggatggcgtttttgagcctggtagggaacaattaagtttagtcatgcagccattggtgaaccttaatcgtcttattgatgatcttcaaatgttgtcgctatcccaagctggagcattgtcattagaaaaatacaatataaatatttgtgatttgattaatgagcgtttgcaatggctaaaggcagaagtttctcaagaatgttttacgattgaatttgaaagtaccacccccgtatttgtctatgcagatgcgttcagaattgggcaagttgtcacaattatcataaaaaatgcactgcgttacgctcattccggcaataaactgacaatcactattaatcattcaaatgataaagttatcgtcggttttcgcgattatggaccgggagtcagtgaagcgtttttgcctatgatgttcgaacgattctcaagagaggagggttctcggtcgagaaatctgggtgggagtggacttggtctttctatagctatggcaataagccaagagcatggtggcagtatcagtgctcagaatcatcctgatggcgggatgctatttttactaattcttccaatgaaaatagtgtcttga

SEQ ID NO: 246226 - DNA, 660 bp, Klebsiella pneumoniae
atgcgggctgcagaggtcctggaagcttatctaaaaagagagtgttttactgttgctaaagtgggtgatggtgttaaaggcctcgagatggttttttcctggcaacctgatttgatcttattggatgtcatgctgccagggataaacggccatgaaatactggctcgagtgcgtagaaagagcgatgtgccggtcatcatggtgactgcaatcggcgaaatacaagataagatttcctcgttgaggcatggggtagatgattatatagtgaagccgtataacccaggagaggttgtagctcgggttcatgcagtgctaagaagaacgagtatattgaatataagatctgagcttattatttgtggcccagtacaacttgatgaagaggcaatgttagttcacgtttgccctaccgaacatattaaaatcgcagtggaacttacgccaaccgaattttcaattttatctgtgttaatgcgagcgcccaaaagagctttttcccgacaaacattgttgaatatgtgcttgccagaaagtgatgcatttgaacgggttgttgatacacatatatacaatttaaggaagaagctcaattcggttggagtgaatgatgtactgttgacagttagagcaatgggatataggtattggaacaaatga

SEQ ID NO: 246227 - DNA, 675 bp, Klebsiella pneumoniae
atgaatgttccgttgcgctgcccggattacaccagtgtcagcaagcgcgcaaagtcggttaatgtcagtttcaaaacgcccacccggggtgaaatcgcacacctggtaattgattccaccgggctgaaggtcttcggtgaaggcgagtggaaagtcaaaaagcatggccaggaacgccgccgtatctggcgtaagctgcatctcgccgttgacagtaaaacacatgaaatcatctgcgctgacctgtcgctgaacaacgttacggactcagaggccttccccgggttaatccggcaaacccaccggaaaatcaggtcagccgccgccgatggcgcttacgatacccggctatgtcacgatgaactgcggcgtaagaaaatcagcgcgcttatccctccccgaaaaggtgcgggttactggcccggtgaatatgcagaccgtaaccgtgcagtggctaatcagcgaatgaccgggagtaatgcgcggtggaaatggacaacagattacaaccgtcgctcgatagcggaaacggcgatgtaccgggtaaaacagctgttcgggggttcactgacgctgcgtgactacgatggtcaggttgcggaggctatggccctggtacgagcgctgaacaaaatgacgaaagcaggtatgcctgaaagcgtgcgtattgcctga

SEQ ID NO: 246228 - DNA, 165 bp, Klebsiella pneumoniae; identical to SEQ ID NO: 231180

SEQ ID NO: 246229 - DNA, 315 bp, Klebsiella pneumoniae; identical to SEQ ID NO: 16841

SEQ ID NO: 246230 - DNA, 270 bp, Klebsiella pneumoniae
atgccatttactatagttaccagtgtgaagcgagtgacctcgtaccctgaatatggggcgagttgtgatccgatagttgagcaggaaagcgtcacattcaccgcatcaagggttacagggcttgatgcggccggcgccgctcaggtagtttttgatgtctcaatcgatgggacgactacatccggaagctactaccactccttcacgtactccgggacaggaagcccaatagaagaagccgaaaagtcgcttaaagaagcattgacctga

SEQ ID NO: 246231 - DNA, 444 bp, Klebsiella pneumoniae; identical to SEQ ID NO: 198473

SEQ ID NO: 246232 - DNA, 1554 bp, Klebsiella pneumoniae
ttgaaatttaaaatcattgattgcataaaacgtgggtttggtttttacaagtgggatgttattttaatttcttggatttcacttgttcacttttctcttgggtatggagttaaggtaatatatgtattatctgttttttttggattgaaactgttattttgttttagtagattcttttacagttcgataattttaatattatcattgatagggtttatatattcccctgtaggtattatctacggttaccctgatattaatgttgtaggttcttttttgtacactgatagcagtgaaagcaaagagtttttgattggtacgccgttttatatatatttaacttcttttttaatagtgttaattggttttttcttactgaaaatgccattttcaaaaaaaatatcctctagtagagttaaagtgtttttttttgttttctttgtcatttcctcaacatggtcagctatcaggcaaggtggaattttaaatggtgatattgcactgccggaaattaggtttgtaaaagatctttattccgcctataagaaggtggagggtgatagggtttcatattcattaataattaaatcaaagagtatttggagtccgaataaatcaagaggggagtataaaaattacattttggttataggtgaaagtgctcgccgtgattatgtccattcattcggcggtaagtacagtaacactccttggcttgatagtgccccagcaatgatttttgataattacatatctgccggtccttcaacaatgatctcattaactaataccttatccttacgtaagggtagtgttttagaactgaataataatgttgtcactctagcatcaaaagctggttttgaaacgtggtggttatccaatcaaggcagtaaggggcacttcgattcaccaatttcattgattgggcatagtgcagattatagtgagtttattaaatctggaagctcagatgataggcttatctcgccagatgaaaatttgttacccttacttgatgtagctttaaataaaaataaaaatgaaaataaattgattgttcttcatttgatgggatcacatccaaaagcctgcattagaactaataatacctatgatattgatgtgggcgcgaaggaagtatcatgttatataaagtccatagagatgacagatcaatttttatctaaagttatttctcttgcaaatcagactggtgaaagttggtctgttatgtatttttctgatcatggattgtcatacgttaataaagatacacaaggtgcttacttgacacatggtgacaagactaaagagaattatgaagtgccattctttattattaatagtaactcagaaataaaagaagttgtacatcagccacgtagtgcacttgattttatgacgacattttctcaatggttgaaaattagcgatcgtaacataccaagtgcttgtaatatgctttctaatgaaaactgcagtaatgaagattatgttattgattttaatgggaattacattaaatttaatgacttgccttcggttccatag

SEQ ID NO: 246233 - DNA, 894 bp, Klebsiella pneumoniae
atgacaaatagtccagatagtaaaatattgaaaaatcagttaaacacacaaaaaatccgagagcttatcgaaaaaaaagtcaacgatattaaggggtatactcctagagttgctgtttttggggttacaggggtagggaaatcatctctgtgcaatgccctttttggaaaagatctagcaaaggttagcgatgtagcagcatgcacaagaagtacgcaagaatttaatattagttctaatgactcagagcctggattaattctaatagatgttcccggtgttggcgagacgattgaaagagatgaagaatacttcaaactatatagtaaattaataccaagtctcgatcttgttatttgggttataaaggcagatgaccgtgcctatgctattgctgaaaaagcctataaagaaatattaaagccaaatttagatcaatgccctgtgatttttgttattaatcaggttgataaaatagaacctatcttagatgagagtacaggcatggggttttgggatgtagaaaaaaaccagccaaaaccagaaaaagaactaaatataaacaagaagataaatgagataagtaaggcttttggtgtttcaacacaatatattcaaacagcttccgcaaccagaaattacaacatcgtagaaacgatggagaaaataatagagatcctcccaaatggaaaaaagtattcactttacagggaggcaagccaaaatataaaaacagaaaaaatggaagaagcagccgaaaaaggtctttgggactcgataaaggattgggctggtgatgcctgggacacagtaaaagacattgctgttgaagttgcaaaatcaactataaaaaatttcggaaagaaagttttgaaatggctttcgcgattataa

SEQ ID NO: 246234 - DNA, 1728 bp, Klebsiella pneumoniae
atggttggttttttacaaaaagcaactttctttcaacgagtcagtcagcaaatagatatggaggatactgacaccttaaatttaacttttgagtatgggaagcttaaggataataaaaatactacatatgataccattgttatgcctcccattccgaagctttctgatgagcaaataaatatattatcattatctttgactgcttctggtgatagctatttatcagtacttattgataagctcggaaatgctgattggataagaactggtttagtatatattgaagatgaacattgccctttctgtcaagaaaaaacaataaatgaacactttaaatctgaagtaaagaaagtatttgatgattcgtatgataaaactattcatgaaataactaaaatatataccacatataaagaagcaacacacaattatgtcgatgcgataaaagcatctgtgtcatcaaatagttatatcaccgataaaaatgaaatttttaacattgttgatgattgtaatgtcatttttcagtccaatctaaaatctatacaagaaaagttagataagccttctcaatgtatagactttgttattgaaaatccaagtttatatatccttattcaaaagatagaaaattataactctgaaatacatgagattaatttaaaggttaataattatgatgtcagtgtcaatgaacttaaaacaaagttatggcgtgcaataagatttatttgtaatgaccttatagaaacttatagcaaacaacttttagacctaaatgctgaaagggaaaatattctttcaaaaaacagggggggtttagacgatatagagaaattaagctctgaggtcattagtttgagccagaaggtatcaaatatagacgagacaatacgtaaaataaatagaacacttaaatcgcttggtattgttcattttaagctaaagaaaaaagaggaaagtgattttttccagatttgcagagataatggtattgaaaataatatttataaaacacttagtgaaggtgaaaaaaccttaattacattcctttattttcttgagttgtgtgatggtcggttgggttctgagacaaacagctctaaagaaaagttaattgttatagatgatcctatatcaagtctatcgcatgactatatttatgagatatcatccctgatccatcatcgactaattaaaaaaaatgagaacactaaaattgttatcctcacgcacaatttgtttttcttccaagaattaataaaagttgctccgactaagaaagatgtatttgataagaaataccaactttatcgtgttattaaagatcagtatagtgatatattaactataaacagagatgagataaagaatgaatatgaagctctgtggatggttttaaaagatgttaaacaaggaaagcttaatcctatagtattgccaaatattatgaggaatattcttgaatattatttctcattctcttgtaaaatggaaaagttgagtgaggaacttgataatcttgttagctctgaaactgacataaattataaaactttttatcgttatataaatagaggttcacattcagattcaattaatataagtaatttaggtcagatttcagctaataaatatttggaaatgttcgagggtatatttaaaaagactaatgatgaaaagcatttcaataaaatgttaggattagaaattgaggaggttgtttag

SEQ ID NO: 246235 - DNA, 276 bp, Klebsiella pneumoniae
atgagtaagcttaatataagggctgtaagaagttatcgtagtgataaatcagtcatattagatctttcgaagagaataaatttagtctatggccagaatggctctggtaaatcaacgatatctggttatttttataagtcagatgatgaagcttataaaaattgctcttttgaatgtaatgatgaatataagtttattgtctacaatagtcagtttgtggaggattcattttataataaatctgaacagccaggtatttttaccttgagtcggtaa

SEQ ID NO: 246236 - DNA, 600 bp, Klebsiella pneumoniae
ttgagccttcttctggttggctttttcgtccttgagccgttgggtatcccggtcagcgcgattgctgctgtaggggctgtcattctgtttacggtggcgaagcgaggccatgccattaacactggcaaagtgcttcgcggtgcgccatggcagatcgtcatattctctttgggaatgtatctggtggtctatggtctgcgtaatgccggactaacagaatacctctccggtgtactgaacgtgctggcagataaaggactttgggcagcgacgtttggtaccggcttcctgacggctttcctgtcttccataatgaacaatatgcctaccgtgctggttggtgctctctctattgatggcagcactgcaacaggcgttatcaaagaggcgatgatttatgccaacgtgattggctgcgatctgggaccgaaaattacacctattggtagcctggcaacgctgctctggctgcatgtcctttcacagaagaacatgaccatcacctggggatactatttccgcaccgggatcgtcatgactctgcctgtgctgtttgtaacgctggccgcgctggcgctacgtctctctatcactttgtaa

SEQ ID NO: 246237 - DNA, 831 bp, Klebsiella pneumoniae; identical to SEQ ID NO: 236858

SEQ ID NO: 246238 - DNA, 531 bp, Klebsiella pneumoniae
atgctgaccgatgagctgaaaagcggccatatcgaacgcgtggcccgccgggagctggcgcaggaatgtgacaatctgaccgaagtgctggtctttgaacgtgaccagctgaaagtcgcctgcaacagtaccgcgcgggcattccgccaggcgcatcatgccgtactgtctgaatatgcgaaggaagagctcgaccgcgcgctgaacgacaccctcgggccactggtccgggcgatggtgctgaaagcggatgtgatggcaaacccgctcgccaacaccaccggccatcagggctacaccgagccggagaaagaggtcatgcatcaggtggtgaccttcctgaccaggaaagtgagcgccttctccgtcacaccagccgatgagccggtgctctccctgaccggcttcccggccgtcgcgcttgcgcacatggaccacgacgccgccagcacgcccggcgagcgtaaagtctggcgggagaaaatccgtcagcgcgaggctgacctgaaagcgcgggggctgctgccatga

SEQ ID NO: 246239 - DNA, 150 bp, Klebsiella pneumoniae; identical to SEQ ID NO: 193627

SEQ ID NO: 246240 - DNA, 1095 bp, Klebsiella pneumoniae; identical to SEQ ID NO: 193628

SEQ ID NO: 246241 - DNA, 2220 bp, Klebsiella pneumoniae; identical to SEQ ID NO: 193629

SEQ ID NO: 246242 - DNA, 573 bp, Klebsiella pneumoniae; identical to SEQ ID NO: 193630

SEQ ID NO: 246243 - DNA, 1140 bp, Klebsiella pneumoniae; identical to SEQ ID NO: 193631

SEQ ID NO: 246244 - DNA, 1305 bp, Klebsiella pneumoniae; identical to SEQ ID NO: 193632

SEQ ID NO: 246245 - DNA, 1536 bp, Klebsiella pneumoniae
atgggtgatgaaagtcagaaaaatcataaaattagagtcgctcagtatctgaggatgtccacagaccatcaacaattctcaatcgacaatcaggctctttatctaaaaaaatatgcagaagatcacaatatggtgattgtagaaacttatgatgatgaaggtaaaagcggagtctccgcttcaggtagaaaaaacttcaacagactaatagaagatgtcgttacaggaagagtaaaaatagaagctgttcttgtttatgatgtcagtcggtttggtcgatggcaagataatgatgaggcagggcattatagttatctactaaaatatcatggggttaggattatttattgtgctgagaacttaccagatgaatcgcctgaaatccaaatgcttacacttcctgctcttagatatgctgctggtgctttcagtaggaatctttcagtaaaagtttttgcgggacacgtaaaccttgttaaaaggggatactatcagggaggaataccaggatatggattaagaagaaagttaattgataataacaatagaccaaaaatgatactttgtcctggtgaaagaaagagtttgcaaactgaccgagtagttcttacccctggtacaaaaaaagaaataaagctggtaaaaaagatatttaatatgtttatttttgatggattaaatgaatatcttatcgcaacaaaactaaacagagaggggtatacatatagtgataaaacagaatggaacaggagcagaatacattcaattctaattaatattcgctacacagggaaatacacttataatcgtacttcacagaaattgaacgctcaaagaattcagaatccacaagaagaatggatcgaatatgattcatttttcaagcctataatttcaccagagaaatttagattagctaaagaaatcattgacaatcgttcaaaaaaaatgaccaatgaagaaatacttaattttttgaaaaaagttctcattaaacatggtaaaatttcaggttttattatcgacgaagatgataatggtccgtcgagtagtgttgtagcaagtcgttttggtgggcttttgaatgcctataaactcatcaattacacaccagaaagagattatcgatttatagaaataaactcagccttaagggttagacatgccgacactattaatacaatatgcaaggaaattacaaatagtgaagtaacaatatctgaaaataaactcattacgatcaataaaagcttaacctttaccataatacttgcacgctgtagaaaaacctctacagataaatgcagatggattgtgagattagacagaagcattaattctgacatcaacataattgtaaggatgaatagccttaatagcgttccccttgattactatatcctcccttctattgattcatttgaaaatgaattaaacctaaaagaaaataacagccttctctttgagatgtatcgattcgacgatatcaacatattttttaaaatgctttcgaccaataaaaaggaagtagcttaa

SEQ ID NO: 246246 - DNA, 1857 bp, Klebsiella pneumoniae; identical to SEQ ID NO: 193643

SEQ ID NO: 246247 - DNA, 2559 bp, Klebsiella pneumoniae; identical to SEQ ID NO: 112176

SEQ ID NO: 246248 - DNA, 933 bp, Klebsiella pneumoniae
atgtccgaatggtgtcataaccgcctggaaatcaccggtaaatcagtctgcatcgatgtcatgctgcagtggataaacggcactgacgtaccgcgtcaccgccacgcagtgcagcagagcatacagctgtttctggctggcgcggcggggatactcaagccggtgcggaccacgtcgtatccgccctgtcaggggctggtccgtgcaggcaccgggctttccactgcggccaatcaggcgtttgaaagctggctggcgctcctgctgaaggatgccatcctcgatgcggaaaccatcagagccgtggaccggctttatcaccagtcaggtctgggcgcgctgaaatgggagaatattcccgacccggcacgtgaggttatggcggagctgattgccagacagtataccgactggtttggtctggtcagcgccggcgatgagtctcatgctgcaactgcctgggagcggctcagccagtatcctgaacgctcccagccctgcgatatgctggccgtcatacctacgcggctggcagcagagctgaacggctccggggggctgatgtccggtgtgtcgaccacaaccagcctctactgccggcagtacggcatggagtggccggccgggcacaacgtcaactggcagcgccatacgcctaacagtcttacgctgcagatggatatgccctggctcccgccgtcaggtgaggttgtcggggaaatctcagcggtgtttgactgcgaggtgcgtcacagctacagcgagcccgtgagcgggctcagcggttacgactgctatgacggcggtgagcatgttgacggacacaaaggcgcgtccggcgcgcctcaacccggacaggtgctttatctcgtcagcgatgagcccgcttcaccggctcaggaacctgcatcatatcgtgaggtccgggggtaa

SEQ ID NO: 246249 - DNA, 366 bp, Klebsiella pneumoniae
atgcacacagacgtttatacgcttaaaactccactggacacgctcagctggctttgcctgcttgagagtgaactcctgagcatcagggcatttcagcgtctcgatcttcatacggaccgggatgaaacgaatgaactgacgtttctggaagattccatcattgggaccggcacagcttatggctggtttgtctttttactcggggaaggcgatattccgcctttgcctgatacgtctaaaaatctgctcttcacgctggacgagctgggaaaagaaattaaccggcccttctgggagaaggccgtggatgaaggtatccaggatgcccggtgtgatcgggctatagcggctctcgaacggatgtaa

SEQ ID NO: 246250 - DNA, 150 bp, Klebsiella pneumoniae
atgctgtgcctgacggcaggcatggcggtatgcgtttcgacgacctgttattccctcaggaaaggaaaccggcaggcggtgaaaaacatactcggcgcggtggcagcctgtacgaacggtaagaaagacgttaacgccctggtcttgtaa

SEQ ID NO: 246251 - DNA, 918 bp, Klebsiella pneumoniae
atgttgcattacgatatgatccgcagcgagataatgtacctaaaagcgctggatagttttttcaatacagatcactcgttactgtgcagtacttatgatacgccggatgattttcgatgtttgatctctcagatacttgaacgacattttcttggcgatcaggacagaatcaaagctgcgcggaaaacacttaaagaatgggccgacctgcaactgattgataaagattattttgattgtttcaaaggttcaccaagagcatcgtggtttgctcaccattatattttcgaatacccagtaaaatctgcagggttgacacttggtggattggggaatgacgtcggttgttcaggtggttttaattctcttttaatgaacgataatatcctcacagagcttgatttctctaaatttaatttcgacctggacgatattgattgggacttgataacaaatccacaggctactgcttcgaaaaaaccgaaacgtgttttctcccgattttatctgaacgcgggagcaagtaccgatctgtacaaccccactccggtaactgagcgtgaactcatcaatggtgtgatgaggtacattgatgaagctacatgctcacttggagataagatctcttatttcagaaaactgcatgagcgttggcttgagcaatatgatttttttctgacagattttgactggatgtcacgagatgatgaaactcagttagtatatctctgggactatctcaaaggaaaaggacgaatagcgggctatcttcgcccttataatacgtctatgcgttatgacatgattattgcggctatagatgtgtggaacgtccaacctgaagagaagttggagtttattgagaagatgaaacatgcctggcaagcatcaaaatcttatcgacgatctgctaaatag

SEQ ID NO: 246252 - DNA, 303 bp, Klebsiella pneumoniae; identical to SEQ ID NO: 82781

SEQ ID NO: 246253 - DNA, 207 bp, Klebsiella pneumoniae
atgtctgtcatctcttctgcgattttccctgaacatatccttactcagcttcagcagtctgctgacgcagctgtccggaaattgaaatctttcatttatctgcatcgcaacagcaactggtatgtcaacggctcgggcaattatgccgtccgtgctcatatctcttctgtcaaagaccaggtaagcgtacagcgagaaccgtattga

SEQ ID NO: 246254 - DNA, 126 bp, Klebsiella pneumoniae
atgcctagaaagcggcgggctacccggttatcgttgatcgccgtcagccactaccactcatgcgacaagtacagattgccgcaggggcgctggccctcggcggaagtctgggcggactattcctga

SEQ ID NO: 246255 - DNA, 837 bp, Klebsiella pneumoniae; identical to SEQ ID NO: 227093

SEQ ID NO: 246256 - DNA, 396 bp, Klebsiella pneumoniae
atgtctaacactaacgccaattttcagatgaccgggatcctgttagggcaagaagtccgtaaacgtaaaactcctcaggagaagatcgccattatccagcagacgatggagccgggtatgaatgtctcccatgtcgcccgcctgcatggtatccagcccggcctgctgtttaagtggaagaagcaatatcaggaaggcagcctcaccgccgttgcggctggagaggacgtccttcctgcttctgagcttactgctgctctgaagcaggtccgggagctccagcgcctgctgggcaagaagacgatggaagttgagatcctgaaagaagccgtggagtacggtcagtcgcgaaaatggatagcgcacgcgcccttgttgccaaaggacggggaatag

SEQ ID NO: 246257 - DNA, 1215 bp, Klebsiella pneumoniae
atgaagctcaatgccagacaggtcgagactgccaagcctaaagataaaccctataagttagcagatggtgggggcatgtatctggaggtgttccctaacggcaccaaaagctggcgcatgaaataccgtatcgcaggtaaagaaaaacgtgtggtgtttggtgtttacccgaccattaccttagctgatgccagaagcaaaagagatgatgctaaaaagctgctggttaatggcgttgatccgagtgcgtttaagaaagaaagcaaactagcccaaatcgaagaagtaaaaaacacctttcagcaaattgcgctcgaatggcacaacatgaaagtgaagaaatggtctgcgggatatgcctctgacattcttgaagccttcaacaaagatgtcttcccgttcatcggtcaacgtcctgttgcagacatcaagccgttggaattgcttaacgtgcttaaaaagatggaagagcgaggtgcgactgagaaagctaagaaagtacgtcagcggtgtggtgaagtgtttcgctacgccatagttacaggcagagccgagtataaccccgcaccagatctcaccagtgctatgcaggggcatgagtctaaacattatccattcctgaccattgaggagcttccagccttttttaaagcccttgctggctactctggtagtgagttggtagtgttagccgcccgactaatgatcatcactggtgttcgaacgggtgaattacgtggtgcgttatggtctgaaatttatactgataaagggttatgggaaatttctgccgaacgcatgaaaatgcggcgtcctcatattgttccgttatccgtgcaggcattggaaattattgaaaaaatcagggcaatgactggtaattttcatctaatgttccccggtcgtaatgatccaagtaaaacaatgagcgaagccagtatcaatcaggtgtttaagcgaattggctataccggccgcgttacggggcatggattccgtcataccatgagcaccgttcttcatgaacaaggctacaacaccgcatggattgaaacccagcttgcgcatcttgataagaatgctatccgtggtacctataaccatgcgcaatatcttgatggcagacgtgagatgctgcaatggtatgctgactatatggatagccttgagaatggtggcaatgtgatgcatgggacgtttaatcgacgtgcatag

SEQ ID NO: 246258 - DNA, 207 bp, Klebsiella pneumoniae; identical to SEQ ID NO: 134348

SEQ ID NO: 246259 - DNA, 321 bp, Klebsiella pneumoniae; identical to SEQ ID NO: 161841

SEQ ID NO: 246260 - DNA, 267 bp, Klebsiella pneumoniae
atgattaaatattgctttagtgaaaaaacaatcactttcaaattatctgatcttgttcatactaaaaagctgcctactaacttcaaaaatagtaaaaaatattcccagatcaaaagcaccatatcagcgttgggacttgttgaaccgatattaatttacatcgatcaaagtgataaaactgcaaaaataatcgatggacaccttagagtcgaagcactaaaagatattggggaagataaagcaaactgcctaatttcaactacttga

SEQ ID NO: 246261 - DNA, 210 bp, Klebsiella pneumoniae
atgactacagatgaattaaaaaaaatctatcaagataacatttctcagcacagaaagattaaaaacaaagcagaatacgttgagatgaatttgttgatagcaaatcaaatctttaaagaacttgtcaatgatgaagagtttttacggatattagatgaagaaagcctaaatgaagtagtaaatattatagttaaaaacacgaccaattga

SEQ ID NO: 246262 - DNA, 1380 bp, Klebsiella pneumoniae
atgcgtgatctgatccttcaactcagcaaaagttcgatttattcaacaaagccgccgggagttacagtccctaatgcgatagccggttttattgaagacagtaaggccaatctcacactccgcaatttctatattaatacagataatcgcagtggggacgggttcagtaaacaggaagaatggggacaggggttcatcctcaattacgattcaggttatactgaagggccagtgggattcggactgagcactctggggctactgggcatcagacttgacggaggaggtaaagcaggctcaccggcgtcaggtcggcaacccggtacagtatttccgctagacaatgatggcagagcggttcatcagttcggtagcctgggggttaccggcagggcaaaaatatctgatacggaactccgttatggaacgcttcagcccaaaaatcccgtcgttatatacaacgatgcccgccttttgcccatgacatatcagggaggacaaatatcatcaacagatatcgacgatctgagtctgaccggcggcgttctcacacatacaaaaggacgtaactccacagatatgcgcggaatgtccattgccggagccaatggaagtggtcccacttcacggagcagtaatcgtttttatttcgccggtggtgactatactcttatgaaagacatgactctctcatactattacggtgagctggataatttttacagacaaaactatatcggactggcacataacctgaaaatcgtttccgggaacctgaaatcagatattcgtatattcatcagcgatgcagacggaaagaacggaagtgctgcaggacggagtgccggatatgtaagtactggttattacggaaataatcgcacaaagggagaagtggacaacaatgtttatagcggtcagttgacatggtcttctggaggtcacagtgtgagcagtggttatcagtggctgacggggaaaagtgactttccatatctgaatcgtggtgatggagaaggaacaagcacctggttaattactgatgcacaattgctaaaattcagcagggcgggggagcgaacctggctggcacggtacgcctataattttgctgatgcagggctcaaagggctgaatctaagtatcctctatctgaacgccgataatattgataccgggaatgggcgaaagggggaatgggaacgggatattgccctgagttatactatccccgagggaatacttaacggacttggcatctccgtaaaaaatgccacaatgcgcagcgctctgcctgacacaagtagaaaaggctctgctggacagcgtgaccaggatgaaacccgggttacagtcagttatacccttcctcttctctga

SEQ ID NO: 246263 - DNA, 231 bp, Klebsiella pneumoniae
gtgaccgctgcggccgatcaggggctggtcgacattcacgaccgccggccactggttttgtcaacggaggcagcacgtgaatggatgcgccaggatataggcgggaaggaagctgaagagatagcagtcgacggggctatacccgccgacaagtttatatggcacgccgtaacgcgcgctgtgggtaatgtgaagaatcagggagcagagctaatcgaccctgtcacctga

SEQ ID NO: 246264 - DNA, 189 bp, Klebsiella pneumoniae
atggcagtttctctcgtaaaaggcggtaatgtttctctgaccaaagaagccccttccatgaatgtggcactggttggtctgggctgggatgcgcgtgttaccgatggtcaggcatttgacctcgatgcctcggtcttcctggtcggcgaagatggaaaagtgctgtccgacgcgcacttcgttttttag

SEQ ID NO: 246265 - DNA, 579 bp, Klebsiella pneumoniae
atgagtgtttcactatctaaaggcggcaacgtctcactgagcaaagcagccccgacaatgaaaaatgttctcgtcggtcttggctgggatgcccgctctaccgatggtcaggactttgacctcgatgcttcggcgttcctgctggccgcaaatggcaaggttcgtggcgatgccgattttattttctacaacaacctgaaatcttccgacggttctgtcacccacaccggtgacaaccgtaccggtgaaggcgatggcgatgatgaatccctgaaaatcaaactggatatgatccctgctgatgtggacaaaatcattttcgtcgtgaccattcacgatgctcaggcccgccgccagagcttcggtcaggtatctggtgcattcattcgtctggtcaatgacgacaatcagacagaagtcgcccgctatgatctgactgaagatgcctccaccgaaaccgcgatgctgttcggtgaactgtatcgccacaatacggaatggaaattccgtgcagtcggccagggttatgccggtggtctgggttccgtttgtgcgcagtacggcatcaacgcatcctga

SEQ ID NO: 246266 - DNA, 1041 bp, Klebsiella pneumoniae
atggtttccacacacatcggttttccgactgaaacagtgattgtttttattgcgctgtcggtcggtgccatctttattgacctgttcatgcatcgccatgacaagccaatttccctaaagagcgcggccttatggtccgttttctgggttatcgttgcgatggcatttgccggtttcctctatatccatcacggtgcagaagttgccagcctttttgtcacgggttatgcgcttgagaaggtcctgtccgttgataacctcttcgtcatgatggctatcttctcgtggttctcagtgccagaccgttatcgccaccgtgtactgtactgggggatcgttggggccatcgtcttcaggggtatcttcgttgccattggtaccggtctgctcagccttggcccttatgtcgaactggtctttgccgtggtggttgcctggactgctgtcatgatgctgaaaagcggagacgatggcgatgaaattgaagactactcccagcacctcgcctatcggctggtcaaacggttcttccccatctggccgaaactgtccggacatgcgttcctgttaacccagaaagaagttgatgccgagctggcgaaacccgaaaacaacgatgtgaccattggccgggcaaaaaaagccgccctgtatgcgaccccgctcatgctgtgtgtcgcggtcgttgaactctctgacgtcatgtttgccttcgactccgtaccggcaatcattgcggtcagccgtgagcctctgattgtctatagcgcaatgatgtttgctatccttggtctccgtaccctctattttgtactggaagccctgaagcagtatctgtctcagctggaaaaggccgttatcgttctgctgttctttatcgcctttaagctgggtctcaatgcctcagaccatatctggcaccatggctacagtctgtctgcaaccaccagtctgtatgtcgtactgggcgtactggcgctcggtattcttgccagcgttatcttccctgaaaaaccggaagcggaaaataaagaaagctga

SEQ ID NO: 246267 - DNA, 456 bp, Klebsiella pneumoniae
atgagttttttcaacaaagttaaaggggcactgacctcaggccgtgatgagctgacccgccaggttggccgttacaaaaacaagaaatttatgcagggtaccgtcgctgtatgcgcccgtatcgctgttgccagtgacggcgtcagcgccgaagaaaagcagaaaatgattggctttctgcgggcatcagaagagctgaaagttttcgagacgaccgaggttatcgaattcttcaacaaactggtgaccagtttcgactttgatctggaaattggtaaaggcgagacgatgaagtacatcctcgcactgaaagaccagccagaagcggctcagctggcagtccgtgtcggtattgctgttgcaaaaagcgacggtaattttgacgaggatgagaaaaacgccgtccgtgaaattgcccgttcactgggcttcgacccaactgaattcggcctctga

SEQ ID NO: 246268 - DNA, 585 bp, Klebsiella pneumoniae
atggtttctttaagtaaaaaccagacggtatcactcagcaaacaatcatccgcaatcagccagcttaagttcggtctgggttgggacccggtaaagaaaaagggtttatttggcaacatttttggcggcaatgacgctatcgatctggacgcgggttgcgttctgttggacagtgccggtaataaaattgacacgatctggtttcgtaaactgaaatcgacctgcggctccgtggtccataccggcgataacctgacgggggagggcgagggtgacgatgaggtcatcaatgtctatctcagccaactgcctgcaaaggttgaatatctggctttcaccgtcaacagtttccgtgggcagtcttttaatgatgtggataacgctttctgtcgggttgtggatcagaccaacaaagaactggcccgatacaaactgaccgagcagggggcgcatactggcattatcattgcctcactccgccgtaataacggcaactgggactttaccgcccaggggaaagccagcagtggacgcacgatcgatgatatgtaccctgacatcattaacacagtggtcagcgcatga

SEQ ID NO: 246269 - DNA, 1059 bp, Klebsiella pneumoniae
atgaaaaataaaatttggtttatggaaggtttgtcctcccagcgagatattattctcggtgtgaaatcttttgcagataaacacgataaagatattctggttttatcttctcaccgcaatgaacggaatgagatcctgtctgtttccgattccgcattaatcgaaccccaaaatgaagacgaccgtctttcttttattcattctgtcacaacgaattatgggattaatgccattcataccgggcgaaactgtaaatggttcgagacccatcgggaggaaattgaacatcccgccctcacgctgacgaccggcgggaccgggaccgaatggttcgaccttgccgacgaaaaagttactttctcggagtacatggcaaaaaatggactcccggttgtgccgtctgtgcgggtcaactctcccgatgaactgggtcatttgctcagccactccccgtatccttctgatcgtctctgtattaagcccgtaaccggtatttatggcatgggattctggcgttttgatgacaatgtttcccctgttgcatttctgaataatcccgacagccgtgttatccgcccgtcacagtatctgtctgcacatgccgaaatggagacctttacacctcaggtgctgatgccttatttatccgggccagaatattccgtggatatggtggtcagtcaagggacggtcctggccgctatcgggcggcgtaaggaaggcgtgcttcagtatctggagaatgaaggggaagcgattgaacttgccatcgactgcgcccgcttaatgaacgcagacggcctggttaatgttcagacccgccataatgccgaaggcaaaccactgttgctggaaattaacatgcgaccatcaggtggtatcggttatacgcagcacagtggcgtgaatctgccgggtctgtatgccttccatacactggggttgatggatgaggatcagatcaggcagtcagcgaaaactgatttttcgcctgcagtcgtccgctctgtcaccgacgtcattcgctacccggcattattgaccaacagaatagattaa

SEQ ID NO: 246270 - DNA, 1143 bp, Klebsiella pneumoniae; identical to SEQ ID NO: 187028

SEQ ID NO: 246271 - DNA, 774 bp, Klebsiella pneumoniae; identical to SEQ ID NO: 187029

SEQ ID NO: 246272 - DNA, 1080 bp, Klebsiella pneumoniae
atgtctcacatcacttcgttttctggttcgtatcaaccggacgatgttcagtttttgctgaaacccattgctatggagatgacgccggttgacctgaaggaagaactgattcagtcagggaaaatgcattactccgacatgctgagtcaggagcctgagccaacccgctggcatctggatcttttcacccgtgcgctggacgcgggggcagcacggctggcgcgggaggtctctcagcttagccgtgaactggccttacgcgccggtgatgaccccgtggttctggtcagtctggtcagagccggtgtccctcttggtgtgatgctccatcaggcgctacgggcaatgggaaaacggtcttaccattacggtatcagcattatccgcgatcggggtattgacgctgcggcgcttgactacatcgaatcacgtcatggcacaaagggcattgtgtttgtcgacggctggacgggaaaaggagccattaccggcgaattgtcacgcacgctgaaggaccgccccggctacccggtacaacctcgtctggttgtgctggcagatccctgcggatgtgcctggcttgccgccagtgacgatgactggttgatcccattcggtatcatgggtgctcctgtatcaggtctgatttcgcgctctgtctggactgaagaaggcctgcatggctgcgtggtctgcgatcaccttcagtcttttgaatgtagccagatgctagtgaatacggtagcgcatttccgcgaacaacttgacggtcgagaccttcccgcttcaggttgggacgccgggcacaatgccgcacgctggcagctgagccgggacgtcatcggagggttggccgaacgttatgaggtggacagcattaaccggattaaaccgggcattgctgaagcgacacgggcagttctgcgccgtgtgcccgatcatgtgtttgtccggcagatggatgacccggatgtcgctcttctggtcggtctggcaaaagagaaaggtatcgcggtgacggaagccggggacgctctcggccagtatcgtgcagttaccatcatcaaaaaggtacgctga

SEQ ID NO: 246273 - DNA, 957 bp, Klebsiella pneumoniae
atgaaaaaacaattcactccctgggatctcggtgcaacgctgtatatgccagcaacccgtatggatcttgccgaagttgtgctggaagggaaaatacccggtctgcggtctctggtggtctgtctggaagatgcggtcagtgagcatgatgttccctttgctcttcagaatctctcactgtttttgcaaaggctgaatgacgcgaaattccaacatggagacgacgagtggccgctggtttttattcgcccccgtcatccggacatggggcgatggctgactgaaaacatggagctgagtgcagttgatgggtttgtgctaccgaaattcacccgttccacgttgccggtatggtgggacatcatggccggtacccggttgagcatgatgccgacgcttgaaacagaagaggtctatgacgttctgaaaatgcaggcgctggcttctgaactgtcggaccatgactgccgggaacgtattattgcgctgcgcatcggggggaacgacctgatgaacgtggtctctctgcgacggccacgggatctgactctctacgacacgccaatgggctatgtcattaaaatgctggtttcggtttttgcaccccgtgattttgcgctgactgctccggtatgcgaacacattgatgaccatggcgtcatggagcgcgagctggcgatggatatcgctcacgggctggtgggaaaaaccgcgatccatccggagcagatcagtgtgattgagggggcactgaaggtctcgcctggcgagcattcagatgcgctgcgtattctgaactccacacaggcagtctttaaatctcagggggcgatgtgcgaaccggcgacccaccggcggtgggctcaggggatcctggcccggggccaggtttacggactgacgacaggacagaaaacggacgggatgaggctgatcccgttctctcagcagcaataa

SEQ ID NO: 246274 - DNA, 1191 bp, Klebsiella pneumoniae; identical to SEQ ID NO: 151030

SEQ ID NO: 246275 - DNA, 1023 bp, Klebsiella pneumoniae; identical to SEQ ID NO: 151031

SEQ ID NO: 246276 - DNA, 234 bp, Klebsiella pneumoniae
atgatgtcatttgatacacatgctgctatggatatgatcacccactcaacgggggggtttagttatgatactcttgccagggctttgatttctaataaaaaggccaaagcaggtggatgtttgttaaaagattgtcaagaattttgcgaatatttagaatcccagggagttatcaaacgtaatgccccgtgtgatagggatgaagatgtttattatgagtattctccacattaa

SEQ ID NO: 246277 - DNA, 351 bp, Klebsiella pneumoniae
atgctgaccgggcagatcaaacagttctggcttaagtctggctgcatctatggttatcgcaagacacatctcgatttgcgtgataccggacagcagtgcgtagtgaaccgggtttggcggctgatgaagcgtgccggaataaaagctcaggttgggtaccgtagcccacgtgcacgtaaaggtgaagccagcatcgtgacatccaacaggctccagcggcagtacaatccggactcaccggatgagcgttgggtgacggacataaccgacatccgaacccacgaaggctggctgtatctggccgtggtggttgacctgttctcccgaaaagttatcgactggtcaatgtaa

SEQ ID NO: 246278 - DNA, 240 bp, Klebsiella pneumoniae
atgccctccagcacgaccctgcaacacgcgatcgaaaacatcaccatctggcgcaaaggcgaacagcgtgcgccgcataagccactgttgctgctgtacgtcctctcacagtaccagcgcggccatgcgcggatgttcgactacgcctcggagatacgcgatgagctgcatagcctgctggaacgctttggcgcccgcagcgccgccagtaccggccggatatgcccttctggcgcctga

SEQ ID NO: 246279 - DNA, 1347 bp, Klebsiella pneumoniae; identical to SEQ ID NO: 185128

SEQ ID NO: 246280 - DNA, 627 bp, Klebsiella pneumoniae
atgaccaccagcagcgaccacgcttacccgccagcgttgaggatggtcactggtatcgcccctgtttacccgccagcgttgacggtgaccaccgacagcggccacgcttacccgccagcgttgaggatgactaccggcagcggtcccgtttacccgccagcgttgaggatgagcaccggcagcggtcccgtttacccgccagcgttgaggatgagcaccggcagcggatctgtttacccgccagcgttgaggatgagcaccggcagcggccccgcttacccgccagcgttgaggatagccaccgtcagcggccccgtttacccgccagcgttgaggatgagcaccggcagcggccccctttacccgccagcgttgaggatgagcaccggcagcggccccgcttacccgccagcgttgaggatagccaccgtcagcggccccgtttacccgccagcgttgaggatgagcaccggcagcggccccctttacccgccagcgttgaggatgagcaccggcagcggccccgcttacccgccagcgttgaggatgagcaccggcagcggccccgtttacccgccagcgttgaggataagcaccacagcggttccgtttacccaccagcgttga

SEQ ID NO: 246281 - DNA, 141 bp, Klebsiella pneumoniae; identical to SEQ ID NO: 36145

SEQ ID NO: 246282 - DNA, 573 bp, Klebsiella pneumoniae
atggaaacccagatgctaacgccaactcctggacgggactacccccgcacctggaacgaatttcttgactggtttgccaccgaagaggcttgccaggcgttcctggagaagcttcggtggccccaaggcttcgtctgcccgcgttgcggcaacgctggcgatgtgtaccgcgccagccgcacccgcctgatgtgccgctcatgccagtaccaaggcacagtgacatctggaaccatctttgacaagacgcgcacaccgctgcgtgtctggctggctgcagcttggtacctgaccaatcagaaacaaggcgtgagcgccctggggctgcagcgcgtattgggtttggggagctaccagaccgcctggaccatgctgcaccggtttcgacgtgccatggtccgcccgggccgggacaagctcaaggggcttgtggaggtggatgaaacgtacctgtccatcacggatcgcaagaatcccgccacccctgcagggcgcaagagcattatagccccggttgatcacctgaataccgccatcatccatcggactgtaattcgccgtgaccttctctaa

SEQ ID NO: 246283 - DNA, 753 bp, Klebsiella pneumoniae
atgggtattactcttttcactaataatgcgttttcgtctgtttcagaccctgacgaatattcgccaggttttgatacaacatctctccgccgggctgaaatatctacttatacagggattggtaaaaaccttatgccgggggaaggcggccccactgtagttggcactccgacgtttatcaccgactcgccctttgttcagttctcaaataacgcgaatgtggcacatttggacctgggcattaaagatactgaccaacaaacgtggtttttactctttgacccgaataatgactcgacgcaacgaattatcgcagggagtttttctgggttgtctgcatctacacctcctggggtatctgtgattgtagatgaattgggagcgctcgcctttatacaaggtacccgctccacggtcgataacacttacggaaccacgcgcgcaaccctgagtgcattcaataagacaaagccgatgcttctttgcctcacccttgacggccagaccacccggctgaccgacatgaccaacaatatttcagcggccactaccctggtagaaacccgtgctcgcaccccttccaccattcgcgtgggtaaggggggtactacgtactggggatcaacctctgcaaccagccgacttggggcttatatggttttcgatcgcgtattatctgatgctgagaaaagtacggttcacgattatctactgagctgcattcaggctaaattcccgacaataattttttag

SEQ ID NO: 246284 - DNA, 702 bp, Klebsiella pneumoniae
atgaaagaacgcggaatgatttttaacgctgagatggtgcgggccatcctcgacggtcggaagacgcagacgcggcggattatgaaacctcaaccagaaccatgcccccgaggtggccattggtggccaagcaacgtgtttaaaacaatgcttcatgttgaagaagaaatgcagaacggaaaaggcggctggggtgggcttgttggagatgcttgcccgttcggggacgtcggcgaccgcatctgggtacgcgaaacatttcagggtccgcttgttcatgaggagttattcgaagaatacagcgcttatcctgaaaagttcgaaaaaccggaatactgcgaatatgccgccgatggtggagttaggcctgaatactgtgaccttgacgataacctccgtcatggttggcgaccatctatccacatgccacgctgggccagccgcattctgctggaaataaccgacgtgcgcgttgagcgtctgaacgctatcagcgaagaggatgcgcgagcagaaggcattattgacggtggctgtcttaattgcggggaacctgagccatgcggatgcgccaacccagagcctgacgctaccgatgcttttgcctacctgtggcaatcaatctacgggcaggaaaactggaatgctaatccctgggtttgggttatcgagttcaagcgcgttgaaggcggtgcagcatga

SEQ ID NO: 246285 - DNA, 219 bp, Klebsiella pneumoniae
atggcaaatgtcgatcctgaaaaaatcaccccagtatttgcgttaaaaattgtaagcataggtgaagtagctaatggccagtgtacgttaacgctggagagtggtcaggatttatctgatccggtggttgtgacagaagagtatttacaaaaatacgaccctcaacctggtggttattacatcatgtgcgaaggaggtataggtctttattctatatag

SEQ ID NO: 246286 - DNA, 552 bp, Klebsiella pneumoniae
atgaatatttattaccttaacattgtgtttttgattgtttttttgccaaagcgactacaatttaggtacactactacccaagagaccgtactgatatgtgatggaggagccatgcaacgtacaaaaaaagctggccctaaccttgagcgagctaaatcaaaaaaaacttatcgaccacttcctgtccatgtcaatgttgttaatgacgtggttatgatagttgttaatggcagagtggcgagtgaagaggctcttggtggagcagatcgccatggcttcgcaccttactttcatggtgtaaattactgcaaagcggcatatcagacgggatattatcacgggttaagtgggtataattctggctatttagaaaattttgttttccactacaagttttttgtagaaggaataaagcagccggaagcttttgatgtaagaagtatgccgcgcgtgaaaagaatgtctttcactgaggcatgtgcgctatccaaagaactatccgactctcgcaaagagagactgctgagagcaagttttgatggaccagaatga

SEQ ID NO: 246287 - DNA, 840 bp, Klebsiella pneumoniae; identical to SEQ ID NO: 222927

SEQ ID NO: 246288 - DNA, 633 bp, Klebsiella pneumoniae
atgaataacaatgttcaattaccgctagatgacttcccaccagaccatccccgggctcaagaggtaattgattttttcggcggtaaagaaatcatcaaggtgcctcgtgaattgggattgcaggccgggcgatgctactggaacgtaaatgaccagataaaaaaacagggaggaaccttagtatatggatggatgctggagtggcatccgaatttggctgtcttcgccatgcaccatggagtgtatcaatcgccagatggtaagctaattgatgtgtcttctgctgatacagcaaggacgactaactacaccagctttatgccttcaaatgaaatagaaatagatttaaaaaaatacccaagaatacccaggcgctcgctcccgctcattgatgacaacgagcttagaagatacctttacctttatactaaaaattttcaagcgcactcagatcttgcctattcttgtctggaaagaggaacggcgatatttaaggatggggcctttgcttacataagcattcctgatgatataagcaggcggctaaaaccagcaatcgaaagttctagccgagaaagatctaaactaagaatgactttgttttcccgttactttgatgtggccagaaattaa

SEQ ID NO: 246289 - DNA, 516 bp, Klebsiella pneumoniae
gtgactgaaaaatcaacacctgaaagttacgaaaaagtacctcttatttctaatgctgttgctagtggcttaactggggctgcaaccttagtcattgcatcttgggatgggcacttaccgtttataaattcagatttatcatcacttaagtcattgatattagctgcactcccatgcttcgcaatgtttttgtctcattggattaaaacgcttgggttcaagtggtcattaggtagtgtaaatagacaattgttaagtattaacaaaagaaaagaaaaactcctcaaaaaagatattgaaaaatataaaggtatcatttctgaggagaagattgctgatttccgtaaacaacttgaacaggttttgcaagatcggcacgatattataaacaatacttacatgcaaaaattaaaagaacgcaatgaaactcttgaagagtataatactcacagaacaactcaaacgaatgacaaccctgagttgcaaaaactcttagaaaatcaaaagaatacttag

SEQ ID NO: 246290 - DNA, 876 bp, Klebsiella pneumoniae
atgctacaagatgatgttctcgaagaggaaaataatgtagttgaacagttagtggttaaatatgatggtgaagcattagccaatcataaaatagatttagatgttttaaccgagtctctgaatggtcttaatagtttgctaaaagaagttaactttattgttaacggaactggtgaaaatttagatgtggaagtcgagccttttcgcgaaggctctttcgaatatttaatcgatgtcattcaaaatccaactcaatatttagatattttaagtattattggtattggtgggacagccgctgttgctgctggtaatacattaatagacataattcgcatgatcaatgggcgtcagatacgccgtataacgttaaccgctgacggagattgtaagataatattagaagatggggaggagatagtagcaccttcttattatagaccactattagcttctcccagcatcagaaaagcattatctaagatcatccataaccctttgcagaaagatgggtatgaaacatttaaaatttcaacccgacaaggcagggatgtcgttatagtagaaaaaagaaatgctgagccatttaaataccgtagggttcctgttgaacagtctttttctgaacaattatttgaagatgtggctataacatttttgactattcataaagacaaaaatagtggatggcgagcaaactatgacgacgatactattacggtttcaatcgaagacgaagagttcctgcaacgagtcagaacaggccgtgaggctgggattttcagtgatacttactatgtcgatttgcttgtccgggaaaacttgaattctctggacaaaacctacatagttggtagagtgaacgaacttttatag

SEQ ID NO: 246291 - DNA, 330 bp, Klebsiella pneumoniae
atggcgctggccgcaatggacagcgagccggtggcgtggacatggcactatcgtgagcaatggcatgttacaaacgatgaacgtcgcgcagaatttgtcgcaacagatggtgatgtggctgtactgccgctctatcgccacgcgcagccagcgccggtagtgccggatgatgtgctggacgcattgcagaaggttgctcgtatacgcctcgatctgaatgacttcgacggcgattgccgtggcatcgctgattgcctgtgtgatgccgaagaggcgctcatcgaggtggtgaatcgccgtgccgccatgctcaacggaggtaagtcatga

SEQ ID NO: 246292 - DNA, 297 bp, Klebsiella pneumoniae
atgatcaaccgcaacaaactggagcacattctcgaatacgccaaacagcagaggcacatcggccagtcctgcaaggttccgccagaagatatggtcgaaatcatggagcgattgctcaacgctggcaactctccggtaattccggatggttacgtgatggtgccgaaggagccgactgccgagatgatttgggctgcaaaatactgtttcacatcaacaccaggctgggatgtatttaaatctgcgtacattgccatgctcgcagccgccccgcaggaggtgccagatggaaaatga

SEQ ID NO: 246293 - DNA, 396 bp, Klebsiella pneumoniae
atggaaaatgaaggcgacaacgtcatcactctggtgcagccaaagcgcgacgaagctacgctgctgaacatcactgtaggcgacaaaaagacatacgatgaacagcgctgtaagcacctgtcgattgaagtcagtgaaaaggaacgcacagtacattgcacccgctgcggctgtgctgttgatccgtttgaccacattctccagtgcgctaccaatggagagcgcgtagtcactgagatagcgcaacttcaccgccgtcgtgacgagctgcgggaatctgtagccaacctcgaacgcgaagagaaaaacgcaaaggccagattacgcgctgccagaacgtcaatcctcttcgcagaaaacgacctgaaaaatacagagcaggggataaaacaataa

SEQ ID NO: 246294 - DNA, 270 bp, Klebsiella pneumoniae
atgcgaatgataaccagaaagaaacccgcctttactgagctgtatcagaccggcgttctgactcgcatagctgccgtaaaaagtcctgatggcggcggctggcgattgttcggattatggcggggcaaggagatagcggtatttgtggaggctgctcgcggagggattcgcgagtggtcaggtctggactatctcgctaacttctgcgcgagttgtggcattagcctgtgggaagttcacaacaaggtcgccgaaaaagctcctgaatga

SEQ ID NO: 246295 - DNA, 276 bp, Klebsiella pneumoniae; identical to SEQ ID NO: 222901

SEQ ID NO: 246296 - DNA, 1185 bp, Klebsiella pneumoniae
atggatttaacaatagaacaaagaaggatcgccaatgcaaaaataatgattgcaaaagagttggcaaccaatagcggtacttttatcgaaattcaaattgacagaatgataaaagaaataataagcaaagttaagatctcggctagcgatgcatccaaggaacagtacagaaagttatataaatcacacacatccaagagcggcgaggatctgaaaaactgcttaatgagttgtaaaacgcgtgcaagctttgataaaacgagaacgtcctttaggttctgtattgcagaagaaatacaaaggttaaggcgtgaatctgaaaaagcgatgaaggctaaagattacgatcttggaaagaaaaaaattcaagaagcatttaaattagcggttaaatttgaagatgaattcttatctgaaaatagaattatttttaatgatgtaaagagtaaaaaagattttaaaagggtttcattcagtaagaaaaaaggattaaaaaaagcaccttctgcagatgaaataataaaaacatttggttttaatgctaatgtccatgatcgctacgctctggcgttctctgtgatagctacttttggaatacgtccggcagaacttcaaaaaggggttaaactccagtttcatgatggaatgatatatgcaattgttcaaggtgctaaagtcggatcggataaaggccaaaaggtaagagctatggggtcggcattacgtgaagataatgaaagcgataaaatcctaatggatgccatttataaggcaggtggtgaagttttagttacgcaaaataaaaaagactatgagagtttaagaaagtatttaaatagacatcatccgggaacatcgctttatacataccgccataaagtcgccagtgacctgaaggcgtcaggtctccagaagcgccagatagccgagtttctggggcatagaaccacggactcccagcagtattacggttattcaagatccggcagtggtggacgttctatgacggctaaggggtccaatgaagtgagggttaaaccagatataaaagactacttaaaaccagcaacaaagcctactgctggaagcggtggaggtgctttaggtagcaagataaaacaagctaaaacctcgatttctaccacgtcgaaagtgccgaagtttaagcctccgggcatcaaataa

SEQ ID NO: 246297 - DNA, 141 bp, Klebsiella pneumoniae
atgcatgtgattgttcgccaagtggtatcgagtaggactaaacggggagtactgcgaacgtccaaccgggaacgagtcactaagtcgtatgatgagcatcaggccagctatgagaaagcccagccgataatatggggttag

SEQ ID NO: 246298 - DNA, 189 bp, Klebsiella pneumoniae
atgagcaaggtaaaccttgatttagttgcaaacgcgatgatgagcagtattgaaaattacctgtttgaaattctggattctgttgaaaacgaagtgggggcacttacggcagaagatcactacgagattaactccctggtccgttgcgcgattgaaaaggcatcaactgaacttggaggtgaagcgtga

SEQ ID NO: 246299 - DNA, 237 bp, Klebsiella pneumoniae
atggtaacttttacaagagagcaacttattgaagaggcgaaatacaacctggagcactgcttctgctctgaaaaaacaaaagttttaatgggtatagctattgcctccttagctgctaaacctgtaggtctttttgctcatcgagcgggggtatgggtagagctatgccagggcgacacatttgatcacccagatggaatgcccttgttcgctggcatcaaggtggaggctgagtga

SEQ ID NO: 246300 - DNA, 513 bp, Klebsiella pneumoniae
atggcactgaaacacgatgaactttgccagatagcctgccgctttctgcaaaacaacggattcaaagtagctttccacgaccgctttgtcgctgctgttgccactggtgagcagccggacgctatcggtttccgtaacctggcctcctgtttgattgaagttaagtgttcccgttccgactttttggcggacaagaaaaagtcattcagaaggatgccgagccaaggtatgggcgactggcgctttttcatggcagagcctgggtttattgaagtctctgacttgccgccaggctggggcctcctgcacgtcagaaacgggcgcgtgtacaaagtccacggatggccgggaaacgcgctgtggtgttcacgtgagcataagccgtttcaggccaacaaacaggccgagtgtgattacatgtacagcgccctgcgccggatggacctgcgcggacatctcaaagaggtttatgacggcgtgatcgttaacaaatcagaaggaaacgcggcatga

SEQ ID NO: 246301 - DNA, 1272 bp, Klebsiella pneumoniae
atgtatgattctactgcattaataaatagcctgattgtacttgtttgtttccagatgattggtggtattacagatttttatagatcctggcgcggggtgaaaatttctacggaattgaagattataattcaaaattggacattaagtattgtatttacgtcaggtattttatcatttctagcaggtaatgatttagaaatagagtttttcttttgttggtatattattgtaagccttttccttattgtcagtcgtttttccattcgggcactaatgaatgttattaggaaattaggctataacacgcgtattgtagctctagcgggaaatatacctgttggtattaatctgatgaaaagttttgccgaggaaccatggcttggattaaaagtaaaaggtatttactgtgattgccccccaacgaactcaataggtctaccttatagtgggaaatatgaggatttaatatgcgaagcccgtaaaggagagattgacaggatatatatagcaatggatatgcaggacgataaaaaattaaagaaattagtaaaaggattggctgataccacatgttctgtattgctaattcctgatatcttcacatttaacatccttcaatcacgtactgaagaagttaatggtgtccctgttgtaccgttattcgacactcccctaaacggcataaacagtgttttgaaaagactggaagatattgtcctttctttgataattttgatattaatatcccctgtattgatagtcattgcatgcatagtaaaatattcttccaaaggacctattttattccgacaaacgcggtatgggatggacggaaaatctatacaagtatggaaattcaggactatggttgtacaagagaacggcaatgttgttacgcaggcggtacgtggagatgtgcgtgttactaatgttgggcggtttttaagaagaacatcacttgatgagttaccgcagttttttaatgttttatttggtagcatgtctattgttgggccgagaccccacgcggtggctcataatgagcaatatagaacattaattgaagggtatatgcttaggcataaagttaaaccaggaattacaggcttagcacaaattaaaggatggaggggggaaactgatacacttgaaaaaatgcaaaaacgagtggagtatgatcttgaatacattcgtgagtggagtttatggttggatttaaaaattatatttttgacggtgtttaaagggttcgtcaataaatcagcatattaa

SEQ ID NO: 246302 - DNA, 171 bp, Klebsiella pneumoniae
atgctgccggccggcatgaacgaggacggtgtgattgaagacatgcaggcgtatgacgcttgggctgatgagcagacgcagcgggatatgcagcggcgtgaagaggtcaatatcaaccacagccaccgccacgatgagcaggatgatgtcgagattggggggaacttctga

SEQ ID NO: 246303 - DNA, 186 bp, Klebsiella pneumoniae; identical to SEQ ID NO: 222347

SEQ ID NO: 246304 - DNA, 294 bp, Klebsiella pneumoniae
gtggcgcacgtcttcggtgaacgcactctggccacactggagcgtcttctgagcctgctgtcggcctttgaggtcgtggtatggatgacggatggctggccgctgtatgaatcccgcctgaagggaaagctgcacgttaacagcaagcgttacactcagcgcattgagcgacataacctgaatctgcgacaacatctggcaaggctgggacggaagtcactgtcgttctcaaaatcggtggagctgtatgacaaggtcatcgggcattatctgaacataaaacactatcagtaa

SEQ ID NO: 246305 - DNA, 351 bp, Klebsiella pneumoniae
atgcatgccctgctggcgacggtgcaggccatgtccagcgacgatcttctgctggcgatctcttactccggcgagcgccgggagatcaatatggcggccggtgaagcgctgcgcgtcggctgtaagatcctggcgatcaccgggtttagcccgaacgccctgcaacagcaggcgacccactgcctgtatactatcgccgaagagcaggcgacgcgcagcgccgccatctcctccaccagcgcgcaaatgatgctcaccgatctgctgtttatggggctggtgcagcaggatctggagcgggcgccggagcgcattcgccatagcgaagcgctggtgaaaaagctggtctga

SEQ ID NO: 246306 - DNA, 162 bp, Klebsiella pneumoniae; identical to SEQ ID NO: 139499

SEQ ID NO: 246307 - DNA, 258 bp, Klebsiella pneumoniae
gtgatcgccgaagtatcgactcaactatcagaggtagttggcgtcatcgagcgccatctcgaaccgacgttgctggccgtacatttgtacggctccgcagtggatggcggcctgaagccacacagtgatattgatttgctggttacggtgaccgtaaggcttgatgaaacaacgcggcgagctttgatcaacgaccttttggaaacggcactgttgcaaatagtcggtggtgataaacttatcatccccttttgctga

SEQ ID NO: 246308 - DNA, 606 bp, Klebsiella pneumoniae; identical to SEQ ID NO: 53558

SEQ ID NO: 246309 - DNA, 147 bp, Klebsiella pneumoniae
atgatcgctatattctttcttggcggtgtgcaaatgctttctttaggtattataggggaatatgtcgggaaaatttatatagagacgaaaaatagacctaaatatttcattgatgaaagcgtaggtaatgatagcaatggaaaataa

SEQ ID NO: 246310 - DNA, 135 bp, Klebsiella pneumoniae
atgagctttcaacctactagttacagtcagcgcgccctgctcgggttcgcagctgtgatcgacattgccggttgggtcactgttatcgtcgcaacctgggggatctgcatggtcattgaatgggtggcagtatga

SEQ ID NO: 246311 - DNA, 630 bp, Klebsiella pneumoniae
atgaatcaaacacaattccagaaggcggctggtatcagcgccgggttagctgcgcgctggtttccgcatattacagccgcgatgaaagagtttggcatcactaccgctatcgaccaggcaatgttcattgctcagtgcggccatgaaagcctcgggtttaacagggtagtggagaatttcaactacagcatcgccgggcttgctgattttgttcgttacggcaggttaacgcaggatcaggccaactccctcgggcgcagccagtcggaaactgtgttacctctggagcgccagcgggctatcgccaacattgtctatagcaagcggttgggtaacaacagggcaactgatggctgggtttatcgagggcgcggacttattcaaataaccggactttctaattacagggactgcggcagcggtttgaaggttgatctggtggcacagccagaattactggagcagtcctcgtatgcggcccgtagtgcagcgtggttctatgtctcaaaaggttgcttgaaatatccgggtgatcttgtccggatcacgcagattatcaacggcggacaaaacgggattaataaccggcgcgcccgcttcctgaaagcaaaatcggtactggtggtgtga

SEQ ID NO: 246312 - DNA, 183 bp, Klebsiella pneumoniae
atgagtacttttatcctgattttttcgctgtatgcatcagcatgggcggataacgatttcgccagcatccgttcacaggagttttcatcgcgggaaacatgtgaggcagctaaggctgaattccttaaaaagtttgaaactgcccgctctacgaatacgcaagcaatctgcgtgaagaaatga

SEQ ID NO: 246313 - DNA, 228 bp, Klebsiella pneumoniae
atgcgaattactgtcttagatgacgatccggggcggaaaattaatctcgctcaggaacgatataaagtctatatcgatggcgttgaagttaagcacgtattcactgctgatgatgaaaaaggcgaggtgattgctgccgtgctgaatgatcgcggatacattacggcagaatacggtgaagtgaagcgacaggcgctttacggaaaagtcaccattaagcgccaataa

SEQ ID NO: 246314 - DNA, 474 bp, Klebsiella pneumoniae
atgtctggaccaccgaaaaccccgacacatctacgtttggtgaggggtaacccatcaaaacgcccgatcaatgagaacgaaccaaaacccgctgcaggggtacccccaacgccgaagcatttcgacaaacaggggaagtactggttcaagcggatggctgaagagctagatgcgattggtgtgatgtctcaactggatgccagagctcttgagttgctggttgaggcatataccgaatacaggcaccactgcgacacgctcgaaattgagggatacacctaccggaccgaaacgcagagcggtgatgtgatgatcaaagctcacccggcagccatcatgaaagctgatgcctggaagcgtctgcgcgctatgctcggtgaatttggcatgacaccagccagccgctctaaggtgaatgcaaaaggtcctgatgcggttgacccgctggccgagtttatgaaagcgagggattaa

SEQ ID NO: 246315 - DNA, 1737 bp, Klebsiella pneumoniae
atggctaaggttgcagatggcatccgctacgccgagagggtggtggcgggggaaattattgcctgtgaatatgtgcgccttgcctgccagcgttttctggatgatctggcacaaggcgaagagcgtggtattttcttcagtgagccgcgcgcgcagcacattctgaatttctataattttgttcctcacgtcaaaggcgcgctggctggccagcctattgagctgatggactggcatgttttcatcctgattaatatttttggttttgttatcccgctggttaacgaagaaacgggggaaaccgtcctgcgtaacgacggcagcggtcggccggtgatggttcggcgtttccgtacagcagatgttgaggtggcccgtaaaaatgcaaaatcaacactttgctccggtgtgggtctctatatggctggcgctgacggcgagggcggggcggaggtttattccgctgcaactacccgtgaccaggcgagaattgtttttgaagacgcgaaaaatatggtcaagaaggctaaagccactcttgggcggatcttcgaattcaacaagctcgctatctaccaggagcaaacggcctccaaattcgagcctttatcatcagatgcgaacaacctcgacggcctgaacatacactgcgccatcgtcgacgagctgcatgctcataaaacccgtgacgtctgggacgttctggagacggccaccggcgcgcgcctgcaatcactgctttttggtatcaccacagccggctttaacaaagaaggcatctgctatgaactgcgcgattacgccatcaaggtgctgcgcggcctggttaaagacgatacgttttttgccatcatctacaccttagacgaaggtgacgatccctttgatgaaaaagtctggcagaaggcgaatccggggctgggtatctgtaagcgctgggatgacctgcgccgcctggctaaaaaggcgaaagagcaggtttcggccaggattaactttttcaccaaacacatgaatatctgggttactgctgagtcggcctggatggacatgatgaaatgggagaaatgcgagtttatagctccgcagcatgaacttaaaacctatccctcctgggtgggcgttgacctttcaaacaaaattgatatctgtgcggccgctaaagtctggcgcgcgccaggtggtcacgttcatgcagattttaaattctggctcccggaggggcgccttgagaagtgttcacgccagatggcagagctctatcgtaagtgggccgagatggacaagctgatccttaccgacggggatgtaatcgaccatgctcagattaaggaagagttgcaggtatgggttgccggcgagagtctgaaagaaattggcttcgacccctggagtgcgacgcagttcagccttgcgctggcagaagaagggctgccgctggtggaagtaccgcagacggttcgcaatttctctgaggcgatgaaagaggtcgaagcgctggtatacggtggccgcttccatcacagcgatcacccggtaatgaactggatgatgtccaacgtaaccgtaaaacctgaccggaacgagaacattttcccgaataaatccacaccagaggccaagattgatggcccggcggcattgttcacagcaatgagccgcgttctggttaacggtggcaatgaccagcaggatctttccggattcttcaataatcccatcatggtaggtttctga

SEQ ID NO: 246316 - DNA, 1212 bp, Klebsiella pneumoniae
atgtctgaagtaaacgatattctgaaaaaagtcactgccagcattgaagaagcaactggcaagttcaatgcgaaagcagaagaagcagtcaaagaggcgcagaaatccggcaagctatcagaagaaacgaaggcagccgttgataaaatggcttctgagtttaacgccctgcgcgaagcagaaaaaacgctgaaggcagcaatgggcgaactggagcaacacgttgcccagatgccgcttgctaacgcaaagcatgttgtcgagtcagtcgggcagcaggtgatctgtgctgaagcgctgaaaacctttgctgctggtgttgaaggtggaaaacgcatcagtatccctgtgaaggctgctttgacttctgcggatgttcctgatggtgtggtggagcctcagcgtctgcctggtattgatacggcaccgaagcagcgcctgttcatccgtgaccttattgcaccaggccgtacttcctccccggctattttctgggtgcagcagacaggctttaccaacaacgcgaaggtggttcctgagaatactcagaaaccatacagcgaaattgaatttacgccgaaaatcactggcgtcagtaccatcgcccacctgttcaaagcatcaaagcagatcctggatgacttcgcgcagctgcagtctaccgttgatgccgagatgcgctacggactgaagtatgcggaagagcaggaaattctcttcggtgacggtactggtgtgcatctgcatggcatcgttcctcaggcgtcagcgtttaaccctgcattcactgttgagcagcagagcggtattgacgatctacgtctggcaatgctgcaggcacagttggcgcgtttcccggcatctggtcacgtccttcacttcattgactgggcgcggatcgaactgaccaaagacagccttggacgctacattctggctaaccctgcggcgctgactggtcccactctgtgggggttgccggttgttgctacggaagcagcagccttccaggggaaattcctgaccggtgcatttaatgctggcgcgcaaatcttcgaccgcgaagatgctaacgtggttatctccacggagaacgccgacgacttcgagaaaaacatgatcacaattcgttgcgaagaacgtctggcgctggctgttaaacgtcctgaagcgttcgtgtacggatcattcagcaccggcgcaggcagctga

SEQ ID NO: 246317 - DNA, 327 bp, Klebsiella pneumoniae
atgttagatatcggaattgttaaagagcactgtcgcgttgattccgattttaccggcgatgatgctctgctgaatttatatacgggcgcggcagcgcgatatgtcgagacctggacccggcgaaagttgtatgagtcggaagaaagccctggctacgcagaagatgcagattcaattctgcctggtggtgatgtgaaggcggcaatgctgctgcttattggtcactggtatgcaaatcgcgaaacggtttccgttggccagactgtggcagaagttcctttcgccgttgaggcattgcttcagccatatcgaatttacggggtgtaa

SEQ ID NO: 246318 - DNA, 1194 bp, Klebsiella pneumoniae
gtggaaaccctccgggaatatgcttttgataaagtatatctagaagtttctaattcagaagacagaaaggaaaaaatacggagcctaacttttttagagcttgaaaaaatcacaggggttaagttgaaagtaatcgccactgatattctaacggggactgcagtagaacttagttccataacaaccccagatgagttggtttttgagtcagttgcagcctcaagttcatatccaatattttttcgaccatctattataaagaatcaaattctgaccgatggagggatatcatgtaatttaccaagtttccttttcaatcctcatgaatttaatcgactacctgtttatgcttttgatcttcgcactcgtttctttatgcgagaagacgctgggaaaataaagatatcgatttttttaaagaagttgacaatgtcaatgatagatgcaagtaataatataatatcggatgttacaggaggtataattgtccccgttattgtatctccacgatttggaacattcagttttaatttaagagatgagcagcttgataagatttttaatcagggtaaagttagcgccaagagatttatgaaacgtgattttttcacaagttctatgctgccagcgaaggagtatcacatgtatgcctcgctgatctatggcaatgttgattatttattgaagcttattcaaaatgaaattgaaatacttattgaaggtgtaaagttacaaataaatttatatacagacattacaaccaatcaatctagaatagtcgcattttctcattctaataacttcaattgtaaagcggaatataattcttacgatctggttgattcggatgctgtttgtgttaatgcttggaataataaacaaatattctatagttatgatgagtcaaataatagaacaaaaatattttatccgattgaaagaagcaaccgatttgacgcaaactataatggattaaataataaaatgttagctttgttagaattggaatttcaagcgcattatcttgatatttctttttttgaggataatactatagggggagcaaaatctatcaaagaagttgactttagtgaagactcagctacaattattgatgggtactgtttcgtcattagaaactcgatgcttggacaccaagcaatatttcatgaatcgaaaaatacccatcattaa

SEQ ID NO: 246319 - DNA, 138 bp, Klebsiella pneumoniae; identical to SEQ ID NO: 159883

SEQ ID NO: 246320 - DNA, 888 bp, Klebsiella pneumoniae
atggaatacaaagagaaaggcggtttcaacccggtcaaagacgcactggagattttacctgaaaatatcagggagagtatttcaaggcgaataaatgaggttatcaactatgagccagtgattggcatcatgggtaagaccggggcaggtaaatccagcctgtgtaatgcgatcttcaaaggggatatctgtgctgtcagtgatgtggaagcatgtacacgagaaacgcaggaagtacgcatccagtttggtaaacgcgcaatcagattgattgatattccgggagtaggtgaaagtgcagtccgtgatggtgagtacgagcagctttatcgggaattgctaccgaagctcgatctcgttctctgggtcattaaaggggatgatcgagcattttcagcagatgaacatttttacaaaaacgttctgaaacctgccgggggtgaagagaagacgctgtttgtgcttaatcaggtagacaagattgagccttttcgtgaatgggatgtacagagtgctcaaccctcgccagcgcagataaaaaacatcctcgataaaaaaacctacattactcaccgactcggttttactgaccatccagttatcgctgtagcggccagtgagggctataacgtcacgcaactggttgaggcaatggtgcgggctctcccaaagcacgcacaaagcggggtggcctcgcaggtcagggaagaacacaaaacaaaaaacgtaatagaagaagcaacagaagggttcggagacaccgttgatcgggtgattgatgaattcattgatgcctctcttcctaagccggtggcaagcgtggtgaaagcagccaaaaaagcggttgtcagtgggttaaagaaagcctggaatttcttcttcggttaa

SEQ ID NO: 246321 - DNA, 180 bp, Klebsiella pneumoniae
atgcttaaaagcgagttactggagattattgctacctttatcaactgcatgcagggttctgaagctgaagaaaatttgtataatcttcgctgttatcattacagcctaggttctggcgaatccaaggtaacaggtaacaggactcggttgtcactaaaacaaactagtaaatacaagtga

SEQ ID NO: 246322 - DNA, 2652 bp, Klebsiella pneumoniae
atgtctgtgaactggactaaagctgagttttttaagtgcgctttgcaggtaaaccctgcgggctataacaaatatcgcggtaaagaatcactcagcgaagaggtctacaaccagcaactgctggaggcatgtcttgaagctggggttcaggttgttggtattgctgatcatggtgctgtagatgcggtggacagacttcgtcagctctttaatgaacatggtattgttgtttttcctggttttgagatttgctccagcgagaaaattcattttgtttgtttgtttgatgaaaatcggacagtgcaagagctggaacgttatttgagtaatttgggatatgaagaccccgatgactgtatttcaccatcaaagctcagtgctgtacagatcattgaaaaagtagatgatctggacggatttatttttgcagcgcatagcactcatgataatggtgtactgaaatgccgtatgaaccatgtatggaaagaaaaagcattgttggcggcgcagattcctggaacggttgatgacttaaaaggggttgaggatgatttttaccggaaagccatcctgaacaaactccctgattatcgtcgagagcggcctattgctattatcaacgcagcagatgttgctcagcctgaagaaattaaaacagcaggagcatcttgcctgataaaaatgaccaggccatgtttttgctcatttaaacaggcatttttagatccggaatcacgggtacgcctgaatgcagataagccgcatagctatgcttcggcaattgaaaatatccgttttattggtgggtatctggatgagaccgatattactttttccgaccatcttaatgctgttattggtggtcgcggaacaggtaaatcgactttgctggaggctattcgtttcgccttgggtaaacagccttttggtgattcagcacaaaagcagcatagcgcaattattaagagcaacctggggaatggtgctctggtccaactgaaggtccgctctgctgcaatgcaggggcgtgcatttaccattagccgcaaatttggtgggcaacccatcgtaacggacaatgaaggtaatgtttcgtcttattctccggatgatttacttcctgggctggagttatacgggcagaacgaaatttacgaaatgactcgtgatacgcagagtcgcaatcatttagtggagcggtttcttgaaggtgaccataaccagttcgatgtgattatcaacaaagcgctgactcgcctcggagatagtcgcctgactatccttaatgctctggagcaaaaggcggaggcagaacttgaagttgcacggctgccgaaattactggagcaggcagaacaatttaaacaacttggtctggatgaaaaactcaaaatcgttcccttgctggaaaaagaaaagcagcttagttcacgccatcaggaagaattgtccagagtacaggatgctcttctaacattaaaagatagcctccccgatctagcttatctcagcgatgcggtgatcaatgttctgccgcatcagtctcttcttatccaacagcgtgatgtactccagcgggtgcaggagcagacggcgatattagtccagcaactggatgaggttgttcagcgttcatcagcagagcttgctcctttacaaagcgagttatcaggtctaatcggtgcagaagaagctcaacttgaaaaggcttttaaagatatcccggccagccagggaaaaagcgggcgacagattggtgcagattatcaaacgttgttacgccagattgcttctattcgtcctaaagcaacggctctggagaataggcaaaaacaacttgatgagctatacctacagcgaaaaagattacttctggagcttatccaggcgcgttctcagcgttccgctgcgttggcgaaatcagtcaaacgcctgaacagaaaactagatgaaaaagtgcggctcaatttgcagccagaaggcgatcgtcaacctctgttgcattttctggagcaatgtaatctggaaggggttggtccacggcggcttgcttgggtgatggagcatgattttacaccggagaatctggttgagagtatccggtgtggtgaattagccttgcataatgctgggtgggggataacgccgaccgtcgcgcaggcattgttgcgcttgagtgaaaaacagcttctggaactggaagcactatcgctaccggatacgatgcaaattgagctgaatgtaatgcatgacggtggcggtgttctctggcgtcatattgatgaactatctaccgggcaacagtgtacagctgtcttgcatttattgttattggaaaatcaagatccactgatcctcgatcagccagaagataacttggataacgcatttattgcagagcgtatagtgacagagctgcgcaaagcgaagctgtcccggcagtttttatttgccactcataacgctaacataccggttttcggtgatgctgagtggattggtgtattgagcgttgaagagggtaaaggacgtattcttcctgagcaacagggggctattgatttgccggagatccaacgcctggcggcgaatattctcgaaggtggtcaaagtgcctttaatcaacgccgggaaaaatatgggtttaaataa

SEQ ID NO: 246323 - DNA, 1113 bp, Klebsiella pneumoniae
atggtgccgaagctgcgttttaatgggtttgctattccgtggaaaaaagctcagattgggagtattctgactattggtagcggtcgtgactacaagcatcttgcacatggcgaagtacctgtatttggttccggtggtctcatgacatatgtcgatgagtttttacatgatggtgaaacggtctgtatcggaagaaaaggaacaatcgacaagcctttttattatagtgggaaaatttggaccgttgatacattatttttcacacattctttcataaaggttcttccgaaatttatttttaatgtattttgtaatataaactggaaagaacacaatgaagcgtccggtgttcctagtctatctaaaagcaccattggaaaaattgaagtcttctatccagatttaaaagaacaatacaaaatcgcaaattttctcgcctctgttgacgaaaaaatctcgtcactgaacaagcagtacaacctgctatgccagtataaaaaaggcatgatgcagagaatttttagtcaggagttacgttttaaggatagagaaggtaaatatttcccaaaatgggaaagtaaaaaaataggagcatttatatctgaatataaatgcaaaaccactaaggaagatgaatggcctgtaatgacatcatctcgatcaggcttagtgctacaaagtgattactacggagaaaataggcttacggaaaggagtaatataggatttaacatcatccctcaaggttatttaacttataggtcaagaagtgatgatgggttgtttttctttaatcaaaatagattaaacacaactggatgcataagtgtatactatcccgtatttaagtttaaatatggcagcaattatttttacaccactatgtttaattattataagaattcatttcgggcatatgctgtaggttcatcacaactggtgttatccattactgatctgaaggtaatgaaatttatgataccagatcctgacgagcagatgaaaatatctgaattcttatcttcaatcgacaaaagaatagacaaaactaaatctacaatcgataagttaaaaacttggaagcaaggtctgcttcaacagatgtttgtataa

SEQ ID NO: 246324 - DNA, 432 bp, Klebsiella pneumoniae
atggagagctatcagaataagatgacctggggagagcctcctctgccaaaaggacctgagcactttggtgagcgcctgaaaactgttatcgggaaacagtctgtcgcctcttttgccagggattgcggggtttccgaagcctccatgaggaaataccttaaaaccgataccgtgccgggtatcgacagtttggctatgattgctgcctgcacggggcgttctctgacctggctcattactggtgaaggcgacccctttacggacaacgctaggcagaaatgcttttcagaagaagaaatcaaaaagtggtggaccctgatttttgacgctctggatgcggacgataaatacagtgttattaaggcttttcagcaaggtggcctgaacgcggtgttcaactctgaggttatgactggcaaaaggaagggataa

SEQ ID NO: 246325 - DNA, 204 bp, Klebsiella pneumoniae
atgagccacaagaaagaacacaccgtcatggtcaacaatgtgctccgggagcttgccaggcagcagggccagactgccgaggctgttctggaacaattattctgccgggccagcatcgtcaatacggggctgctgaatgagtcttttcgtgaagcctttcggcagcattatcccggcgagccattcaaccacgttacctggtga

SEQ ID NO: 246326 - DNA, 501 bp, Klebsiella pneumoniae
atgcataagtccacgttacacaatctgaagttatacctggctctcgacagtgacggtcattacgtgatttcgaaagagatgaaaaacgcttccgatgctcagtggttctgtccctcctgctcttgccctgtgaaactccgcaacaatatccctggagaagatgactggtttgtacacaaccccgatgaggcaactaaaccgctattggcgaattgtggttatctcaacactgaaatcaaaaggcgtgtcttcatcctgcggttacgcacgatgattgacgaactggagaagttgacagcaacgcggtactggttctgtgtatggtgtaaagcgcattatgaaggggagaaacactgtaaagcctgcaacacggggatatacagcatcagccatggcgactggtgctggaattataaccacaaggaaaatacgccagaaatcagcgaccatacagccatcaacataaatcatcatcaccagacagcctgtatcccatcctga

SEQ ID NO: 246327 - DNA, 216 bp, Klebsiella pneumoniae
atgaccactcagaataacaacaccagcctgcttaacgacaagatggtcgatatggcattcatcacccgctttacgggtttaaccgacaaatggttctacaagctgattaaagatggtgaatttcctaagccgattaaactgggccgcagttcccgctggatgcaaagcgaagtcgaagcctgggttcagcagcgtatcagtcagtcacggaagtga

SEQ ID NO: 246328 - DNA, 642 bp, Klebsiella pneumoniae
atgagccagaaggcctcaggtaaaaacgtctctaatcagtactacgcccgccgcataacagaaaccattgataaagccctggaatgctatccccggttgttggcgatcaggtttgaccttcgctttcctgacgaagaagaacgtctggactgccctacacgttactacgactatcctgacgttatatcccgcttcattgactcaataaaatcccagatagccgaagacattaagcgcaagagaaaagccggtaaaagatcgttaacctgcaagatgagatatttctgggtaagggagattaatcaggaggagtcaaagcaccactatcacgtggttctgttgcttaacaaagacgcttatccgtggccgggtaaaagacataccgaaacgtcattcgaccgctacagtgtgtttcagaaggtcattaatgcctggatacgggccattaaacgtacagactctgataaagactttcatggactgattcaccttcctgtttctggtttttaccagttaaaccgcaataactctgacttcaaagccgattatgaagaactaaccgaaagagccatgtatctggctaaagagcgcagcaaagataaatcagacggttatcgtaactttggttgctctcagaactaa

SEQ ID NO: 246329 - DNA, 261 bp, Klebsiella pneumoniae
atgctgggtggcttttttgcaggcctgttatatacacctaaaaagaaagaggtactgattaaggaaattgaacagttgctctccagtcaggacttttgcaggaatggtatgctggagattcccggtaaatttgtgaagttacatattaatagcgaacagattaaagtggatgggcgctctttctccgatggtttcaataagctggagcagagaaggcaaatgcatagcgtgggggcagtaaaccctccgtggctaaaatga

SEQ ID NO: 246330 - DNA, 201 bp, Klebsiella pneumoniae
atgagattagccagtcgttttggtcgggtgaaccagatccgacgtgaccgtcctttaacctgcgaagagctgatgagccacgttcccagcgtgttcagtgaagaaaagcatgaatcccgcagtgaacgttacacatacatccctaccattactctgctcgaaagtttaaagcgtgaaggctttgagggatttgttgaataa

SEQ ID NO: 246331 - DNA, 552 bp, Klebsiella pneumoniae; identical to SEQ ID NO: 214539

SEQ ID NO: 246332 - DNA, 3171 bp, Klebsiella pneumoniae
ttgatttcaagggtaaactattcgaatatttctttcctattaaatgcaaaaaattctcaacatatagtcactgttgacggtttttatagctcatatgatggcggccaaggggaatgggttcttactggtaatatagataaagataaagctggtatgcatttcccgaaaaatgcgacagtatataatgcctttggtgtagaatatcgattacgactgaaagatcgtactattgtcaatccgaaaataaatggtgccaaagagatctctggcatagagattagtgctatgtcctctgatggattcgtttgtctaggagaggttattaacggcatttatagtacattaccagtattatatcaaccaaataataatattgaatcatctacaacctttaaggcattaaaaatcattttatctgatgggctttaccgtattgggaaagaggcaataaaactaagaagtaacatacagtatgacttcggtaagtcaacgatatatgtaaaaggaagagatgctggtgtctatataaacggattggagcattctgttgaggatattgatgatatctacaaaaaatgtggggaaagactgaactgggaatctgttagtttagggttcactcttgtcagaggcgggcattttattggggaccatgtgccaggtacttatgatgaagaatgttcttctggaattggagttttggctttaaatccttggtattgttcttttgaagatattaggatcgagaattttagagttaatctggttggaatgcaggtacgcacagaaaatgatggcgtttttccaaatgaaatcataccttatatttcaaacatacttcctgaaaaaattggtaatttttatggttgtgtgtttaaaaatctatatgtaagtactgcacgatattgttgtgctagactccatattgattggtgccaatggataggcggaactatttctaataacggcctctggggaagctctaaatcaggccaacaatgcgatttttatttaattgaaactggccatggctttcattgttctgcagcttatctcagtattcctgcatacaacccaccggacagagctccaaataaatctgttattgctacagcagcacgtggttcggtgtatactgcttgctacatggagaatacaccatcatttattacggttcttaataaatggtggacaaatggaaacgaaaagggatttggtctaaatatagattgcatcgcttcacagtatcggccagagaggaattataaatttctaaccttcgagaagaatgctttcgggtactacggtaaagataatacatggactccaccaacgggttatgcttcttatccttcaacaaatggtattgatttttttcgttttggtagcccttgtcatgatattggtgcctttaaacatggtgggtttgattttaaatatggtacctatggcatttcatacgaacttaatgatcaatttttaagccctcctgatgttgatacgattagaggcaatattgtatcaaaagagatgttttcaccttatggcctgattgtcagtaatggtattctaaactttcctcttcaattcccagtattacacagtaacatttgtatatggtttaaagacttaactaataattttgacctcaataatatatcattgtggcgacatggtaatcttgaacaaaaaaaaactaaaggcaatgctgaattgttcgtttcgattggtgaatgtgttatagattatggaaatggttataagatggccattcttcaaaatctaaaatggaataataatgatgaatttagtttagaaaacatttactcatcacttaaaataactgtgccagaagagactccaattatattaaaggcaatacaagcttactctggtggtgttccaatatttcctatgaatttgaattatattccagagtctgctgataattgcgtctggggtaatactcatcctagctccggtaaaaaacttgggctaatgcaaaatattggtggtgggattttttttattggcgatgtaattaatccgtggattggtgtgacaagccgacatgacttttattcgccaaaaatatcttggcagaaagatgctgtttttacgaacatgccacgaatagttgagagtggtagctgtataggaatgtttttttgtaaggtgtttactgttgttgttaacaatgtaaatgaagaactgaacctaacagaaattactgtttctgctaaagatttaccctatatttatgttggtgttccattgtgtatcacatcaacatcaacatcaacatcaacatcaacatcaacatgtgaagtgccaattttatcacgtattattgagaacggaatattaacaaatcggtacgttttggctggtattgtaggggaaaccggtgcattattagttgtcaatcaaagaatgctggctgcgagaaaatatgtgggtggttatgcattcggtagtattgagatcaatgaaggacaaatagatatagtgaaatcaaaagatagaggctcaaaacagggtctaaacttctatatgtctaacaatcggctgacaccgtcagcttctatgacggcttccgaggatagtattctgtttagtgctggcagtttttggttcaacaatagtatttgttttagcccagataagcattgtgacttcgcctcagcagattctccgatagagaatatatttgtaaggaatgcaatttcaactgttgctgataaaaatcatatacctattgttcgaaatattcccgataatatcctcgatatttgggggacaatttccgctaaagcttataaatatgattgggctattcgtcaaaaaggagatgatatcgcccgttggcatgtaggatggattgcgcaagatatagttgatgcatttgcaaaagctggagaaaatgctagtgaatgggcgctggttgtttataatgaatcaagttcaattaatgctcctttattaacttcacctgagtacccactacagaataaattaaaaggtacatcttcctccactaccgaacatgtttctttacaaacatcaggatggcgagtgatattagatgaatgtaatgctatggagttgttatatcaacgtcgtcaattgaaaagactttctaaattgctttcgatgctcgatgttaaataa

SEQ ID NO: 246333 - DNA, 2808 bp, Klebsiella pneumoniae
atgaaatacggtctacctgtcaattgtggtatagatgaagatgtgtccagcccattgttttacaaggaaaatgatgagttttgtctaactgatgttcaatatgaaagcttggacagaggagtaggtaaaggtaaaagtgttctcgttgtatcccccacttctactggaaaaactttggtaggcaccgtagccctaacacaagggattcaagagggtaaaaacgcagttttcttagtaactcacagagcattggcacgacaaaagtttgaagactttaaaaaacaattactaaaagattttttagataatgatccaagtgcattggttcttgcaacaggagatattattgaggatgctttcggaaacactgtcccttctcccttaaatgcaaaattaatggtggcgacgtatgagaaatatttaggtatactttcggcttctggtgttcctaaaagtatgaagtctacagtttttgtatgtgacgaaatacaattaattggtgatgaaaatagagggcagcaagttgaaatacttcttactttaataaagcgagctggctgggcccaattggttggtttgtcggcagtattagaacatcgtgatgcactcaagttgtcacaatggttagaaattgagttgatatatacaagtaccagagagaaacatttgacatatcaatgccatgctcataatggtgaagtttatagttgcagcacgaaatcacctgaggaaataacctcaattaaatcaaagcaaccaaccagcagtatagcaagaacaataaaaaattatcttgaaaaaaataaagaactaacgccaataatagttttttgtatgactaaaaaagagacatatacattggctcagtctcttgttagtgaatataaatcaccattgaatactcaaatggatttcgatttcgatggtgttcctgagacactggcaaataatatgctgaaagaatttgttcagtatagagttgcttgccatagtgcagatttgattgatgaagaaagagagataattgaaaggaaaatattagataaggagattgatgttgtctttgcaacctcgactctcgctgccggagtgaattttcctttaggtactgcattttttgcttcatggcaaaggtggaactcagatcttaggaagaatattcctattggtagctcagagtttcataatatggcaggaagagttgggaggatggggagtgaccattcagaaggtaatattatatatttttctaataataatgcagatctaacttcagcccttaaataccttaaattcagtgatatgccaccacttaaaagcagaatagaacctaagggttttaatcgtttaatattacagttagtcgcctctggtctttctaataatataatagatttaaaagatattgtttttaatactcttagcgggattgttgaacaagacacaaatctaaaaagctttaacacgtgggatggttgtcttgacacttccctcgatatgttgactgctgaagggcttttgatcaaaacagcagcaggagatttgcatgcaacctcttttggaaaggccgtttctttggctgggtttaacccagaatcaggcgtcaatcttctcaaatattttgccaaatatttttctatattttatgcatgtttttcttgtcctgaattcattagctatcaggggaaaagaccaacgcgatatttaccatatatgtttacaagagcggttctgttagatccttctaaattagatattcctctttatgaaaacatttggcaagctaacttgccatcgataaatgcggctaaattagcatttgagtggatagaaggggagcaactacgcaaacttgaagatactttcgaggctttaactgctggtatgctcaatgatctatataggaatttagcatggttacttaaaggtgtttctacaatagttatggcttgtgctgatactcgtatagcatctgatttgcggccaagttttctcaatgacgaagtagttaatgacctaagactgcttcctagattcattaatcgcttggcatttagagtcaacactgggctaactgacaaagcactatggttgactacactcaataaaatttatccggaaagagggtttaaacttaatcgtatagaaatgctaaatatttcttcgagcgaatattataaacctgaatatctttcacaaggtgaacaagaagctgaagaattccgattagagctattcaaaaatattaagccaacaccacataaaaaatctaattggttaagagatgcggccaaagtttggaaaataaatcaacggagtcttgcagcagaacgacatgtgcttaaatctaagaaaataggttttgaaaagcagttcaaaacctattatgacgcacgtggcattgagtatgaacaagcatttgaagtattgttaagtcttgcagagattaattatataaaacttgatgatgggaaaagaacaggtgcccctgactacttgttaagttttaccaattcaccagatatagtcgttgaactcaaaactaagctcggagaaaatcttgttgatttcaatggagctactgacgttcttagagcctctgagctatatggttacggtgataatttttgtgtcacgttgtgtcatcctggagttgatcccagtgtcttacctataattgagaaatgcggaagactttcgatagttgaaggtcacgacctgggggaagcacaattatggcaatggttaagtattccaggtgctgcttcggctgaagatttacctatgaaagaatatagttttaactga

SEQ ID NO: 246334 - DNA, 1200 bp, Klebsiella pneumoniae
atgaagggtatgcagaagatcaaaaggggtaagagcttcgctggtgtggttctctatgtgttaaagccaggctcacaccatagaaccgttccagaagtaattggtggcaacatgacaggggattgctcacaagagttaatcgacgaatttaaccttacgaaagagcttcgctcagatgtggcaaaacctgtttggcacaattcacttcgattaccccaaggagaatctcttaccaacgaacaatggaaacgaattgctgacgattacatgaagcgaatggggttcggtgatacacacctccgttgctatgttcttcatgatgatcaggctggtcagcacatacacattatcgccagcagaatcgacatagccggtgggaagctctacttgggtaggaacgaaaaccttataagcacacggatcattagtgaactcgaaatggctcacggtctgacagtaaccaaagtgaccaagacagcaccatccctctcaaataaacaaccgaagcggaaaagaatctctcgcaacgaacagatgctatcagaacggactgggcttccctgccccaagaaatcccttcagcagatacttgataaaagtttggcagatacacctgatcttttaacttttatcaagaggctggaagaagccgaagtcggctggacagcgaatgtcgcttctaccgggaaaatgaacgggttctcattctcataccgcgatatagcttttaaagcttcgcaattgggtaagggctactcttgggcaaatcttagtaacaggctcaactacaacccaggcgatctagaagctctgcgatccagcacaccggcaaaagaccaccctgctcctgctcctgctcctgctcctgctcctgctcctgctcctgctcctgctcctgctcctgctcctgcaacagtttcgaaaaacactgagagaaaggaaagtatcagtgaaaaaattgctgaactcgaactacgactcaaagaagacagaagaaacgaaatcgtagaaaagattcttcaaaaaaactcagtacaacagcaaaagcatctcaggtttatcggctggattccatttctcagaaggctcgcagagcttctcagaagctatgggaagagcattcttcacaaaacccatatgaccttctcaaatatctccgcaatgaaacctttaaacaaggcgagaaaaatccgtttatag

SEQ ID NO: 246335 - DNA, 375 bp, Klebsiella pneumoniae
atgttagataaaattaaagctattaaattgaacaagagtaattattgtaaaagggagttaattccctcaaatgaatcgccagttgactttgataacctttatcaaggggcaattcacttaacagagtttggttactgtgtgcataactatttggttcaaccttgttctaaaatcaatcagtttttggaatgtgacaatgaggcactggacatggaatcaattgatagaatgaagcttgaatctatccgagaaaaagtaacaaaactgaagagtataacgcagaccgcttgtgataatggtgattatggtgcagacaaatggctgcaacaccatgagaaaaatttggaaagaattaataaactattgaataattga

SEQ ID NO: 246336 - DNA, 180 bp, Klebsiella pneumoniae
atggcattccgactcaaggaatttttgcaacagatgaaagattacttgatgattacagcggtcctggcagtagtttgtggtcactacgtgcgctcaatattgccttttttagtggacataatattggtttgtgggatgctgaggagcaacttttacccgttgaaatcggtgactatataa

SEQ ID NO: 246337 - DNA, 576 bp, Klebsiella pneumoniae
atgcattatggcggtgatgctgaacttggaattttttcggttgcaagtcaattggcaactgcatggatgtttataacaacttcgataataacatcttattattcaaaaatttatgccgagagcaataaggataaagcagcactcatggttgctcgcttgcatggtctgatttttatgatctctgtatttgtaatttttaatatagttttatttggtaaatgggttgttcaccttttatatggagaggcatatgaaactgcctatcccataatgcttattctttgtgttaactctttattttccgcaatggtgcctattgtaaacaaatacattgtgtatgacagcgggtatgcttatctatcaaagaaaacagttgctgtagctgttgttactattccaattgcaatcttcttaaccaagttgcatggtgtggaaggggctgcttttagcacggtagttacagaatttctttcgttaacaatcttcaattacttctttaaatcggcggttgtgctaaaaatacaaatatcatccttaaaaccgtcaacttataaaatagtgagtaagtatgaataa

SEQ ID NO: 246338 - DNA, 420 bp, Klebsiella pneumoniae
atgacgacgaccatttattgcattgtcgcgctggtgggggatacgcagccggtgtggctgatcgactttgatattgttcatcaccatgtgggcgatgtctttgatatcagcgtcatcaaccccttcgtaataagctgggtaaaacgcaacgggctcgattttcagtgcgcttgccactttcatggctcgcacgttgatctggtcatagaatggcgtagggtgcggataaactacgctgtagaaattctcgcgtccaccggcagtaatcagcgcgccaataattttagcgaagtccgggcgctggaatacgctgccgatatccgaagtcagcaacagtatattgcctttagcgtaagtagccgccaactggtcgagcgccaggcgtggcacgaagtaaaactgctcgcgggtattggctaa

SEQ ID NO: 246339 - DNA, 258 bp, Klebsiella pneumoniae
atgttctgcgcggtgtatgcgctgcgccgtgccatcctccataacgacgtcgatccacccagcctgagcctgaacgatgaatttctcgcccatgctcttcatcttttccatatccttcttgccgatcgccttacgcacgccatcagcttcggccatggtaaagccagccagcagtcgcgtagcgttcatcgtctgctcctgatagagaatgacgccgtttgtttcagcagtcagctcgtcaagtaccgggtgaagtga

SEQ ID NO: 246340 - DNA, 177 bp, Klebsiella pneumoniae
atgtcctattgcatcaaaaaatttgcaatagtatttattctggttattttttataagtatctgtttttactcatttcaggtttgccctcgatgccgctgcaggacgctggccagctgctgccggcgacgcgaccggagccggacttgttcaaccttattgaagaatgtgctacgtaa

SEQ ID NO: 246341 - DNA, 1665 bp, Klebsiella pneumoniae
ttggcattagcctttgctatctcaacaattgtaaaatacaactcattactctctgataaatctttatatgcaattacaggaacacaagagaattacgcatgggcaactgcaaaattctcgattcagttagcagatttttacgctttagttagaagcaatgataaagaccttgatcaaatacgcttgaagttagatattttattctcgcgtgtttccgttattaaaaacgaaagtgaatcaaccattcctctctataaagaaaaggactataaagaaactatcgacaatatatataaaaaacttgaaaaagttgatcactatataaagcagccatccccagatatgagcaaggtagtttctctggttaatgatatagagccagattctaaattattagttaacattgcagatcacgcggaggttcgccagcgtacaaatgcaaatgtcgatttcaaagaaacaaaaaaacagatacttatacttttatatataacagggattttaacaataacattgggtatttttatttgtgtttttttatggaagttaaataaattgttggattcagagaaaaaagcatttaacaataaaaatgcttttttgggtattgttggtcatgagttacgaacgtcactacaagcgatcatatccacgattgatgccatttcgcaaaggtataacaaaaaccatgatgatccccaatttattagattagaaagtgctgttactaaaattgaaatgcaaatgaaagacctatctgaatttgcaaggatagataatggtaatatacaaataaatgcaacacagtttaatttaaaaaaaattattgatcttaccgttgacgattgcattagtgcattaaagaaagaaagcgtaaaaataatcacagataaaatccaagacattaacataataggtgactcatcgagaataatgcaaattgtcgagaaccttgttaccaatgctattaaatatactcaaaaaggtaatgtagatgttatagccgggttagattccaaaacaaatcttgtaataaaagttgaagatacaggacaaggaattccaaaagataagattaaatcaatatttagtccttttgagaggcttaaaggaaacgaaaatggtgttcctggctttgggatgggattagccattgttaatggtttggttaaggcaatgaaaggccaaattattgttaaaagtgaagttggcgagggaagttcatttatggtaaaaattcccgtatctttaggctccagctcacaagaattagaaaaaatagataattccatatatgagcctcattttaatcatcttagaatcttattagtcgatgataatgaaatgtcatgctcttcattagtttctatacttgaaagtgctgattataatgttgaattcacaaactcacctgttcgtgcattcgaaaaactgcaacgaaaaccttatgatcttgttcttagtgatctccaaatgccaataatgactggggatgagttatttcagaaaataaaatctatagaaagtccgaacaaagaaacgcctttcatttttattagtgcctatgcgaatgaaagccctataccatcaataaccatgctgactaaacctgtaagaatcagggatataaataaagcaataaatagtgtaatggaatcaacataa

SEQ ID NO: 246342 - DNA, 549 bp, Klebsiella pneumoniae
gtgaagatgaattcctcattaagctcattgaaaaagaatttgaggtttaccatgcataaatttaaatatttccttctgactgtgattttatcttttgcaaccctgtcaaatgctaacgcaaaagtaggtgatatttacattaatggaaagatagctactacaaatacaaaaaatggttacatccttaccagtaaaaaatttaacgaactacctaaaacaataataaaaacaacaacatcatggacagcaaaagatcatccagttaactttgaaggtgtaaaaataaaagatatattacatctggtaaatgccaaagggaacacactaagaatgcatgccttgaatgactactgggttgacattcctatttctgacgttgaagacttcaatataatacttgcaaataaaatggatggaaagccattagaagttagaaactttggaccatatttcgtaatttatccattagacagtaatccgactaaactcaactcacctatttatttatctcgttttatctggcaagtagacaaaatcacggtgctataa

SEQ ID NO: 246343 - DNA, 987 bp, Klebsiella pneumoniae
atgaataaacaacttttagagtttactggtagccttttacttgacagtaagtatattgtctcaccgtatggtatcagtaaaaaactacccaaaggagaaataacccctctaaattatgaggtaatacataacaattcaataagtaatattactataaattacactacagtgaaaaatcttactatagtgaatgggatgggcgtcaccctaggtgactcaatcattggcatatctgcattacacaacataaagaaaataaatccaggaataaaaataagggtaatcagaccagaaaattgtccgtcatatgttaatgagctataccacctagcaaaaagtgtaatagatgaaatttattacatgccatatgatatatctcatttaaaagattctgatgtaatcattgatatgggaaaccaggtgtattgggaagatttcaatcgcttagaaatgcatgatttcttccttaaaagccttggtcttaactacaacgatttttcaccagaggaaaagagtaaccgttggcttcaggagtgcattgttgaggaattagaccttggcgaatatgttctatattgccctaatgctagtacaaaaataagaagcattccggcaaagtttcatcacaaaacaatatcccagcttaccaaagaatacgggaaaaacgtatttggtttcattgatataaatcatgaaaactataccaacattgcagcaacatctaaaaatacagctgctttcatttcaataattaaaaattccaagtacatatatacctgtgactcttcagctttgcatattgccgcaggttttaatgtaccttcaacttgtatttttaccacagtaaaaccggaactgcgtagtatttactataaagactgccattccatttatataggaaacaatttaaccgaaggaattcataacagtgaagatgaattcctcattaagctcattgaaaaagaatttgaggtttaccatgcataa

SEQ ID NO: 246344 - DNA, 840 bp, Klebsiella pneumoniae
atggaagaagagactaagagcgataactggttaggtgaaatgctagctaaagcactcatcgtgaaggggataccaaagcagaagcatatcgcccacataggtagagttttagagttaacaacagcagccgcccataaaaaacttacaggttctacaaaatgggaagtatcgcagctggtaaaggtagtccattcaatcgggatggaaatgagcgagttttttgagctatatagcccatcgcacacagagactcacgaagcattatggagcgaaggtaatacaacgctaaaatgcaaaatctacctttcacctgaaacctccgacgaaaagacggagtattcagcagtgaaaatcaatgacgaatggtgcgtaattcacaccgatgatattcgagatgaatacttagttgaatctaagagaaacatagaaagcattgttatacaccccaggaaaatcgaaataggaaaaagtagcatagcaatcctagatgatgataaaaacattgttgatagtatcaaagaaattattaacgatggacgttttatagttgatggattctactctattgatgaactatcacatgcaattgataaatctgcttatgatgcttatattttggattgggtcgtaggagataaaacagtattcgatactattaagaaaatcagacaatctcagaaaagaaactctatgatcctagtactaacaggacaattagaaggaattattgatgaagaaatttcaatatctataaatgattacgatattgtcggcccatttgaaaagccgattaaaggaagcttaataaaatcaaatatcgataaatttttccctaagtag

SEQ ID NO: 246345 - DNA, 690 bp, Klebsiella pneumoniae
atgttatctgctgctacgttcgtttcgttagctatgcagtgtgctgtttctgttcacccggatacagcactggacgtagcgaaaacggaatcaggttttaatccatatgcaattgccgaaatcattcctaaagaggaaagaggtaaggatggtaaaagcgttattacgcatatgccaaagtctaagtcgaaagcgattgacataattaatagtattgagcagaaaaaacgacgctattcagtcggcttaatgcaaataaccagcaccaactttagtctatttaatgttacagctgaagatatgcttgatccatgttctaaccttaaggtgttcgaaaaaataatttcggactgctataagggtgggggggatctacgaagtgctcttagctgttattactcaggagattatcaacgggggaaacggaaggagtcagagtttaataatacgagctatatacagcgaatcggttatacaaccgcttccaaccagtatgtcgtacctagtactaaagaagacagaaatgccgcaaaggagaacgctcagcctcaatacacagcaccacctacttacgaatcatgggatgttttacgcgaattcccgcgcacatctaacccgaaagttcaacaaagtaaaccttcaccagataataaggaactcattgatgaaagctctaaaaacccagcttaa

SEQ ID NO: 246346 - DNA, 363 bp, Klebsiella pneumoniae
atgaaagctctaaaaacccagcttaatattctgaccaataaacttgcagaaccagcggtatattacgccttcatgttcgctatgttttcgatgttgtctccagtttcggcggaagcggcctggtatgatcccatcgtaacctttgcgaaagactttaaaacgatgattattatcgttggggggatcgcagctgtcgcttcgatggtatatatcggcgtgtgctggattatctcgcgtatgtccggcgatatgaaagtcactgcaatggactacttcaaccatgccgcagtaattggagccgttggtggtggtgttgctcttgctacctgggcttattcagtatggggagggagcgtgtcttga

SEQ ID NO: 246347 - DNA, 2511 bp, Klebsiella pneumoniae
atgagcggcgagcaatcaaaaaacgtattctcaccggagagtaaaaaggtgccctggttagggcaccatgtacatcctaatgtatgtacattaggagcttcacatttacttgcattacttcgttttaagggggtgccgcacgaaacacgtaataaagaaacgctaaatcgtgagtttaaaagactggatcgttgtatcaaggcattagggaagcaagagggtaagaatttgatgcttcaaacgtacacatttaaaacaggtgtgcgtcttgaaacacaatataaaatggaaatacctatcttacaggattttgttgatgattatactgcaccgttcaggaacggagcatatcaacaagtaggctatggtatgggtattattctcaagcacagtgatcttgaagatggtattgccagtatggtggaattattatccatatgtcaggaaatgctcagtgattacagtgttgcggtcatggggatggaagagcgtaatggtcagctgtatagccaaataggacgcttctattcctttatttttaacggcgttgatcaagatgtaccagttacagataccagactcggtgacgcagttattaatggggaaacaggatttggtgcttacgattatgtagaatgtcgcccatacaatagtgcacctagatttgctactacatatgatctgcgcgattacccggatgaaagtgaaccgggaatgtgggatgaagttcttgaggaacaatacgattttacattagtacaaacgttccatttcgaagaccggaacaaaatcaaaacaaagattaatgcgcaaaaggtggatttagcatcgactgaaggcgaatcttcacagacagaagaactggaagatgatgttcaagccgttactcaaggaaagagacttttcgggcattatcattcgagcttgatcgtttatggcgaaacaccggaaaaggcggttaataatggtgccagaatgcaggcattatttttagctctcaatacaggatttgttcgctcaacaagcactaatatagattcgtggcttacgctttttcctgcgtataccgatgttatttaccgataccctaaatcgactgaaaatcttgcatgtgggttttctttgcatgcaaccccaacgggtaaggcgacggggaatcctccgggtgatggaactgctttgatgcctcttaagaccgttcagggcggacttttcttcctgaatgcccatgacagccctccagggcaaaataacacaggtcaggcattccctgggcacatggtgaaccacgctatgacgggggctggtaaaacattgtcagcagccctaaaaatgatattttttagtcgatggaatccgatgatttttggcattgactataacaactcaatggagaatgttcaccgggcactgaacgttaaatattattctattgagccgggtgtttatactggtattcagttattccaactcccggattcaaatgaactgaggcaggttttatttgataccgtcaaacaatgtgctggcggagctgaccctaatgaagaaacaatcattaattcagctattgatgctgttatgaagcataaagttcatgaggagagacgtttctcccttcttatccaatcaatccctgatactggaggaaatggactccgggcaagattatcaaaatggtgtactgtaaacggcaaaaaagggcaatatgcatgggtgctcgattccccacgaaaccttttttatcctgaaaaatatcgtcgtttggcttttgattgcacacatattcttacgaaaagttatgttgccaatcaccctttagtagttgaggttatgcttaatactttttatttccttaaaagtagaatgcatgctaaagaacctggttgtctgatgattaatcagatctcggagtattgggtacagttagcttttgaaagtacagcagcaaaaattgaagagattttacttgctggtcgtatgcgcggggagttgttgttattagacactcaaactcctgaacatgccctaaatacccctacagctcctgcaatgattcaacaaatcgttacacaggaatggatggcaaatgataaggctgacctcgaaagctacggtaaatttggtgttacagaaagagagtttgaaaaaatatctgagctaacgccatattgccgccagatgatggttaaacaaggttctggcgctgttatggtttcattagcgttaagtggtcgtctcgaatattacattccactactatctgcgacgaaaaaaaatctacccgttgccaagcgagtgcgggaacaattaggtactgatgatcctgctatatgggttcctcacttccttgatgagatggtcgcttttcaagtacgcgaagatcttaaaactgatgatgcgaaggtgtggtatccagcgttccttgcaaagatgaaggagtacgggagaggtgtcgtctcatcactagttccccatccaaacgaaactgaatcagagagtacaatatga

SEQ ID NO: 246348 - DNA, 669 bp, Klebsiella pneumoniae
atgaaattgaaaacgttaatggcggttagccttgctatggcgatcagtttgcccgtatatgcttccggtattcctacagttgatgtggcgagcatcactcaacttgtggtgaatgcacagcaacaagctaaggaggcgctagcgcagctggataaggcgaaggaagccatatctcaggcaaaaagccaatatgaccattataaaagcatcatgcagggcaatgataaattgggggattttttgaatgacccattactcaatgaactgctaccggttagtgactggcaggacatttacagccaagctaaagatctccctaatttgcgcactcgctacggcctaaccagtagcgacccgaagattcaggccgcttttgataagcttctgtctcaggctgatacgcttgaaaagcagtatgacgcttcaaataagcgtatcaaaacggctgaggggttgcgtagccgcctgaactcggtggagacacctaaagatagggagcagttagggcttcgttaccagcaggaaatgcttgagctacaaaatcaacaagcgcagcttcaaaatacgcgttatttgatggagcagcagaacaagattgatgatgcaaaacgcgcccaggcgtttgaagactacatgcttggtaaaagtaaacagcggcctagctactag

SEQ ID NO: 246349 - DNA, 933 bp, Klebsiella pneumoniae
atggacgtacaggttgcacaaactctgttcgatgccatcgataatgcagcaaaaacacaaatgaataatgtcacggctgttatggctgtgatgggggtcgtttttggtgcattttggatgatatacatcttactacgttcgttggagtggtatttccaggggttaactcaagtcatacaagatgttttactgacgatatttaaagcatcgtgtattttgtttatggcttttagcgtttcttggtatgtcagtacgattgttccaacggtgacgcaattcccggtttggttggggaatacaatggcgggcgtgagtggtgataaaacaaatttggttgatgggctaataagctcgttctttgatgctgttgttaatacaatcgatgctatgaaatttgaaccaataagtaatttcaaagctacggtgttaggtatactcgccttagttttattgcttgtcggtggaatcccttttcttttggtcgcagtaggaacgttaattacgttaaaggcagcgtcaatgctattgttggtagttgggccgatatttatcgcattgtccttattccctgcaactcggcaatatttttggggatgggttggtgtgctgggtggattcactttagctcaggctctttttgctgtcgtaatcggattggaaatgtcattcattaatgcaaatgtggttaaaggtggcgaaatagaaaccgatttaatgagttgccttagtatcctgttatattttggtgcatttaccttacttgctacagagattccaaactatgccgcatctgttatgggtggatctccaagcgggggggtaactggtgtcggcggacttcttagcaaaggtacagggttaggggcagcgagtcgaatggggggtagagctgcgcggtatttaatgaaacgaaggggaaaccgaatttcctag

SEQ ID NO: 246350 - DNA, 804 bp, Klebsiella pneumoniae
atgtttaagaaaaaaataaaagaagctgtagaacaggaaaaacatttgcactataacgatggccctcttcaagggaagcaaaaagaagtggggcaacagattatggcctacacacaggcggccaaatggtttgaagatcgtgttgcagaggattatcgtaaaaaggcaaagagttcacgtagactatctattttcttcggtctattagcttttatgtctattctggcagtgatgatgttaaccccgttgaaaaccgttgttcctatgattcttcgggtagacaaaagcagtggttatgtagatatagtaaaaccatctgatggtacggagaaaccagaggttgttgaggataagcattttattcatcaatatatccttgctcgtgagtcatataactggtcgtcacagcgcgcaaattatcgctttgtccaattgacatcaagtcccgatgtattcgagcaatacaaaaactttcagttatccagcaaaggttatgtagcaagattggggcagtcacaacaaattcaatccattgttgaatctattgttcttttgccgagtagcaatgaaaggaagttggaaagtgatacggggattaaaacctatcaggtgcgattaactgaatctcgccttctacctgatggtaaaccagtgccgcagacagtccctgttagctctattattttgatctctattgataataaaaatccggcaatcacagagggcgatcagtggcttaatcctctcggttatggtgttaaaggttatagcaaaacaatggctattgtagggagtggctcatga

SEQ ID NO: 246351 - DNA, 825 bp, Klebsiella pneumoniae
atgaaatgcttagtaactgcgttatcgttctgtgttgccgtgtcattcctgccagcggcaaaggctgaggtgtcagggcgtggaaacagctatgattcccgtattcagactgcgttatatagccctgacaatgtattccgtatatatgcaatgaaaaatcgttcaacagctatccagttggagcctggtgaaacaattaacctcgatgatgggattctgaatgtgggtaagcctggagttcaggaatcgcctgaatggatggttggggcaaatcagaatggaagcatgatcattctgaagccaagcatgtatgctgaagagcctgaaaccaatatgattgttaaaaccaatcgtagaacatatatctttgagctgaagcttgcaaaaagtgtctcaaatatgacctatatgttccgcttccgttacccacagccccccaaaattggagaaactccatttaaagggcgtagtattaatcaaaacccttgctccggtacgattaatcggaattaccagaagaaaggggatatggtgctttctccatatgaaatttgggataatggaacatttacgtgtatgcgattccccacaaacgcaccacggccagtagcatatgaggtgcttcctgatggaactgaaactatggtttcatctcatcaggttaatgatattttagttcttcatgccgtcagcaaagagtttcgtctacgcctgaatgaattggttttagggttgcggactaaagccaataatactggctggtataactataatggtactactactggtgaaatccgggaggttaaaaattatggaaaacaataa

SEQ ID NO: 246352 - DNA, 1296 bp, Klebsiella pneumoniae
atggaaaacaataatcaaacttcaccagagcaggaaattaatgagttcaaaggtcaaggggatttttctttaaaacctgctggaaggaaaaaggatttcgataagcgcatcattgctgttatcggtggcggtgtttttattgtcattatagccagtgttctaattggctatatggcaatcaaaagtatgggggatgcagaaacaaaggtggatgaatccaaagttacggaatcaccacttttacagtcagctggaatcaaggatgattctatggatgaattaatgagcaaatctacagcttctccttctccttctgtatccttggataatgctccctctccagaggccgtttcgcaaacacagacagaagttaagaaggagacagtgcaaaaaaatgaagcgtccagtaccgaaacccagcaaccacagcggttagcggaatcattattcactcctattacacgcttcgagtcgtccgggttgagtggtgggtctggaagcagctccggttcgtctgggggaacttatggaggaactccccagggaactggcgatgatgaacagcgcctacgcgattttgcaaacgccgatcctgctgaacaggtacagaaaatcctgaatggtggcggagggactattctggaaagaggtaatgggggcagtggcggtagcggtttgttggataacttaaacggtagtagttatccggcgacgaaagcgagactcgctcctaatccaaaatatctgttgaaacgccgaatgaactttcagtgtgcattatatacagccattagaactgattatccggggcttgtaggatgcaatttattacgccccctttattcagctgatgggagtgtcattttagctgaagctggcgctcaactaattggagagcagcgcgtcgaggttaaatctggtcaaagcagcgttgcaacagtctggacagagttagacacgtcgccaggtgttcgtgcttcattaaatggattgggggttgatcctatggggcggagcgggacagatgccgaaatggataaccactatggtaagcggtttggcggtgcagtaatgctgtcgcttgtacaagatgttttttcatctatcagtaatgcgacgcaaaataataatggtatgactatgaataattctacgcaaaatgcggaggatatggcgagtaaggcgcttgaaaatagcattaacattcctcctacagcctatgtcaagccgggcactgtaattaacgtaattgttaatcaggatattgacttctccagcgtatttacaacacgctag

SEQ ID NO: 246353 - DNA, 201 bp, Klebsiella pneumoniae
atgtttatcactacacgacaagctgcattgttattacaggtgaatgaaggtgagttaatatatgaattggaacgaacgggactatttaaggggtgtcaaataaatatgtttgataaccgtaaaggcagaactagaaagttttcttatgaggatgttatggcagttaaaaggaaattgcattctgataaggaagtcaaataa

SEQ ID NO: 246354 - DNA, 1077 bp, Klebsiella pneumoniae
atgacagatgaatcatataccattgactcaatgactgaatacttgggcgatgatgttctggcaagagggtatctagaacaatctggtgtgactgaacggctggctcgaccaggcgtaacagaggtggctatcaaccgtccatttgagatatggactgaatcatcaaaggaaggatgggtacgtgaagaagcaccttggctagactttgatttgtgcagccatttagccaatgcgttagctgtatataacaaccgcgagcttcatgttaaatcgccaattaaaacagttgaattgccaactggcgaacgtgctcaattggttattcctcccgcatgtgaacgcggtacagtttcaatgactttccgtaaaccatcgcttcagcgctttactttagaagattatgctaatagtgggcgttttgataaaacaaataaagaacaacacaatcagacagaactatttgaatggcaacttgagcttaagcgatatgtaaaacaaagagactatgtgaagtttttcaaactagctgtagctaaaaaacttaacattataatttttggtggcactggttcgggtaagacaacttttgcaaaatcagttgttgatatatatccccataactgccgtttgttaacaattgaggagttgaatgagatgaaattaccttatcatctcaatcatgttcatcttctttatggcgattatgtaactccaaaagatttagtttcttgctgtatgcgtatgaaaggggatcacattttgcttgcggagctaacaggcgatgaagcatgggattttatggaattacttaataccgggcacccaggaactataactacagcgcatgctaacggtagcctcgaaggttatgcacgtatagctggcttaattaagcaatcggctgtgggagctggcctcgactacgactacattgatagacgtgtcagaacttcatttgatgctgttttatacatggagcatacggaaattctggatgtaacctatcagccagaaacgaaacttgcgcttctaaatggcgcttcaatgaaagaagcgttatccatgtatgaggattga

SEQ ID NO: 246355 - DNA, 1611 bp, Klebsiella pneumoniae
atgataatgaaaccaaaactcccaaaaggctgggaaataagggatggaaaggcattacaaaagcgaatagaaaaatatccagctatattgatgggtaaagatccctacagtaataactttctcgcgacatatggacaaacttacctcatgctcgcagctccgccgggtagcggtaagggggttggtattgttgttcctaatttattgcagtacccacattcggttgtagtgaatgactgtaaatttgaaaattttcatttgactgctggatttcgtcgtgcgtgtggtcaaaaggtaaaaaggttctccccggaacttctggaaacgcaccactggaaccctttgcgggttatcaatcaagatccattgtacaggctaggtgaggttcgtaccttagcatcatcactatatgtgcctgacaatatgaaaaatgccagttggttttccaaggctgctgacgtttttatagcgatatgtctgtaccttatagaaacaccagaattaccattctcattacctcaatgctatgaaattgcatctcagggaactcaattaggcagttgggcgcaacgagttattgatgagcgcggaaactcggataacccgctgagtgatgaaacagtacgtgagttaggagtcattgtctcagagtctaaaggtagagagttctcaacattaatgtcctttgtaacaggccgcttaagcctatatggtgagaagcttgtagctttagcattaactgaaagtgatgatgatgacgagaatatagacttcagtaaattgcgagaggaaccaacaagtatttatttttgtgtgactgaagggtcgttaaaaaaattcggtccattgatgaacctgtttttctctcaggctattcgagaaaatagcaaggtattaccggagcaaggaggatactgtgaggatggttcccttagacttaaatatcaagtcctttatgtaatggatgaatttgctgtgatggggaggatttcagtaatggaaacagccccagctttaacaaggggagccggattacgctacttaattatttttcagaataaaaatcaagtttgctctgatgaatgctatgggagtgagggcggtcaggctgtaatgaaaccattccatgtcgaagttgtatatgcaccgggcgatattaaagtttctgaggaatatagtaaacgcctgggtacaaaaacggttcgagtaccatcagataaccatggtgtatctgatggacagcggcgttcaaggggtaggacatttacattacaacccagaccactaatgttaccgcaggaagtagatgagttgccatatggagaagaattgattttcatgcagccatctaaaaagactcccgcaatgaaaataagagctaaaaaaatcttctggtatgaagatgaagtattgaaatcacgtgttgatgacaggaggtatccattacctgcaattccaaaaggagatgctgataaagctaagacacttgttgttccaatgggacaatctactaaatctgtttcaatggctagccctcatggtgacgctatgagagaagaaagtaatcgccgccgagtagatgtgtcaggtgttatcaaaacatcagattaa

SEQ ID NO: 246356 - DNA, 525 bp, Klebsiella pneumoniae
atgaattttcgccacatggtgatgcttatcatcgtctgtattttaggaggggtatctcagcctgttctggctggcccatcccaaaatgaatgtgctatttggttatgtatgcccgcaggttttccaggtagcgattgtaaatctcctcacaaggcaatgatcaaacgtattaaaaagggtaaatcgccacttccatcattatcaagttgcatggtcgatggttctgcatcagtgccgggattacctgattctggtagtcagaatattaaaacaaacgaaggtagagcggcatattattacaatcgatatcaatgcaatcgggaaaatcatgatgggcgctgcattggttataaaaaactaccgaataaaattgtgatggacaattggtgtaaaaaagaaccacaaaaagatgcatataaatcagattgtaaaacaatccgatatatggaggctgttattgatggtaagtcgtatggaacaccacttttttatgatgataacgggaatacatacgagttgaattaa

SEQ ID NO: 246357 - DNA, 489 bp, Klebsiella pneumoniae
atgaagttaaattatattgtcattttcactctacttttctcctgttcatcatttgctaataatttagtgggtaaggtcactcgtgttattgatggcgacaccatagaagttaaaacactacccgaaaaaattcttgtgtatgaaattcctatacgagtccgattgataaatatagatgcaccggaaaaaaaacaaccctttgggcgctggtcaaccaatcaacttaaagccctgctggcagggcaatcagttaccgtctcttatacgcaaacagatcgctacgggcgagtcctgggacgagttgtgacagcgaacggtactgaggctaaccgccagcaagtgctaaaaggggctgcatgggtttatgacaagtacaacacggataactcattaccggctctgcaacaggaagcaaaagagcacaagagcggcctgtgggctgacagtaatcctatgccgccgtgggaatggcggcataaacataactga

SEQ ID NO: 246358 - DNA, 591 bp, Klebsiella pneumoniae
atgattctacatattgtcccacaactgtttcacctgatggctaataaatgccatcttgaatcaatcgtcattcctgaactggatttcaaaattgaagtgaatgcactgtcaacgggcagaccacacccgaataaaaatatctgggttgggatgaggaaaggccgaaaggctaccaacggacttttactgaaaacagataaacacctcaaatggtttaccgctgactaccaatggcatatagagaatatggggctgattactcatcgtgtgacaacctatattgaagataatgagtttgacatgatttcacaggatatcatgttaaatggtggttttgagcaatgggagaacagacggcattcagcttatgatgaaatttctcctgcaaaaaatcagcctcgaatggaatcttttttatcgaatcccggtaaacgagattcacatgatacatggcgggtatttgattggggggattttctcgaactcagagaagaaagtttactcctgcataccattcagtccgagcgactgaatacagattttcctttgttcaaccgactaccctcacaggaacaagccattattatctga

SEQ ID NO: 246359 - DNA, 396 bp, Klebsiella pneumoniae
atggatttcagtaaatttgatttcaatcatgattgttatgttgacttacatgttggtgattacggctcattgtctggcttgttttttacaggtaaatccgacctggctattcttgaaaagctttttaccgattctcacgactggcaaaactcttttcagcgtgaaggtagacagtatgtgatggggtttgttgatcctggtaatgtgcaattcattgcgtttatgcagcatgcatttacaaaagaaaaagaacacgacgaaagattttatcgtgagaatggttattacgaacagtcgcatgacttctttaatatatggtttgataacgatgttagcgatgtgcaaatcagttttccgcttttaaaggtagtagataaagcgtcagaattaatttaa

SEQ ID NO: 246360 - DNA, 330 bp, Klebsiella pneumoniae
atgtcttctctgcaatttgctaacggttccgtttctgtgggggatattttcgcttcctcctggggatatgagcagacaaacgttagtttttaccaagtggttagcattcatgggaaagctacggtttgtgttcgcccagtggattctgaagtaacatatattaacatgcaggggtatgttatacctaagccaaatatttttgtgggcgaagagattataaaaagaagaattaaagattatgcttcccgcccattaattgtaattgaagagtacgagcgggcttataaaactgatccaacagaaaaacatgagttttcatcttatagctga

SEQ ID NO: 246361 - DNA, 216 bp, Klebsiella pneumoniae
atgtctgttaattctttcgtcccaactattgaaattaaatatcatcgccgccgctggcgtattatggttgggtgttcttgcctaggctcatttcgttctgaagaggctgcacaagagagcctagagaaaaacagagcattttatgaatactggtcagggtctgcctcggttcaggcagaaaacaccgctccagtggtcgtggaggttaaatattag

SEQ ID NO: 246362 - DNA, 525 bp, Klebsiella pneumoniae
atgaatatccaggaagcattaaatgtatttggtttatccggtgaattaaccaaagaagaaattaaaaaagcctacaaaaaagcctcgctgaaacatcacccggatcggaacaaagataatccgatagctgctgaaatcatgaaagcaattaatgcggcatttgattttttgatggctaatttcgaaaaggttaatcaataccagtcaactgatgataatgcacgttatgactacggtgaggagctggaacgagtattaacagaattaaataaccttccagatattatttttgaggttattggtaactgggtttggatctctggcgataccaagacgcataaagaagccttaaaagcgttagggtgtaaatgggcgtcgcagaaaaagcagtggttttatcgcccggaagaacataaatccatccgcaaccgtaaagagcattcaatggatgaaatccgtgaaatgtatggcacttatggccagcgtaaagctgatgggcgcaaatccgtagagcgccgcgcctga

SEQ ID NO: 246363 - DNA, 564 bp, Klebsiella pneumoniae
atggaaaaaaccttttttgcccgttatgaagctgtttttaaccgggtttgtgcgttcctgggcgatggctggaagatagacagacgtacagaagatgcataccggataaacttggtaaatccggccttacggcattactccatcggtgcacgtcttgaaaaagaccgaattcatttgattggcggtgttcggtctgtgcgtagttctggcggttactccgcttgtacggtgtcccccatgcgcgaaccttggggaattgctcaggatatccgccgtaaaattttgcctgatgctgaaaagcaaatcgcgtatttcgaagctgaccgcgctggggcgcaaaaagttaaggatgagcggcagattttaatcaatctggtcggccagctggtcgaggtgcaaaactatggtggttactatgatgtgctgtgccatatcaaaacccccggagggattacaggggatgtgtgtgagatgtacggtgaagcatatcggcttaagctgagcgatctcagcaaagaccagttaatcaaagtgattggatttttatcaacactggagcgttga

SEQ ID NO: 246364 - DNA, 297 bp, Klebsiella pneumoniae
atgaaagatctgttttttgtgaggcgtcggggcgatacgtcccggattactcagtcgctggctgtgcaaagtgacggtatcaagtaccggcttcaatatctggtgcttgatcggacgaacccgacgaaagcagaacgagcatctggggcaaaagaggagcgtatcgaggtacttaatcaggaatttttccttaatgttggcgactttatccgggtaagcgactttccgttaccaaaacttacacgagaatttattcgttttctaaaggagtctcaggaacatggatctgaaagctga

SEQ ID NO: 246365 - DNA, 504 bp, Klebsiella pneumoniae
atggatctgaaagctgattacagaggcgaacttgcgcagcgtgcgcgggtgtttctgaactacacacaaaaagaaatggctgctttgttcgggctatcccttcgatcctggcaggataaagaacagaatactaatcgcgtatcggtcagtgaaacatatatgcttttactgctactgaatgagcatcctgactatcaattgctgcctcgcatcgatgatgttaagacccctgctcagcatgcagcaaaaattgccgttgagctggcgcaatgcctgactgagcgcgtaccacttccaacaaaagtagtagagctggaaaatgctctgaatgcggcaatcctggcgtttcgggaggattttgtagccgatatggataacggacaaggtgacttatctccgctggctgtgttgtctaaagaacttgaagaggccagaaatcaaatcatttctctggagtcagataacagcaaactgcggactgaactgtctaaaaaagctggttaa

SEQ ID NO: 246366 - DNA, 189 bp, Klebsiella pneumoniae
atgaattcctttgaataccttcgcctctctcgtttcgatgttgtatttcttgccaaaaattgcaataacgaaactatccagtgtcatttccatacaaatgctcttaatgagtgtgatgccgcttttatatttggtcagcataaccagaacaatgattatgcaatacttcgggttgagcaactcaattaa

SEQ ID NO: 246367 - DNA, 174 bp, Klebsiella pneumoniae
atggaattaacagcgcttgcctcgttgaaacgtaatgttaagttttggactgaacaatgtggttgtaatgaaaagcaaatcattgcaaatattaaaggttggtataatttcgcttattcaccaagcgaacaagagaaagcaaaggaggaaattctaaaaggttttatgaaataa

SEQ ID NO: 246368 - DNA, 246 bp, Klebsiella pneumoniae
atgagaacgaatgtagccgagaaaaaacgtagtacaaacgtgtacttaaatgctggcctacttgaagaggcgaaagagctggacttgaacgtttccgcgatatctaaccaggcgctggaaacggctgtcagagaacgcaagcgtgaacgttggatcgaggaaaaccgcgcgggcatcgaggcgttaaacagcttcgtggaagaggtgggtattttttcagatgatgaaaatttcggggtgatttag

SEQ ID NO: 246369 - DNA, 240 bp, Klebsiella pneumoniae
atgcttgcacaccttaatactcgcctagttatgcctttaacgcagaaatctaactctaattcgcaggtaaaagcgttaacgccaattattacaatcgatcagatcgattatgtagtgctggcaaccatgataacgacaacggatgtaaaaaatctgaaagctgaagatgcagttatggatgcttcacatttacgcgatcaattggtttctgcgattgatatgatgattttaggtatttaa

SEQ ID NO: 246370 - DNA, 249 bp, Klebsiella pneumoniae
atgaaaatactctcaattattttttgcgtcgcgcctgtggcttgttttgcttcaaacaagaatgttgaccatgtttttataaacgcttttcaggccgctattgcaacatcattatgtacagatgtagctacagcaaccaatgatagccacttttctaaagacttcaaaactctcatacaactgtgcaaagagcaaggtgatcagcgtcgggctattcttgatgcttatactaacgcagaacatatttga

SEQ ID NO: 246371 - DNA, 198 bp, Klebsiella pneumoniae
atgaatgctgatgaaaaagtgagtttaacactggaattagacacagaagtagcctgggcgctggcgcagttctgcaagcgtacatctcattcggattgtgctgaacgctccacctcagaaaatgaggcatatctgatgatggatggtgtgaatgctgtcatgcgcgggctggctgagtccgggattaatccccgataa

SEQ ID NO: 246372 - DNA, 126 bp, Klebsiella pneumoniae
atgatggattttaacgataaagagttgggctgggtgcttgcgctggggagtgtttgtgttgttctgtgtgtgctgttagggctggtcatgctcgcacaacagctatttcccggagtcttcgggtga

SEQ ID NO: 246373 - DNA, 459 bp, Klebsiella pneumoniae
atgagcgtcatgtttaaaatgaaaaacccaatatttaacgcacatgatctgtatgtcatggtgcgcctgagcatgattaaatattttccctatgaggccaccaatattaaaccgtgggaagtcctgactatttatctgcaaaaagcgcaggggctggattttgaaattgataacgagccggacgtaagggggctgacgttccgggggaaaagctacgatatgtataaagatttggagaaagaagaagaggggccgtttcactcggcggcctggtatgcctcgcaggtggcaaaatggaatcagcaggatttaggtgagctggacgttgatctgaatctgatgcgaagctggctgaaactgaatgattacgtaaaagaaaatctgccaacggataaatttttacagcaggaatttttgataattgccgatgtggcagcggagagaaaaaatagccgttaa

SEQ ID NO: 246374 - DNA, 765 bp, Klebsiella pneumoniae
ttgagcactcatcccgccgaactgagccagatttcacacagcgcgatcagccgcatcgccacccccaggattgattttgcgctggcgctcgcggttcgccagctggcgaaccgtcaggccgacaaaccaaagtacctgctggagccggaaataaccgttctgctcgcccagggctttagcgatctgcgtaaacgaatgttctttgatgtgctatggaataccggcgctcgactgagtgaagcgctggccgtcaccccggacaatattcacaccggggagcgctggccgtcgcgcccgttcgtctccctgatgaccctcaagcaacagggtaaacccggacggccaccgaaggacagttaccgcgacgtgccgctgtttgatgaaggttttacgctgcggcttcgcgatcacctggacacgttctgtaaattcaggactaagcgcgtctggcaggtcacggacgatacgatccgtaactggctgagtgacgcggtcacgcgctgtgaaagtgagggaatacgtttttctgtccccgtcactccgcacacgttccggcacagctacgcgatgcacctgctttactgcggtatcgagccgctgacactgaagaaactgctcggccaccggagttttaaaagtacgcaggtgtacctcgatgtgctggcactggaggccgatgttgccgggcgctatgctgtccgtttcggcatggacagggaagaagccgccgccctgctttataatgcgaaaaatattggtgtgtaa

SEQ ID NO: 246375 - DNA, 666 bp, Klebsiella pneumoniae
atgatcattctcgttggaagccataagggcggtgtaggaaaatccactatctacatccatatactgatgtgcctgattcttcgcagtggtaagcgcgttgctgcactggagtgtgatgatcagcatagtgtaaaagactggcttgaagaccgcagggcgcaaggaatacaaccggatgtggattactacgagtgttaccatgatatcccggcgatggctcggaagcttgataaaaaatatgacattgtactgctcgatgcaccagggcgtagatcgccggagttcagtaaatgccttgcggtggctgatctgtttatctctctggttaacccttcagctcagattgaaatcaacacgctcggcctgatggttgccgatgtgttccagtatcaggcatcggtcaacaaaggtctgaaagcggtactggttatgaacaagtgcgatactcatccgtcagatattgatgcttctagtttccgtaaagatatcgaggccgatcaggagaactggattcccgttgcccggcagcgtctttatcaacgtaaatcctattaccgttcctacaatgaagggttatctgtacatgagttcaatgaccgcaaagggaaccaggcgcggggggaaattgagatgttactgagagagcttgaattgctggccgcttaa

SEQ ID NO: 246376 - DNA, 321 bp, Klebsiella pneumoniae
atgagtaaacgcaccacaaaactgaaaatcagccccgcgctacaaaatatcgacggaaataaaacgctgcgggagctggttagtgaaaccagccaccgcccgacatcgggcagcgtgatcactagggtgaattttccgttactggaagaggatattgcaaagtttgaccagtacagtgaggaaaatcatgcgatgcgtgtcagtgtgctccgggcaggattacgggcgctggaaatgctgggagaggaacaacggtctgatcttatccgggaagccgagtttaaccgacctaagaccgggcgtaaaccagttaaaaaataa

SEQ ID NO: 246377 - DNA, 480 bp, Klebsiella pneumoniae
atggctaaatcattgtctgaagaattaaaagacctgaaaattcaggcattacttgaagactatgtgaaccttgaagaaaaaatcaaggaaatccctgatattttgagtgaacatcttcaggaagttagaaaagcaatcaaagatatgccaggtgaactggaagttggtattgaaaaactcgctgctgcggtagaagaggctgaatcgagttataaatacattgcggaaaaacatagggctgtgttaaataatcaacttgacgaagccaagcttgaattaaggcagcatatcagcgcggcaatatctgataatatcaatgatgttaatagcaaattaaaccagctatctaataaggtagaaaacataaaagggaacagtacatttatcagtcaaaagagcttaatcgcaatgatcctcatgtctgggattacatttctttccctaattgtctgcatagtgcagataatgactcgaatttaa

SEQ ID NO: 246378 - DNA, 702 bp, Klebsiella pneumoniae
atgtacctgaaaattgcagttctcaataatagcgggaatgttggtaaatctactatctgccaaactgttcttaaacctcggcttccagaatctgagatcatcagagtagagaccatcaatagtgatggcacaaatgatgagagattatcagcaaaagattatgatgaaataattaaacgaattgatgatgtagattgtacaatcattgatgtaggctcatctaatattgaacaatttatggttcagatgcaagaatatcaaggaagtcatgatttgattgattacttcattgttcctgttaccgttcaagacaaacaacaaagagattctattgcaacaataaacaacctgttagatatgggggtagaagaagatagaattaaagtaatttacaactttgctgataaggacacatctattgaaaaacaatactccatattcttatcagataagaccagcaaaaaaatagcgggaaaaaaccctgctgtcgtttataacagtaatatatttaatctcttaacgaaatctggcttaaaatacgatgatgtttatagcgatgatcgcgatttccgtagcttaatccgagcagctgcgtcgaaggaagaaagacaggagctatctaatctgcgagcagtcaaaatgttgatgaatggattcaattcagatcttgatatcgcatttgataatttaaagttggcataa

SEQ ID NO: 246379 - DNA, 489 bp, Klebsiella pneumoniae
atgatagagttcagccaatctaacaatgaggctttgatcatgtcagactggcgaaacaaccctagaacggggaaaagcacattcatgccgctgctgaatgatatcgatgcgcggttaaagctgggcgaaacactcaagcaaatatacgagtctttcaaagacagtaaggcgcttgaaatgagttaccctcaattcacacggtatgtgaaaaaatattgtaatggagggcaaaatgtcccaactccgaaacctaaagaaaaattaaaagtcaatgcacaggtaaacgcttcagaggatgcaccagatgaaaacccccatcagattacagatgatctactgagtcagtacatggaggtttgttatcgtcaggaaaggatagccaaaagagctatcgaaaaaggtgtacctcttgagcaaattaaagaatggaacgcgcctaataaagttagattaggcaccctaattacaaattatgaagttaaaaactaa

SEQ ID NO: 246380 - DNA, 351 bp, Klebsiella pneumoniae
atggcagaaaagaaaaacaaggataaggttgtcgcctttaggttatcccaggaagacttcgtacaatttgaagaaaagctggcttcttcaaatatgaaaaagtctgagttttttcgtgaagtttttctaaatgccaacgttaatattacattaaaagcagctccatctaaagatctcgaacgccttactttcttgtttaataaggctagcaataatctaaaccaattagcgcatcaagttaatgccgctcacctcgaagggaaggtatctgaacgactttataaatctattaataactctcttgttgatatccgacatttattaatgacgggggtgtctgatgttgattag

SEQ ID NO: 246381 - DNA, 3012 bp, Klebsiella pneumoniae
atgttgattagagtcagtggctataataatggtggtaaagaatatttggaagaggggcgaaaaaacggcagggagttaagccgtgatgaattagatgaaagggtcatccttgatggtgatttgggattaacacaaatggtctatcaacaaatccctaataagggacaggagcgttatgctacctttactttatcatttcgtgaggatgaaatcccaaatgaaacattacttgaaatcacgaaggaatttaaacagtttttaatgtacgcatatgaagaagatgagtataatttctatgcggaggcacatctcccaaaagtaaaagaaaccattgataaaaagactggtgaaaaggttgaaagaaaacctcatgttcacatttttgttccgcgaaaaaatttactgacgggtaaagaaatgaatcctcgcggaatgtttgactcgaacgtaaaatactttgaggctttccaggaatacattaatcagaagtataaccttgcttcacctcgcgaacatgttcgagtagaccctaccaatgttgctgatgttttatctcgttataaaggcgatgatttcagaactaaaaaccaatcttttaaaaagcaattagtcaaagatattattgaaaaggatattgtcactcgcgaaagcttttatgctcatgtatctacttttggcgaaaccaagattaggaataaagggaaagcaaatgagtacatagctgttaagctcccagatgataaaaaatttacgaacctcaaagagacaatatttcatgatgattttatcgttaatcgtgaaataaaaaaaccaccattggataaagctattatcagtgcgcggtttgcagagtggcctcagcgtgcaaaagaaattaagtatgttagtaaagctacgccaaaattcaggcagctttataaggatgctagcgctgaacaaaagataacgatgttggcacaaagacagaacgaattttatgaaaaaaatagggggcgatatgagttacaccctgccaaatggcaaagaagtaatcagcgaagtgctgatgaaactggacgaatcggatttaccaaatctcccgatggcttgcaaagtttgtccggcggcgatgtggcaactgacaggaactatcgcgaagccgagcgttcggtgctactgccgggcgatgcacacattcacatgggacaacaaaacccaggaagagattctcgattgcgacatgatctatcaggaagacgaggaagacgaaacactggcgaatacgacttcgacaagcatgcccgcgttcatggcatcccaagcctcaccagtttcgcccaacgacgcggataccgactacgaggaggcttcggaggattagacgctgagtcgatcaatttaccgcctcatgcccttaatcccaaaaaaatagcaagtgttgaagacattcaaaaaagagctgtaaggctttttggtaaatcgaatgtaaaagactctacaaatagagtgagtcctattcgtagagttatgcctaaaaaagataaaaatgcttcttttgttgctgcttattttttaagaagaatggaggagaattcaatacaaccatcattgcgccgtgaaatgcgcgaaattgataaaaagttttatgatacacgtcgatttattgcgactgatgaaaggttaacaagaactgagaaaaaacaaattatctcagtattaacgtttgaacggattaaagcacatcatgcgctcaaacatcccaatgaatatttcgagttggagaatgataatatgggtagtgaagatattcgtaaattagtcaaaggaaaacgtattcctgataattctatcactaagggtgaagccgcagctgaaccgcaaaacgcaaaagctcgtttcgctcgcattatcaagaacgttaatgagcatgttgcagagcaacgcgctcgtgaacggcagagaacaatcacggctaatgatctgtataccaaacgagctaaacttagccagaatattcactatctcgataagaagactgaccggacgatgtttgtcgatacaggccgggctattgctttgcgcaaaagtggtatgactgcctcagctgtagtggttgctcttgaattagcgaaagaaaagtttggtagcacactaactattaatggtagtaagcagtttaaagagcaagtgatagaggctgtcgcaaagaacaatctggatattcatttcaccgataagtctatgaacaaacgtctggctgaaaggaaagaagaactcgcaattgagcgaagcggcaatagtgttgaaatgccagagcctacgattaacgcagtacgtgagatgaaagatatcagcccggaagccgtgtcttccgtcaatgcaagcatattacaggattcgcttcctggtacggcaggtgttaagcatgatgctgaaacaaaccagtatgaagtgttagttgcctctaaagaggaaggggaggttttccgctttgctatgtcaccaagcgaagaaactgccacccggattgcaaccttaatcaatgatcatgacccggagcatttagcttcagcaatgcgtaatgagctttcgcaggaattgaaatcagagacggccacacagccagctcaaacttcgcagcctgaaaaatcctcagaatccatctatgaaggtgaattagtcgaacatggtgccgcgccatataaatttaaacccgacatggctaaaccagaaggagagcgtaatgatagttactacgttactctacgtcacgctgatggtagtgagcgtactttgtggggcgttgggcttgaagatgccgtacagcaattcaatgttggcgagaagatcaagcttgaagacaagggggtagtgcctgttaaatggactgagactcttaaagatggttcctctgtggaaaaatcaggccagcgcaggacttgggaaggttcactagttgggcgggaacgcgatcaaaatgacagcgtgaactatcagaatcatgaagattatgatggccctggagttgcctaa

SEQ ID NO: 246382 - DNA, 258 bp, Klebsiella pneumoniae
atgaaggtgataacacattgcatgagcaagagcgcagatagcccgtgcacgatgtttattgaaatggcgctgccgttctatgcgttggtgcgtcttatgatggtaagcgggaaggaagtagaagccctcccaacgcgatacgtcgcgtttggacacagcactgatcaggcgcttattgaacgctggcaattcgtgtttatggtgtgctggtatctgaaacgccgggttagcgttgagtacatagcaatcacgcactaa

SEQ ID NO: 246383 - DNA, 429 bp, Klebsiella pneumoniae
  misc_feature (416)..(425): n is a, c, g, or t
atgaaattaactgacagaatattcgtaaagttcttttataaaaaaataaaaataataattcagcgttcgtacaagaaaggatattctcaggggaaagataagggttatcgtaaaggtcatgatgatggtgtgttaaaatatcacattcgtcgcgaaatcgatacgttctcgatgtccgctattgacaactcgatttatggaccagaaaatattggcgtaacgagagaattagagcaactcatgattgaaaaagtaagagttgcaactaaagctggaattataagttcaccttccccctctcagtgggaaatgattttttcagatcatccagcgacttgcgttgttgctggtgctggctcaggtaaatcaacaacactaattcttcgcgtagtgtttatgcatttttatttaaagannnnnnnnnnataa

SEQ ID NO: 246384 - DNA, 246 bp, Klebsiella pneumoniae; identical to SEQ ID NO: 189855

SEQ ID NO: 246385 - DNA, 156 bp, Klebsiella pneumoniae
atgaacgaagaaactaataaccgccgattctggcgcaacacagttatctgtatcgccctttgctcgctgtttttctggttgccgatgggttatctcgcctttcgtgttggctctgtggtgtgggaggcgctgtggtcgcttattacaacgaaatag

SEQ ID NO: 246386 - DNA, 1029 bp, Klebsiella pneumoniae
gtggtcgcttattacaacgaaatagacccccacgcggcgcagcacctgcgcaaccttatcgacgccggccatattgcgccgggcgtcgttgatacccgttcaattgaggatgtaacccccaatgaccttatcggattcaatcagtgccatttcttcgccgggatcgggggatggtcgcttgccctgcgtcgcgcaggatggcccgacagtcgccctgcatggacagcatcatgcccctgccaacctttcagcgcggcaggcaaaggccttgggtttgctgacgagcggcacctatggccctccgcacattggcttgtcggccagcgccgccctgtcgtggtctttggcgagcaatctggcagcgctgacgcgaacgactggatcgaccttgtacaagctgacgtggaagccctgggctatgccttcggggcggttgcgtttccgtctgcgagcgtcggcgcaccgcaccagcgagaccgtgcttactggatggccgacgccaaccgcgagcaatacaaagaatgcttatcaggatgccgagaaagtaattgcaaggaagctggccggtcgccagtcgaacttgcaggacattgcgtgtcttgctggctggcccacaccaacaaccatcgacaacaatcaggttgcggggcagggtgcggctgccaatgcaccgaagcggggaacaaccctgggcggtgctgtcaggctggcagcatggccgactccgactgctacggacggcaagggcggctatcagggcggcaggatgcgcaacgggaagccatcaacggacaggctggatgtggcggcgcagatagcggagccagtcaggttaacggcttctggcgagatgctgactggctgtactgccgggatggaaagtggcggccagttagacccggatcattcccgctggctaatggggttcccgccagagtgggaagactgcgcacctacggaaacgctatcaacattgaagcggcggcagcgttcataaaatcctacatggcggcggtggatcatgtctga

SEQ ID NO: 246387 - DNA, 1848 bp, Klebsiella pneumoniae
atgaaaattgcacagctaagactaataaacttccgaggatataaagatgttactgtaaatttctccaacgactttaacgttgtgattggcagaaatgatataggaaaatccaccatccttgaagcaatggaaatattctttaataatgatactgtaaaaatagacatcaatgattgtaatgttcattgccaaaatagacagatgtcaatccaactatcattcaccccagataagacttcttatactatagacacagtaccaacaaacattaaggatgaatatttacttgataaaaacggctggattacaataaaaaagacttgggactgctccaataacaaattaactgcggcaagtctcaaaaccacaatgatctctgattatccagataattttccgacacctcttgttaatttaaaaatcactgacctaagaaaattgctttctgaagattactcagaaactctggacattgatgccataaagaaaaattcaagctcgcagatcagacaggctatctataacataacaaacatcaaccttatagaaacagagatagatattgataaagaagatggaaaaaaaatatggtctgcactacaaagcgatcttccacttttcttcctattccaatcagatagagaaaatcgtgactctgataaagaagtgcagagtccgctcaagactataactaagacagctatttctgaattagaagatgaactagagcaggtaaaacaaaaaatcatatccaaagctattcagataggaaatgatacccttgaaaaactaaaggaaatgagtcctgaaattgcaaatgtattaaatcccgaaatgactaataaagcctgggactcacttttctcattctcatttaactgtgatgatggcattccagtaaacaaaagaggcagcggggttcgacgtttaattctactaaattattttagagccgaggcagagagaaaaacatctggtaatcgtaatattatttatgcaatagaggaaccagaaacatctcaacatccagaatggcagttaaaactatttcaagcattaatggatttaccaaaaaataataatacacaagtcatagtaaccacacatagcccgtcacttgcaagtttagcgcctgtcgatagaataatattcatttgcagaagggaaaatgacgttaccgtacaaacaaagcagaacgtaaatcttcaagaggtagtcaacactttaggtgtgttgccagatattcctgcggaagtgaacaatccaactttaaaagtaatcctctgtcttgaaggaccaacagatgttgaattttttgacaacatatctcatgtatttggaattaatatcaatgccgaccaaagaattatgtctatatccctcggaggcggcactttaaaacactgggttaacaaaaactatttaagaaaattgaatctaccagaagtacatatttatgatagagatgtaacaaaatatgcagaaacagtacgcgaagtaaattcaagagctaattgctgggcagtacaaacacaaatgtgggaacttgaaaattatattcacccaagtttatatgctcatgagtacccaattcagggaactttcattgattttcaatcaaattggaaatcaaattggtctgataggaatatacccgatgaattttcagttttcttaaaaaatgaaaaagccgcaggtaatttagcaatcatgaatgagggaacaggaaaaattaaaggtgttttctcaagcaaattatccactcatatgaatgaacatctttttagagatttaaatgcatatgatgaagttaacggatggtttgatagaataaaagcatacctctaa

SEQ ID NO: 246388 - DNA, 384 bp, Klebsiella pneumoniae
atggagatggtgaatacgatgctggagatggtgaatacgatgctggacggtgcgttcccgaagctcagaccgggagatgctccgctgctgcactcggatcagggctggcattacaggatgaggagctatcaggaacgtttaaaggcgcatgggatgacgcagagtatgtcgcgtaaaggaaactgcctggataatgcagtgatggaaaacttcttcgggaccctgaaatcggagtgtttttatctgagggagttcaggagtgtcagtgcgctaagaaaagccgtagaggactatatccattactacaacaacgagcggataagcgtgaaattaaaaggcctgagtccggtagagtaccgaacccaggctctgagagccgcttaa

SEQ ID NO: 246389 - DNA, 264 bp, Klebsiella pneumoniae
atggcgcagctccggcctcagttgccgtacatgaatttttaccgcttctgccagttgctggagaagaaccatccgaaggcgccgatcatcggcagcggctggctagtaggtgatgaacccatacgctttcgcccgcatccggggatgggctttccggctggcgaaatccgcggaatggacgatcctgaaccgccccgtccgccggcggttcacgtgacttttatgggactctacggcgtggaatccccgctgccgacccaatag

SEQ ID NO: 246390 - DNA, 339 bp, Klebsiella pneumoniae
atgtcacatactaaaatcgcaaataagttacaaaatcttaaatcatctgcaattagagaattattgaaacacagcaaaatggacggtgttatttccctgggcggaggaataccagatccaaacttgtttgatcgggaaggcttacagattgctatggatcacatcttgacccacggttgggaagacgcgtttcagtatggactgagtgagggtaatcctgaactgcgggcagccatctgccagatcatgcttgaccggggaattcactgcggcgtagaggatgttgttgtgaccaccggttcccagcaatctctggatattcttgctcgggcgatgtag

SEQ ID NO: 246391 - DNA, 264 bp, Klebsiella pneumoniae
atgaataaacgctactcacagcatggcaagcactcggggagcatttacagcacgccacttgataacttgccgaaagttacatggattaataagcatgctggaatctgttgcggcttcaccatccgcgtattaccgcgcagggtagggaagaagcgctatcaaattatgaaagatggtgattctttcggaattgattttgcgttatctgaagcacgcaaaacgataggtcgcattattaataacaaccgcttcactattcattaa

SEQ ID NO: 246392 - DNA, 1020 bp, Klebsiella pneumoniae
atgagcattgacgcaatgcgatgggccaaaaaagtcaagactgggaagtcctctgcaaaagcagttctgacctggttggccgatatgtgcggggctgatctttgtgcttttccatccattcctgcactggctgaagcgactgagcttgataaaaaaacggtccagtcaagcctgcaatatctgctttcgattggccttattgaagatacaggtgagcgacgtgggcggacaaagcaaatcccggtataccgcctttgcggtgtggaagaaagcattgccgatactgaacacacccaaaaacgggaacattaccaaaaacgggatcgttcaaacgcacccgaaaacggggtcgttatagcagaaaagccccccgaaaatgggattgttccaagcacgaaaaacaaccaaacgatcccgttttttccgtcaaacgatcccaaaaacgggatccggaatctaccagaggaaccaaaagatataacccccacacatagcggaatggtcagaccagattttcccgactatccaaatcagcctggtgttgatttcgggcatgttcagtcgtttggaaaatttgcgatgtatcaggaatggaaaccatcagctgattttccgagacaagcgaccctttggggtatgccattaaagcgagggctaaacctgccggcagaactgagcagtttcatttcctactggcaggcagaaggcaaagtattccatcaggtgcagtgggagcaaaaacttgcccggcatcttaaccgtgcagaagtgcgacagattaaaccagttaacgggggtaatgatcatgtgggagtacgagcagaaccagcagcatcaagagctgttcagcagattcgagccgcccgtgagcaacggttgcgagttgcaggatcagacggcagtagaaacgtcgtggcgcctatgggaagtgatgggcgaaatcttttcgaaccgatggatcctgaagaacggagaggaaccatcagaactctggatcgctcagattgggtcgatgagtga

SEQ ID NO: 246393 - DNA, 1071 bp, Klebsiella pneumoniae
atgttgcaactgaaccgaactatgatgcaatcaatgggccgaccaagaaaaaacccagcggatgcgcaattgcctcccagggtaactaaaaataagtatagctacgtatggaaaccaaaggggacaaagatgagtattaccctaggaaagatacggggtaccagcatgtccactctctggaggcgatacgaggaggaaaaagcaaaacgtcatgatgtgatgactttttcaaaattgtggggaatgtttattagtagcccaacatttactgaattagcacctcgaactcaaaaagattatcatcagcacgagaaaaaattattagctgtatttggaaagctcaaagcagatgatatcaagattgagcaggttcgaatctatatggataagaggggggtgagtagtaagaatcaggcaaaccaagaaatatcaagcatgtcaagagtgtttggctggggcttcgagagaggtttcgtccgcagcaacccatgtaaaggaatcaggaaattcactcttgtagatcgagatgtttatatacctgatgatgactatttagcaatttatgagcatgcacgtatcgaaattcaagttgcaatggagatctcatatttatgtgctgctcgtgagggagatatttttgatttaaaagttgaagacctcatggaacgagggatttttattgagcagaacaaaactggcaaaaagcagatcaaagaatggacgccacggctaagggccgcaatagataaagcattaacgcatttagttggccggtcagccgctggctatgtagtcccaagtccatcagggggaaagctgaaccgtaaaactttcaacacatggtggaacgatgctaagagtgcagcaggacgaaaatttggtagagagataccaggaacgttccatgatattaaagctaaggcaatttctgattatgaaggcagcagtcgagataaacagttattctccggtcataaaactgagaatcaggttgcaacatacgaccgcaaaattagaataagcccaacattaaatcgaccgatcccttttgaaggaaagaatagaaagtaa

SEQ ID NO: 246394 - DNA, 1212 bp, Klebsiella pneumoniae
atgataaagcttgaaaacattcaggaattgattggattgtctgttggtgatatccagtatagtgaaggtgctattatttttgatcttcctcttgaaatggatgtttttgaatttgcaaacacctgtgctcagaacgaaatgattttgcatacgtttaaagtgctgcataaagaaagagaagtgcaaaggtcatttgaatcatgggcctctttaccacctccaatgaaaaatggttcgattaaaacatttcaaataacacttaatctaaaattattaaggcagaaaggtgtaagtgttttttatgatgagaaagagctcgttgaggtaagtcctgttgcgcctagcagatttattattattaggctaggtgttaatggtaataaatgcactatttgtccggagcagtataatagaaatgaaatccttcgttattttcaagtcaagaatatatggtctttattaagtaaccatgcagatcacgttaatgggcgcgaattgatttttttgtataaacagaagatatctattactcttgagtataaaattgatgatttagcctttgaatttgatggtctgacgagacttgaaaaaatattctctgacaatctacacacagaagctaaaaataatattttacaaaacacgctttattcgtttctatggcgagtacctagtgtaaatgctttcagaaaactgttatcagattttactatttttactttatcatttgaagaaaactaccgagcattttctgttggatttagttttgataaaatcagaaaagagtatactgagagattcagagaatatttatcaaaacttaatgggataatgtacgatacattgactcgtgcattggctatccctgtaacaggactcattggatttgtagcaatgaacggtggttttaacgctactagttgggttataaacatagctgctttcatattgacattattttcaacagcaagtattcattacttagtttgttctcaatttaatattgtaaatataactaaatctgaatataaagaactattcaaagggattagagatgagcttgaaagtttagagcttgtcgagttaaataataaagaaagccaactggataaccagtcggctataacttttggaatgttgagatgtgtctatgcaatatctttatgtaacttgattgctagtggtgtgatgtttgtgttaacaaccatatga

SEQ ID NO: 246395 - DNA, 1035 bp, Klebsiella pneumoniae
atggcaagtgctaatattcaccatttcattgtgcatcaaattgtgcgtgacagcgctagagccgcttttttaaaagagcgttttgaagaaaatgcaatcgatgagatgaccactgaggttgttagcagtcttctttcgttattcaataagtctggccttcaaactggttcctttagtcaggagagcggcaaacctaaatttgagcaaactttattaaagtactcaaataatagtggtgaaaatttcatatttgatgatttcactcagatgacaattgatttggctagaattctcgaaggtgaaatgaatcgaggtggcggaaaatctgctaaaccaaactatattgttttttttcatcatactgttaatgatgttgactatctttcggttgtcacccttttagaaacaaaaggttttaaacttgaaaatctttctttccagcatgtagagcgacttgaccttgataaattacatcttgctgcaagaattaaccttcaccattgggttgatgagatggaggaaaggtatatatcctttcgtattggccgtactggagaaatgagagattatttccaggattttataggatgtttagaatttaccgaagctaaacttgagactaaaagcttaattgatgcaataaaagagtgttgctttgatattttttctgataatgcagttagaacaaatgaagttcttgaactggctgaaaaatattgcagggagtctaaagacgaagatggtaaaattagtataatagcattagggaaacacttatttcctgataatgatgattaccttcttgaaaaaacacaaagtgataaatataaactaagtgagcgtgttagtattgataatagaagtttaaagggattggttcgctatagaggaagtgataaaaaaatgtctattagctttgacgctgatttgctcacttcaaaagagatagagtatgatagagcttcaggctcattgaaatttcataaaatccccaaagatttaaaggcatcccttgacaaagagaacattaattag

SEQ ID NO: 246396 - DNA, 345 bp, Klebsiella pneumoniae
atgctggacggtgcgttcccgaagctcagaccgggagatgctccgctgctgcactcggatcagggctggcattacaggatgaggagctatcaggaacgtttaaaggcgcatgggatgacgcagagtatgtcgcgtaaaggaaactgcctggataatgcagtaatggaaaacttcttcgggaccctgaaatcggagtgtttttatctgagggagttcaggagtgtcagtgcgctaagaaaagccgtagaggactatatccattactacaacaacgagcggataagcctgaaattaaaaggcctgagtccggtagagtaccgaacccaggctctgagagccgcttaa

SEQ ID NO: 246397 - DNA, 1356 bp, Klebsiella pneumoniae
atggcgaaatataaggcgtatccggagtataaggattctggggttgaatggttggggaaggtccccaatcattgggaaatcttatcggcaaaacgcatgtttcaaagcgtgcgtacaccggcatataaaagtgatgagcagctcgcagcaagccaaaagtatggtgtaattccccagtccttaatgatgcagctaaatgactcaaaagtgatgcttgcattaaaagggacggaatcattcagacatgtagaagctaataatttcgttataagtttacgtagttttgagggcggcattgaatatagtcagtacactggctgtgtatcgcccgcatatactgtattgaaaaactccaaaccgatcagctatggttactatcgctatcttttgaaatgcacgccttttattgctgcattacagtcgtcgacagatagcttaagagatggaaaatcaattaactatgagcagtttagtgcactcagccttccattatcttcggttcaagaacaaaatgtaatcgctgctttcctcgatcacgaaaccgcaaaaatcgacaacctgatcgagaagcaacagcaacttattgagctactaaaagaaaagcgtcaggccgtgattagccatgctgtcaccaaagggctaaaccctgatgtgccgatgaaagattctggtgttgagtggctgggggaagtgccggagcattgggtgggtagttctttaaaatatatggcgaaagtaattgactgcaaacatattacagctgaattctctgatgtaggtattcctgttgctagtattagtgaagtaaaaagctggtttgtagatttatctaccgcgaaattaacaaacgaaaaagactatttattacttattgatggcggtaggaaacctgtttgcggcgatataatatacagtagaaatgcgactgtgggagaggctgcaattgtcagtgacaacatgcctgattttgcaatggggcaggatgtttgcttaataaaaactaatcaaaaagttattccggagtttattctttacactttaaaatctgatatcattgcccaacagttaaatcttgcaatgataggctccacatttaaacgaattaatgtggatgatattaggaatttttcgatcgccataccacctaaaaatgagcaagtactcattgtcaaaacgctaatggggaaactggaaaaatacgatcgaatcatatcaaatgccgttgacgtaatcacatatatgcaggaacgccgcactgccctgatctccgctgcagtcaccggaaaaatcgacgttcgcgactgggttgcccccgacacgcagaacgttgaggagccacaggaggcaaccgcatga

SEQ ID NO: 246398 - DNA, 165 bp, Klebsiella pneumoniae; identical to SEQ ID NO: 136347

SEQ ID NO: 246399 - DNA, 345 bp, Klebsiella pneumoniae
atgctggacggtgcgttcccgaagctcagaccgggagatgctccgctgctgcactcggatcagggctggcattacaggatgaggagctatcaggaacgtttaaaggcgcatgggatgacgcagagtatgtcgcgtaaaggaaactgcctggataatgcagtgatggaaaacttcttcgggaccctgaaatcggagtgtttttatctgagggagttcaggagtgtcagtgcgctaagaaaagccgtagaggactatatccattactacaacaacgagcggataagcctgaaattaaaaggcctgagtccggtagagtaccgaacccaggctctgagagccgcttaa

SEQ ID NO: 246400 - DNA, 375 bp, Klebsiella pneumoniae
atgactgaagcactgcacgacgtcacttttcgtattctgtcgatgtctgagacgcgacgggatgtatgtcccgctcagtatggccccgtaagtggcgttttcatcaggggcgaaatcctcagagataacgtctcctgtggcgaacaggtttttgtcgcaccgctcggtgattgtgatccggctgaccccgaactttgcgtctggtgtcagtattacggatattcttcccgggttaaggccggcgacatactggatggtgtggccgtttctggcataaatttcgctgatccactgtcgttagctgtgctgcaacgcctccgctttaatcctgaatatgtgtatcaggagcaatctgattcatatgcactgcactga

SEQ ID NO: 246401 - DNA, 525 bp, Klebsiella pneumoniae
atgccgcgatacaggctcatggtgccgatggtgatcacaatggacgacaggttaaagcgggtcaccagcaagccgttgaacaggccgcacagcagacctacgcccaggccgatgaccaccagcagcggagtgtccatccccgctgccgcgcagaagcccatcaccgttgagctgagcgccatcgtcgaggctaccgacagatcgatttcccgggcgataatcagcatcgccatcggcaggacgacgatcgccttctcggtaaaggtaaaggtggcgtccgacaggttccagatattgaggaagtacggggaagccacggcgttgccgataaataccgccagggtgaccgccagtaaaaacccttcccagcacagcaggcggcgcagcggcgacggcgcggccggggcgtttttcatctcttcagataccatcattttgctcatgatttcaccgcctgtttctgtcgggctaacgccgcgttgcgcaggattaaccgcccgtgaccgcgattgccgcgctcgttga

SEQ ID NO: 246402 - DNA, 294 bp, Klebsiella pneumoniae
atgacctttgaagagaagctaaagctcatccgcagcgcggaagaaatcaatcaagcacaactttctgatatgacgggaatttctttaagcacgctgaaaaagattgaggctgggtatcacgatcctggctggaatgtcttaagcaaaatcacacaacacccccgcctccaaaaatacacgctatggctgatgactgacaaaaccgccccgcaggctggtcagatcgcgccggccctcgcgcacattgggccagaatcaacggaatcagaccaatccgggaaacagactggctaa

SEQ ID NO: 246403 - DNA, 132 bp, Klebsiella pneumoniae
atgttattaggatattggattgggcagaaagagatccctgatccatatcgtaaaagttatgaagcatttgaatctgtctttggaactatcaatcacgcttgtaaaagctggattgataaactgaataaatga

SEQ ID NO: 246404 - DNA, 705 bp, Klebsiella pneumoniae
gtggtgacgggctggaagtcattgttccaggctgaaaaagatgacgatgaagaggacgccgatggtgacagtatggcgctgccggcgctggcaaaaggggatatttgcgctgtcaccggtgctgaggttaaggatatgaaaaccagtccgccaaaaccgttcacggaggggacgctgattgctgccatgaagaacgcggccagtttcgtcagtgacccgaagctgaagaaagtgctgcgtgataacgccggtctgggcacagaggcgacgcgtgcgggcgtactcgaaaccctcttcaaacgacactatctggagaaaaaagggaagcacatccactcaacgcaggtggcacgagagctgattgcggccctgccggaaacgctgacgagcccgggcatgaccgcattatgggagcaggcactggatgatatttcgcaggggaaaatgtcgcttgcggtctttatgcaaaagcagctgcagtggacccgtcaccttgtcgaaaaaggccgccaggacagtgtgaaaatcaccgctcccgtcacgcctccctgcccgttatgcaaagggcccacacgtaaacgtaaaggtaaaaatggtgatttctgggggtgcatacgctatccggactgtgagggaattatcagtacaggtaagaagaaagcagcgaagcgtaaaaaaacatcggttaaggctaaaacagaataa

SEQ ID NO: 246405 - DNA, 522 bp, Klebsiella pneumoniae; identical to SEQ ID NO: 128548

SEQ ID NO: 246406 - DNA, 183 bp, Klebsiella pneumoniae; identical to SEQ ID NO: 128549

SEQ ID NO: 246407 - DNA, 549 bp, Klebsiella pneumoniae; identical to SEQ ID NO: 128550

SEQ ID NO: 246408 - DNA, 306 bp, Klebsiella pneumoniae; identical to SEQ ID NO: 82736

SEQ ID NO: 246409 - DNA, 273 bp, Klebsiella pneumoniae; identical to SEQ ID NO: 82733

SEQ ID NO: 246410 - DNA, 594 bp, Klebsiella pneumoniae; identical to SEQ ID NO: 82732

SEQ ID NO: 246411 - DNA, 3168 bp, Klebsiella pneumoniae; identical to SEQ ID NO: 82783

SEQ ID NO: 246412 - DNA, 1206 bp, Klebsiella pneumoniae; identical to SEQ ID NO: 128559

SEQ ID NO: 246413 - DNA, 3441 bp, Klebsiella pneumoniae; identical to SEQ ID NO: 196942

SEQ ID NO: 246414 - DNA, 537 bp, Klebsiella pneumoniae
gtgtcagttaaagacggtgataagtgggctcttttacatccggactctaagttttccgtggatttcacgattgatttcaagcatcctttaatctcggctgatactaataaattaaatattgaaatgtcgaaagaaaaatatatagaagaaatagctggtgcacgtacttttggatttgttcatgatgtagaaaaactgcaaaaaattgggcttgtactaggggctggtttgaacaatgcgataggtctcgatgaatatagcgtcctcaatcctgaaggtcttcgttttaataatgaactagttcgtcataaagtacttgatgcaattggagacctctttgtttctgggtataatatcatcggtgcttaccatgcatataaatctggccatgctttaaataataaactaatgcttgctttattaaatgataccgatgcatgggaattcgttaatttgcatgattacagcagggggaaacttaaagttaatatgttgcctgcgattaataaagaatgcccagtatcattaactatctaa

SEQ ID NO: 246415 - DNA, 690 bp, Klebsiella pneumoniae
atgaatctatataaataccaacgcattagtttggactctctaagttcattgagtaattgttgcttatggttttctggttttgataatcttaatgacccatttgaaggcacatatgaattaactgctcaaatgatatttggtgagacaaataatgtgaacaaagtcaatggcactatttctgctttagttaatgattctggagtatgttgcttctcaaaaatcaacccaatagatcagatcaattttaaagaaagcaccttgatgtggtctcattatgctgcgcaattctcaggaatatgtattaaatttgaccaaggtaaacttttacagtctcttaatgagaataaagaatctcgaatcattcataaagatgttatttatacatcactcgcacatacaattaacaccttcaacgaagcaaaagatgaagacattatgtttaaaaaacataatgcttggtggtatgaggaagaatacaggctggtaaatatacaatctggaaaaaacagattattaaaatattccccgatggcaattcaagctatttatgtcggtggacgagtcagccactcaagcctgaatcttgtgaagataataagagatagcattagaaaagacattccaattttcaatgtttccgtaagcaattccggatataaatatgacatacatgactttgacgaaaattaa

SEQ ID NO: 246416 - DNA, 264 bp, Klebsiella pneumoniae; identical to SEQ ID NO: 82816

SEQ ID NO: 246417 - DNA, 2535 bp, Klebsiella pneumoniae
atgagtggttccgtaaaaaacagcaaaactcaagtaagagaggaatctgctggttgttgtgaaaaaattaacttgatagtagggagcaaaatgcagcgttctgaagaaccggctaaggctcatggtcacgcacatgaccataaagattgcagcgctgagctctctcataaggagcatggtcatggaagtgacaaacatttacatcgcgagcaagggcatgtgaaaggtgggcatgcacatgaaggatgcagccatgaacatagtcatactgatgaagaacatgatcatggtgaggaagaacatagtcatggcgatcatcagcataaggggtgtaaccatgaccacgctcaggatgatcaggctgatgaacatcatggacatagcggtgactgctgctcaggtgcgccaacaaatttaagtaatctaggtggttctaaagttgtagctggtgggttacgaactgaaatacgtattatgcagatggattgccctgttgaggaaaatatcatcaaaaagaaactgggggcaatgacctctgttaaagagcttgatttcaacctgatgcagcgtgttctgactgtaacccatacacctgattcgcttgaacctatcttggttgcaattcgctccttgggattcgtacccgaagtttcggataacaatggtgaaaagaaaaacatccaggagaaaaaaaagccttggtggccgttagctctggctggtgtggctgcacttgcggctgaagttatgcactgggctgatatgcctgactggcttgaagcgggattagccttgatagccgttcttttgagtggtttgacaacctataagaaaggttggatttcaattcgcaatggtaacctgaatataaacgcactgatgagtattgccgttaccggggctttggttcttgggcagtggccagaagcagcgatggttatggttctatttaccatcgctgaactgattgaagcaaaatcactcgatagagctcgaaatgccattggttcactgatgagcctgacccctgaaaccgcaatggtccaacaaactgatggatcatggcaggaagttgatgccagcagcgtacaaccaggaagtattgtaagggtaaaaccaggcgaacgaattggtcttgacggtgagattgttaaaggtcaaacaacgattaatcaggctccaattactggtgaaagtttgcctgtcgataaaatggcgggtgactccgtgtttgccgggacaataaaccagtcaggttcttttgaatataaagtcactgcagctgccaataacaccacccttgctcgcatcattcatgctgttgagcaggcgcaaggcgccaaagcagctacacaacgttttgttgaccgcttttcccagatttacacgccagtcgttatggggatttcggttgctgttgctgtattgccaccattgtttggcgcaggtacatggcaagagtggatctataaagctctagtcatgcttgtcatcgcgtgtccatgtgcgctggttatttctacaccagtaacaattgtcagtggacttactgctgctgctcgtaaaggaattctcattaaaggcggtgtttaccttgagcagggacgtaaattaaaagctttggcgcttgataaaactgggacgattactcatgggaagccagtacaaactgatgtcatggttttcaatggggaaagtgagcttgaggttcgtacagttgcagcaagtcttgctagctactctgatcatcctgtctcacaggccgttgtgaatgcttctgttgatttgaaaaaacagagtgttgaaaactttgaggctattgtaggtcgaggtgtgcatggtgtgattgccggcaaagacttttatcttggtaatttgcgattggcagaagacctcctgagttgtccgttagaggttaaagctacagtacaaagtctggaaagcctaggtaaaacagttattttgctcaatgatggaaagcaagtgcttgggttatttgctgttgcagatactgtcaagaacacgagtcgcgaagcgattcaacaactccatcaccttggtgtcaagacagttatgttgactggggataacccgcatacagccaaagcaatagcatctcaggtcggtattgatgaagctcgtggtagtcagttacctgaggacaaacatcaagtagttcaagagtattcacgtattggtgttactggaatggttggtgatggcatcaatgatgcgccggcactggctgcggcagatataggttttgctatgggggcaatgggtactgatacggcaattgaaactgcagatgtggccttaatggatgatgacctgcgtaaaatccctgcctttgtaaaattgtcccgacagacgtatagcttactcgtgcaaaatatcagtctcgcattaggtattaaagctattttccttgtattaacgctcatgggaatggggactatgtggatggcggtatttgctgatgttggtgctagccttctggttgtagcaaatggtctgagattgttacgtaaatag

SEQ ID NO: 246418 - DNA, 291 bp, Klebsiella pneumoniae; identical to SEQ ID NO: 230701

SEQ ID NO: 246419 - DNA, 1440 bp, Klebsiella pneumoniae; identical to SEQ ID NO: 82809

SEQ ID NO: 246420 - DNA, 576 bp, Klebsiella pneumoniae; identical to SEQ ID NO: 82810

SEQ ID NO: 246421 - DNA, 210 bp, Klebsiella pneumoniae; identical to SEQ ID NO: 129780

SEQ ID NO: 246422 - DNA, 585 bp, Klebsiella pneumoniae; identical to SEQ ID NO: 195106

SEQ ID NO: 246423 - DNA, 1743 bp, Klebsiella pneumoniae; identical to SEQ ID NO: 195105

SEQ ID NO: 246424 - DNA, 789 bp, Klebsiella pneumoniae; identical to SEQ ID NO: 82808

SEQ ID NO: 246425 - DNA, 2712 bp, Klebsiella pneumoniae
atggatcttagtattcgcgttgcgttcagtgctattgataagctcacccgcccggtcagtgccgccagcaaagcgattggcggcctttcggactccctcaagcaaacgcagggctcaatcaaagaggttgagcgacaatctgccgccttcaaccgtctacgcgacagtgttaaaaaaacctcccgcactatcgacgacaccacccgcacgttggaaggactgaagcaggcacagcggtcaggtgctacgctgacggacaagcaacgccagcagatgaccgatctcgcggcgaagctggatcgcctcaaagtccgacgtgataaagagaccgagagtctccggggagcctccgaggcgctccgtcgtcacggtgtctcccttgcgggtggcagtcagaccattgccagcgccattcgccgaaccgagcaatataaccagacccttgagcacgagcgccgccagctcgctgctgccacgcaagcgcgcatgcagtatgaccgcgcgagagagatcgccggcaagatgcgcggcgccgggctggcgatgacggcggccagtgccggggggttctatctgggttcgcggctgatggcgccacaaattcagactcaggagcatgcctccgttattgctgctcagaatggcgaggacgcagcatccggcggtcgctactctcgcatcattcagaacattaacgccgctggcgtcagtcgcgatctggcccgcatctctgaggcggtggcgggtgttcgcagtacgctgggcgcactcggcgcggtgggtgacgaggaactcacgcgcatttcccgcaaggcactggatctgcaagccgccctcggcggggatatgacggaacatatccagatggcggcgatcatgatgaaaaacgggctcgcccgcagcagtgatgaggcattcgaccttatcacggcgggaatgcagcgcgtttccacgcagatgcgcggcgagatgccggaaatccttcatgagtattcaacccacttccgcaatatgggtttcaccggcgcagaaaccatgtcgctgctggtcaatatggcgcagcagggtaagttcgcgctggataaaaccggggatgccatcaaggaattcagtatccgcggctctgacatgtcaaaaaacagcgtcagcgcctacaaggcgatcggtcttgacgcggcggccatgtcatcggcgatagccacgggtggcgaaagtgcgcgcaaggcgatggagaagaccgcgaaagggctgctgtccattcaggatccggcgacgcgggctaatgccgcgatttcgctttttggtaccccgattgaagacctgtctatagaccagatcccggcgtttctttcggcgttggcgaacgtttctaatcgcctcggtgataccaggggaagcgccgacaggctgggagataccctgcgcgataacctgcctggtgatatcagcaagctgggcggggcatttgacgggctgcgcacggaggtgctgacggggatggatgccagccttcggacaatcacgcagacgctgacggccttcctcaacaacctgcgggcgtgggtgagtgaaaacccggagcttacacagactctggtgcttgtcactgccgcgcttgtggccctgactggagcggtaggcatagcgagtctcgctgtcagtttctacgttggcccctttgcaaagctaaggctagctattcaaaacatcggcctgtcttcgatcactacgacctccagtatcgccaggctcaacctggttctttccggcctgcgcgtcattcttgcaacactactcggcatccccggagtgattgcgctggggtttatcgctgcagggctgattatctggaaattctgggagcccattaaagcattctttggtggtttccttcgcgggatatgggagggattaaccccgctcaggaatgcattctcagcgatggcgccagtattctcctccttgggtgatgccattaaagcagtgtggggatggttcaaagacttgctgtctccgatgcaggccagcaaggatacgctggataaatgcgctaccgccggggagattttcgggcgggtgatgagttctgcgctcagtttcctgctgtggccgctacagcagttaatgaatggcgtgggctggctgcttgaaaagctggatcttattcctgaagggatagacagggccaggcagcaggctgacaaggcacagcgggaacttgaagcctctgcgacagcgctggccgggcatcaactacccctgggtcaggcgacggtatccaaaccagttagtggcggtaagccgccggtcattaccggcgttcagggccacctgaaaaacatcgacacgaataccaaagcaacggccaacaacacgaagaaagtcggccccggggatattgtctttaaaaatctgccgcgtgctttggcgctgcgtggtgcgtatcaggaggcgcgggttattccgcaaccggtgccgcgcgtatctgcggctgcggccggcggtgtgctgtcggtaccaacggcgacgcaaggggcgacttccgcgccggtcgctgccgcgtcgggtgcggcgccgttcttccaactggtctttaacgacgtcggtaaacgctcggatcaggagcttgaaaaaatggtgcgcaacgccgtgcgcgatctgatggccaacacccgcaaaactaaccgtggttcattccgcgatcgggagtaa

SEQ ID NO: 246426 - DNA, 375 bp, Klebsiella pneumoniae
atggccaacatacagtacatgacagacagccggggccagagggtctccgtcgttgtacctgtcgagttatttgagaagctggtatccagcagcgatcttgatgaattttatgagcctgtcacaattgacgctggcgcatcagatgacattcattatcccaatgaagtcattaatattctttctgagaaagattgctctatgcaagctgcgtggcgtatctatagaggcatgacacaaaaacaagttgccgatgccctaggtataaaacaatcaacagtctcagaatttgaaaaatcagaaaaaccccgcaaggagaacatagagcgactcgcaaaactctatgattgctcgccagagcaactactccttgaatag

SEQ ID NO: 246427 - DNA, 378 bp, Klebsiella pneumoniae
atgatctgccttttctggctcgccatgtgcggcaaactttcttgccctcaaacgcagcagatggttagtattgccaacgcatacgtcaaaaaagggataaaaatgaaagataaatatgtagaaggaaaagtgaagtcctccattgatgagaaaatctccgaagtagtccgcaaagcgaaggatgctgaacttggtggcatgccgatgctgacagcgattcaaaatgaagctggtgatatttaccgcgtcattactgttgatggtcttggcgcatacctggctctcgttcaaggcattgctaagcttgggctgactgatcttcatgcagataaccttaatcctggaaaatacgattcattgttcgttttcaagcaataa

SEQ ID NO: 246428 - DNA, 693 bp, Klebsiella pneumoniae
atgagctatctgggaagcaaggcggcgagcggtgtttatcaaaaaatcatcgctgaaatgccgccgcacgatacctacattgaaacgcatttaggcggtggcgcgatcatgctgcgtaaacctccggcaaaagtgaattgggggatcgatatcgacccgcaaaccgtcgaagcatttaaccagggcaaccctgattttctggataggctgtcagatacgttgtttattgatgttggcgatgccgttgagtttttgtgtcgtttcgattatgcctctgccggtcgggttttgatttattccgatccgccataccttcatgagacccgatccagctccgcgcgctatcggcatgaatacaccattggcgatcattaccgcttgttgggcttgctctgctcaatgccggaaaatgtgagtgtgatcatatcgggttacccctcttcggtttatgacaacgctttaccgggttggcgcagcaaggagtttcaggccatgacgcgaggcggtgtgcgaacggagaaaatctggatgagctacccggagggggccgcgtactcgcatacattcgccggtaaagactataacgatcgctatcgcattaagcgaaaagcgcagcgctggaaggataaatttgcaggattaccgccagccgagcgcctggcgatcatggtggcactcggcgaggtggagtga

SEQ ID NO: 246429 - DNA, 186 bp, Klebsiella pneumoniae
atgctaaatgacgatgaagaagagcggcttatccaggaatggtcgctcggtgattatgataatggcgaaaatggttgtccgaagtgcgggcgccatcgcctgtgtatctgccagaacggaaagcacagatgcgaaaagtgcaattggtcgccagagcttaacgactacgtgccgatcgattggtaa

SEQ ID NO: 246430 - DNA, 246 bp, Klebsiella pneumoniae
atgagcctgattattgtcagcaatgatttatcggaagaagtacacctggtgacggtggcgaatggtgcggccacggccacggagcgactgagcggggccagcgtatcggtggaggagatggaaaccctgtttcccggtttcaccagcgcagttgcaacggccggagatactgccgaactgctggggacgctggggtcactgaatgagcgttttatctgggcgcaggtgtctggctccttacagtaa

SEQ ID NO: 246431 - DNA, 792 bp, Klebsiella pneumoniae
atgaccaatgcggagtggtctgcggttcagatgcagtgttatgcgctgggtttcaaccccagggggaataactattacgggcgggacgcaacagacagcacgcaatacggccgccgggtggatggcgtcagcgccacaggtggcgtaacgaccggtacgccggtgatttacaccggctcgggcccggtgtcgttccggcacaataacgcatacaacggcatcagcgatgtgaacggaaactacaacatgctgacgcccgacgtgcgcctgtgcggggccaccggtgagctgcatatttttgtcaacaacaatgctgcaatgagttctgccgatttgtcagccacttcggcgggctggaaggcaatcaatgcggtcaccggtgagttaatggacctttcatacaccggcaccccgggcgtggattttgtttcgaatctggcgaacagcgtgaaggtactcaatgcatcagcggtgggtaataactacacgctcaccgccactgacggcgctgcgttttcatccatggccaacgctggcgcgatcccggtttcggcaacggcactggcggtactgaaaaagtacggcctttatccgctggtagccaatgccgccacgctgggcggcgacaaaattgtgatttccgccacccccgcaacggctgcgaccgaacgcatgttgcgtcgccagggatcctatatggatggcgcactcgccggtgtctggatggctggttttaacggtgttcgtgctgcgagcggagtatcggcgtttcgtgtggcgtattacgcataa

SEQ ID NO: 246432 - DNA, 1017 bp, Klebsiella pneumoniae; identical to SEQ ID NO: 82799

SEQ ID NO: 246433 - DNA, 981 bp, Klebsiella pneumoniae; identical to SEQ ID NO: 82814

SEQ ID NO: 246434 - DNA, 453 bp, Klebsiella pneumoniae
ttgctggccgccatcggtgcgacagacctctttgccggtgataaggccaaaaacgcgattttttatacctgggacgggacaaagtggtatttcgggccgtatgacctcgataccacttacgggttgcattacaacggcacgcagattagttatgccgctgattcagcaccgaaaaccgacggcggtactttctggaaaaaaatactggtcacgtatgctgacgagctggccgcccgttatgccgaactccgcgataaagatattttcagcgtgaattgcctctatgacatttccgccggactgtccgcgaaatatacccacgaactggataaagcggaaatcaataaatggccgtcgaaaccgtcgttaaccgtcacaagccgtgatcagattttcagctggtttaacgaccgtctggcgtatctcgacgataaatttaactacacccgataa

SEQ ID NO: 246435 - DNA, 678 bp, Klebsiella pneumoniae
atgatgcgaaatcctggatttacggggacatcggttagttccgctacgttagtaattatcacttgcacatttttggggtatacgcttcatgaaaaaagaagatttatcagtctgttagtgatttttgcagtttctgcatatttgatatacctaacaacaactaagacaacgatggtaacgttagcttttgtgtttattttgatattttgttcagcttttataacaaagtatattgtgaaaacaatttttttattcctaacgttgttctcatattattgcatgttcaatattagtaacgtatcaacggggatgttgacaaatacaatgctaataagaatgtatcaaacatggccaaatgcaatgttgttacttgaaacgcctctgcaatattttttcgggaaaggctttggttcaataggagctccaacatattacttcacaccagcattggcaaatccagccgataatatgtatgtatatttgtatgtcatatttggtgtttttagtattttgttctcattcttttttatgatgaagttcttaagttttggattaaccctgtcaaaaacgacaaagcaattcttaataatatcgttagttattttaataggtggtataacctataatttctttgatacaattctgttgaatataaaaacgcgaataaaaatggaataa

SEQ ID NO: 246436 - DNA, 543 bp, Klebsiella pneumoniae
  misc_feature (484)..(493): n is a, c, g, or t
atgagtaagtatggtgttatcgtttatgagggtgggaaatttcaagaacaaaatctccttaacctaggtgactatgttcaaagtacagcggctaaacaatttctaccttcagtagatcattacatcacgcgtgaaggaatgcatcgatacaacgatgaaactgtaaagatgataatgaatgcgtggtatatggccaatccagagaactttcccccatcaaataaaatagaaccattatatgtatcagtgcatctgaattcttcgatagtagacagaatttttagaccagaagttattgaacattttaaaaaacatgaaccaataggttgcagagataatcatactagagatttactattagctaaaggaaataatgcttactattcaggatgtatgactttgacacttggccattcatataaacgtacaaaaattaccgatgaagtaatttttgtcgatatcatgcatgactcattatcaatgnnnnnnnnnnatgaagcagttaatcaaacaaccacttcgtttaggaaaaagaatccttaa

SEQ ID NO: 246437 - DNA, 606 bp, Klebsiella pneumoniae
atgatggaagcacaaaataaagtgctaatgattgctggtgcaagtccaaacgcaggtaaaacatttataagttctaacctttcagcgattattgctaattcaggaaagaaagttttatatattgatgctgacatgcgtaaagggtacgtgcataaggtattcggcatgtcaattaataatggtctttctgattatttatcaggaaaaagtacaaaagaagatgttgtaaagaaaattgatgaagctgattttgactttatatctagaggccagattccacctaatcctgcagaattattgatgcatccacggatgcaagaattgttaacatgggcagatcgcatttatgatctaataatcattgacacaccaccggtgttagcagtaacggacccggtaattgtcggttcatatgcaggtactacgttattaatcgctcgattcgaagagaatactgctaaagaaattgaagtaagtatacgtcggcttgaacaaagtaatgtaaaagttaaaggatgtgtactaaatggagttgtaaaaagagcaagtagtcaatatgggtatggttataaccactatggttattcatatactgaaaaaaattaa

SEQ ID NO: 246438 - DNA, 225 bp, Klebsiella pneumoniae
atgtcgatcacgtcaataaaactggatggcggacttagcgatccagagtttgtggaaataagcgccaacgcacggaaacacgaacgcgcgcacctgctgggcttactgcgtatttatgtcggccagctgaaaaaggaaagcgccaccccggacgagatttatcaatcaatcgagcggtggatcagcagccgcgaacttccaatcagtgagggtattaaacaatga

SEQ ID NO: 246439 - DNA, 195 bp, Klebsiella pneumoniae
atgaatcactcacctgagtacatccaaggcgcggtggccgctctgcgcgaagcaaaggccgtcagcattaaaaacgcggcagcggtaggaactcttgagggtgtagccattggccgactgatgatccagatggctctactgaccttcgatccgcttatcgccaaatacatcgctatggaggtgaaaagtgattaa

SEQ ID NO: 246440 - DNA, 2247 bp, Klebsiella pneumoniae
atggtgacccgcctggaatggctgtccacctctcaggaccagtctcactaccggctcacgctcagttcgcgcctggcgctgctgggatacacccggcagtgcgccgtctttcagaaccagtccgtgccggaggtggtggagcaggtgctgcgcaagcacgggctggagggcgctgattttgaattccgcctggagcgcacctacccgccgcgtgaaattatcacccagtggcgggaaacggatttacagttcatccggcgcattctgtctgaggtggggatttactggcgtacggagatggatgacacccgtgagctggatacgtacatttttgccgacagccagctgaactatcagtttgatgtacgcctgccctacagcgaaccatcgggcctgtttgacggcgcggcagaatcggtctgggatgtgcggacctggcacaacatcgccaccggcaccgttgccacgcgggattacaactaccggaccgccgccacgccgatggatgccacagtcagcgtgcgtcatgatgcggtcaccaccggggagcattatcgctacgccgcaccttatcgtgacgtgggtgatgacgccagcccggagccggaaaccgaatccggggcgttctatgcgcacatccatcacgagcgggagctgaataaatcagcccgtattcatctgttcagcaacgcagcccatctcacacccgggcaggtgctggagccgctgggcgacgtcattacggccctgcaagaaggcgtcgtcctcaccctggtgacctaccggggagcacgtgattcccgtctgcacgtgtcggtgtggggcatgccttacaccgaacggtactgtttccgtccggcggaaatcccgcgtccggaaattcacggcacacttccggcccggattgagagccgggaaaagaacgatatctacgctcacatggacgggcaggggcgctaccgggtgaagccggacttcgaccgggaggggaccgaaccgggttacggctatctgtggctgcggatggcgaaaccttatgccggtgaaacgctgggctggcatacgccgctcattgacggaaccgaagtggcgattgcgtacagcaacggtgatattgacctgccgtacatcgcgtatgcgctgcacgactccgaacatcccgacctggtgaaccgggacaatcacacccgcaatgtgctgcgcaccccggcgaacaacaagctgcgaatggaagacaggcgtggtgaggaacacatcaaactcgccacggagtacggaaagacgcaactgaacacgggccatctggtggacagccagggacaacgtcgcggccagggggccgaactgcgcaccgatgagtggggcacaatccgtgccggtaaggggctgtttgtcagcgcggatgcgcaggcaaaggcgcagggtgaggcgctggacagggacgccgccctgaaagaaatcgacaggcttaaccagcaactgcaacagctggaaatggccgcagagcaggctctggcgctgaaggcggatgttgacagtcagatagagatgtttgagcagcggctgaaaccgctcaatgaagtcgtgctgttctcggccccggaagggatggcgctgaccagcggggagcacctgcagatgacggccacgaaaaatgtcgccattaatgccgggggcgatatcagtgccggtgtcatgggcaatatgacggcgctggccggggagaggcttgggctctttgcccgcaccggccagctgagtctgaaatccggagaagggccagcggaggtgcaggcgcagaatgccagcctgcggctgtttgcggagaagaagctgacgctgagctcggcgagtgatatttcgtttgccggaaaaaaacgcatcacgctgattggtgggggtagttacctgcggcttgaggccgggaaggtcgagtatggtacgacggcgacgtatatacggaaggtgaagcggacgatgtttgctggtgcaaattcaacaccaacgccatcaatatcaataccattagttgacgatttaatccggaatggattcttcgatgaacaattccgaatcttggatgatagtggtaagcccatggctaatgtcccatattttatctctagcgaaaatggtgaaacatttaaaggtgtcaccgacaatcaaggtttgtgcaaacgcgttttttcaaaagaatcagccaaacttaccgtttggctaggtgtcctggctctggagagatggtag

SEQ ID NO: 246441 - DNA, 333 bp, Klebsiella pneumoniae
atggcgctgtggcggcgtaaacgtccggaaaacgtcatcgtgcatacagacagaggcggtcagtactgttcaacggattaccagagcttgctgaaacgccataatctgcgggggagtatgagcgccagaggttgttgttacgacaatgcctgtgcggaaagcttcttccatacgctgaaggtggaatgtatccacggagaggactttgtcagccgggaaatcatgcggacagcagtgtttaattatattgagtgtgattacaatcggtggcgtcgtcacagtgcctgtggcggtctcagtccggaacaatttgaaaaccagaacctcgcttag

SEQ ID NO: 246442 - DNA, 174 bp, Klebsiella pneumoniae
atgattattcaccctaacgtgtaccgcgtaaaaaaaattgaacgtagcttaaatggtctttactggcttgtttacgtggatgtgatctgctgcggacatattggcgcaaaggtcattatttgcaattccgaaataaaggcaaatgtgatctctgtaggtgatgaggtgcgctaa

SEQ ID NO: 246443 - DNA, 1020 bp, Klebsiella pneumoniae
atgaggccaatgacagctattgatccgcgctgctttgcttccagtactattaacacaatcagtatttcaggtggaaaggatagcctcgcgcagtggctccgggccattgaaaacgatgttccacatatttccgtctttgctgatacgggccatgagcaccctcaaacgatggaatacctcgattacctggaatcaaagctaggtaaggttgttcgcgttaaggctgatttcaccaggcgtatagaaggcaaacgaaaattcattgctgaaaagtggcctgtctctttggttcaggagtgcggaatgtcgccagatgaggccgcaaaacgcattcatcgcgcgctggagattcttaacccaaccggtatcccatttcttgatttgtgcatgtggaaaggccggttcccttcaacaaaggtgcgcttctgcacgtttgagctgaaacatgagccaataagaacacagattattgttcctgccttagatgaatatgacgaggtagtcagctggcagggtgtcagagcgcaggaatcaccggaacgtgctttgctgcctgtctgggaggaagacgcagacaacacaccgggtttgcatgtatatcgcccgatccttaattggttgcatggagatgtgttcgcccttgcccgacgtcatggcctcaagcctaacccgctttacctgcaaggctgtagccgcgtcggctgcatgccttgcattcacgcccgtaagtctgaactggctgagatattccagcgctggcctgaagaggtccgccgagtagctgaatgggaaagactcgtagcggaatgttcacgccatggcaattcgacgttcttcccatccacgcatgacccacgccgagctgaaaagcgaattgaagttgtcaccgttgatgcttatggaattgagtcttatcgcgactgggctttaaccacgcgtggcggagtgcagtttgatctactggcggccgccaacgataagactgtatgcagcagcgtttatgccggggtatgcgaatga

SEQ ID NO: 246444 - DNA, 375 bp, Klebsiella pneumoniae
atgaaggcagtcaaagagacgttgaccggtgcgcgcggtaaaggggcatttaaaaacctgctgctgcatgcgccaggcggcggcaaagacggcgtacaaatcctccccttccagcagatcacggcgaaagatgagtttatcaacattaagaacgccacccgggacgacatactcgcagcgcaccgtatcccgccgcagctgatgggcgccatgccagagggaaacggatcatttggggatatcgagaaagccgcccgggtctacgctatcaacgagctgacgcccgtaatggaggcgctgaaggtggtgaacgagtggatcggagaagaagtgatccgctttaacccttacgcgttgcttacccctgagaaataa

SEQ ID NO: 246445 - DNA, 840 bp, Klebsiella pneumoniae
atgtataaaaatagcaatgacagttttaataaagataaatgtgaattatgtggggaatattcaaacttagtaaacagtcatttaatgcctaaaagtttatataaagtgataactaaatcatttgagccatttgactcagcgccaatatatgctagcgtaagtaatgaagcggtttattatacaaatttacaaattacaaaaaaagcattgtgtcctatttgtgaggatcgtttcaataagtgtggtgagaagtatgtagttggtaagtgtcaacataatgcatacaccttcgatctcagaaaagctttgaataactcaactcctagtatatttgtagatgattgctattattttaattgtaaagatattggtaaaataaatactgggaaattcatgtattttgttgctagtatcatatggcgagtgactgctataaattggagaaacaaagatattgagcaactatacaacaaacttcctcaggaatacctagcatcattgaaaagctatcttttgggtgaaagtttattccctaatgacatttacatttcggtctgtgttgataatgatgatatccctactccgatacttacattgccttccggcgatctgagtaaaaaaatgcatatttctttttttattcccgggatcaagtttaatgtttattttggtaaggaggtcgatcaaagattttcgaaagtattaaactcacttggtattaatttaatatatatgtatcgttcgttcacggcatctgcagaatatatgcagatgaaggatttattaaataacaagctccttcccaaaggaaaattagcaaaatctttaggccaaatttga

SEQ ID NO: 246446 - DNA, 2373 bp, Klebsiella pneumoniae
atgtatatttcgactgagcaaggattcgaacttgataaaataataaaaagtaacgaagttgctttgagaagttttgttgcagatgttttgtttaactcctatgataataaagacaaattaaaaactgctttagagtctattttgatctctgataatgtaatctattcaaaaagatttcaagctaaaattagaaactattcagggaagttagatgttttgtttcagcatatccagatatgtaaagcatcgctagactcatcaagttttaacaacgatgttccctatgtttctgatttaattgacttaatgttaatattctttaactcccatttttcagataaaaatattgcgagaaactttagttcgttagaggagtttcattactgttgtgcattatatcatcgtgcaagaaataacttatcccatccagcatctaggccagtatctattgttgatgcaaacaaaattgtttattttattgagaatgtattatccgaattgcctgagaaatatttttggtacagaaaaaaaataaatataaaaaatgacattattaaatatagaaacatggttcttagtgatgagcctagatttcacaatcttaattatgcttcatcaacgcataaagatttactatgccgtgaagagatcataacacgtttatatgattctttaatgggtaatgatattagacatcgattagcagggtcagtagtcttatatgggtatggtggagtaggaaagacagctatcactgccgaatttctatatagagtcattagagacaaaagggatgggaagtaccctgatatagagtatttactatttttttcaagcaaggatgaatatctaagagaaaacgttacaactggtgagttatacatcgacacgtacaaacctgagttcatgacattaaatgatcttcagcagctaatatgcagtgctcttggcattactgatattaatgaactctataaaaaagaaagtcgtggtattatcgctatagataaccttgaaaatatcattgatgctgaaaaaataaaaataattgattttattaaatctttacctcgaactgtacagtttattgtcacatctagaaatgaagaagcatgtgaagaaaaaatacatgtagaagaattcaaagaggatgagctagggttaaactttgtctctgagttaatcgaatcggaaaatctggatgttgatatcgaaaataataaagttaaccaaatattaaaagtttctaaaggtaatgcacttataattgttcaagtcctcaatattattgacaggaagctttccagttacgatgaagtaataggttcacttgagagtatgcgttcaaaaaattctgaaatgatcgcgagctttatgtataaaaatacctttgacaatgctcttaaatatctagagggtaatggtcatccagtccgattagcaatgcagataatatctctctatgatgaaaaaatagaactttactctataagtaaattagcgcgaattgatgtttcggactctgaacgaatgtgtaattatcttcttgagagattaatacttaaaaaaatcggcgagtattacgagcttaatgaatttgcaaaaagatttgtatttattaagttgctgcctgaccgagtagaattaggtaaactaaaaaatgagatcaatgttcataaagcacgcatgaagaaaaagcttttagaactggataacactcttaataagaactctattttgcatcaaaatgttattgaatggcaaccaagaaattatattgataaaatagtcatagcggaacttttttctctgtatggagaagcaattaaatttgtaagcaagaaagataaaaaaggatatgaaaaatatcttaaagactttgatgatcatatgtttgtaactaatcatccttacgtcccattgcaaaaagcaaggttgttgaaagagggcatcgggaagttttatgttggtgatgccaacgtgttagatcaggttgagcatttatatgaagaagcaattgagtctattgaatatgattataggtatttaattggcaccaaggctcatgcttctctattaatgctttttggggtttttttaagtgaggtcctacatcaggaaggtagagctatcagatttcttgaggatgctaaggcttatcatggtgacatgagaaacaaaagttggttcataacatgtaattatcttacaaaagccttaaaaacaaaatataggcagactggtgaagttgaatataaagagcaattgattaaagttatcagagaggtggttagcaatggtgatgactcattagattttgagtttaacacagaacgttatcataggacttactcccgttggctaaagagttaa

SEQ ID NO: 246447 - DNA, 132 bp, Klebsiella pneumoniae
atgaatttgagtggggtctgggaggagcaagggggaaagggggaaaggagaaaggggagtggctggcaggtggagttgggtttgcgggagggggcggtggtgattgctggtggcattgacgccctggaatag

SEQ ID NO: 246448 - DNA, 243 bp, Klebsiella pneumoniae
atggaggacaagcgatcccccggtcagcaatttgccctgctgctgcagatcgccattcagcaatacgtcaagatggcttaccccgctaatctctccgctgttgctcagcgagtcaccttccatcgtcagcgtgctggcgctcaccatcccctcattgctgagcgcgtggccgctgatatggacatccctcagggcagtcattttactgctgttaatcgcctgcagatcgccgctgagcgttaa

SEQ ID NO: 246449 - DNA, 738 bp, Klebsiella pneumoniae
gtgtttctggccccagaagccagactggctgcgactctcggtgaactggttggcggcaatattgatgttgctcccggtttccatcgccagatcgccgccggcgctcaccgtcgctccggttatattgatcgtgttcgccgcggccatatacaggccgtcgctggcagtaatggcagccgtttgctcgctatcggtaccgctgaactgaatattgccccagcggttgtcatcgccaacacgccactgctcagtgcgggtgacgttattgatgctaccgccggtgcttaccagctgcagcgttttcgccgatatcgtcgaaccaatgttattgatatcgcccgacgcgctcaggtcaagacggccatccgcgcggataagtccggcgttaaggttgctgaagctattactgctgtcaatggcaaggccgtctcgcgccagcaacgtactgccgctgttgctgatattgccccctgccagttgcacggtattgccgctgattacgctaccgttccggacgctaacgtccttcggcgacaggtaaactttcggcaccatcacggtccgaccattaagcgttgcgggctcccaccacagaatgctgcgattgagcgccgccacctgtgcggcggtgagcgccacgccaaacgtcaggccaagcgtggtctgcacgtcggccgcgttgtccatcagataacgcatctgatcgagatcagagccgaggccatcaagatagcgtga

SEQ ID NO: 246450 - DNA, 1140 bp, Klebsiella pneumoniae
gtggctgacctgagtcgcgatgcggaacacgccagcggcagtatcgggccgatatttgacaaggagaaggagcagcggcgcctgcaggaagtgcagctgacaggggagattggcagccaggcggcagatattgcgcgcacgcagggcgagatagcaaaacagaaggcgataaaagaccctgcagccctgacggcggcggaagcgaagctgaaggcagagggtaacagcagtccgacggcagaacagattgcggaccaggcgggtcgtaccgcgatggctgcatacggaaccggcagtgacctgcagcgaggtatccaggcagccacggcagcgctgcagggactggcgggcggtgatatcgccggggcgctggcaggggcatcggcgccggagctggcgaatcttatcggtcacggttcagggctgagtgacggtgccgcagtggtggcgcacgccatcctgggcggtgcggtggcggcgctgcagggcaacagtgccgcggcgggcgcagcgggcgcggcagcaggtgaactggccgcaaaggctatagcaggcatgctgtatccgggcgtgacggacttgtccacgctgacggaagcacagaagcagacggtcagtaggctggccactatttcagcaggaatggcaggcggtctggccggggacagtacggcgtcagccgtggcgggcgcgcaggccgggaagaacgcggcggagaataactcgctgagtaagaaagataagatcttcgatatcaacccgatgctgaagataggtattgaaggggctgatggcgatccgctgaaaggcggtggtgggattggtaagtttacgattaataaaggacaacagaacaaacacttacctggaactaatgagtataaaatagcatcggaagcaggtttgaataaaagtattcttactgtctcacctgatttatttttacccaaattgggaactggtcagcaggtaggtaataccccagtcggtacccctggttctaaggaacgaataaactatggtcaaaatattggaaactatattgaccctcagactggagtgtccacaccgacaacaaacggcatagttcactatggtaaaaatggtgtgcatattgttcctgcaagaccatcagagtaa

SEQ ID NO: 246451 - DNA, 300 bp, Klebsiella pneumoniae
atggttttatatgattcaaatgtgtatttaaaactttcagtgcaaagagctttatttggaaatgtgactcctaatatcagagctgttgttgctgaattatcaggtaagaacattagcttactattttattttgatggacaaattgatgatgatgataaagagctagtgtcagtaatagaaactgaaattattgctgattttgatgaagattttactgttgacacgacggttaagcgtcttgatcccccacaaccgataaaaaataaaaatggtttactgatatacataagaaaagagtaa

SEQ ID NO: 246452 - DNA, 1179 bp, Klebsiella pneumoniae
atgtcagcggagcagctgaaagagacgcagacgtacaaagatgaacaggcgaaatacggcacgggcagcgatatccagcggggtatccaggcagccacggcagcgctgcagggactggcgggcggtgatatcgccggggcgctggcaggggcatcggcgccggagctggcgaatcttatcggtcacggttcagggctgagtgacggtgccgcggtggtggcgcacgctatcctgggcggtgcggtggcggcgctgcagggcaacagtgcggcggcgggcgcagcgggcgcggcagcaggtgaactggccgcgaaggcgattgctggtatgctgtatccgggcgtgacggacttgtccacgctgacggaagcacagaagcagacggtgagcacgctggccactatttcagcgggaatggcaggcggtctggccgggaacagtacggcgtcagccgtggcgggcgcgcaggccgggaagaacgcggcggagaataatgcgctaagcgatattgcagagcaacttgcttcggggcaatcaccggcggataaactcgacaagctgaataaggcagaagaagagcgattcaggcgggaagaatgcgccggattaagttcagacgcctgtggtgccaaaatgtacgaccagcgccgggaagccctgaaggatatggcttcgcttggtgcggacttcttgcccattgttggggatatcaagggctttgcggaagcggaatctgcaatagattatttggccgctgtaatagggatatttccggggttaggtgacggagcaggtaaagcgattaaagcagcagagacggcgctgaagaaaggggatgttgctgaagcgtctaagctgatcaataaggccagtgatgaagtatctgcaacactccctatgggaagtagatacaatcagatgaatcagcctaaaaacccgtcgtatcaacctgtcaggaaccaacccgctacgattagtaacagagaatattctggtcatgcattggacagaatgcaggacagaggaataactccatccgttattgaaaatgtgattaaaaatggaaaatcaactcccagccggaatggcacaacagtacattttgatcctaagaataaagtatctgtggttacaaattcatctggaagggtggtaacagttaaatatggcgataagtaa

SEQ ID NO: 246453 - DNA, 303 bp, Klebsiella pneumoniae
atggcgataagtaagaaagacattatttgtgaatatgcactgagttcgctgaacgatgttgctagttttgcgaaatttgtcagttatgcagaagatctggtgcagttgaatgagttgttcagggatgagcaaagcaaagaggattatcagcaaatatggttcgagttggaaattattaatgcgcttgctttgtctgaatgggaaagtgaaggttgcccggcagactggcaggctcgctgggaattagattttaagcaggatgcgtgccatgtaatggatgaattactcaatacactgaaatga

SEQ ID NO: 246454 - DNA, 690 bp, Klebsiella pneumoniae
atggcctttgctgccgccacccgccagcagggcgctggtcatgttccccgcgaactgagagccaatgctgcccccggtgctgatacccgctccctggtgctgcgtcttataatccgcctggttgtggatatcgctgaagcccagcgtgccggtattgaggctgtttttatctgcgcttcctgtggcagcaatcaccccgccattcagctgcgtgtggctgcccacagagacatcaaagccgccctgaccggcaaatatcccgctctgctcctgcaccgaagaccagtcactggtcattttgtcacgactggcattcaggcttcccgaccacgacccggcgccgaaggtgtaacccaggccaccgctgagactgctctgcgtgctgtcgtaatggtcgctgtcccgcagactggttatcgtcaggtcgcggccgacatcagccgtcacctgatggccgctgacctgtgcgccggccagcgtggtatcccgtccgctgctgatgatgacctgatgaccggcatccaccgtggtttcattctgccaggtgccgttgccgctctcatgccctttgctgctgctggcgtttgccgagatgctgataccggcgccacctgcgccagcgccaatacccaccccgatactgccgccgctgcttttgttgctgccggtagtctgctgtgtgtcctgtga

SEQ ID NO: 246455 - DNA, 1746 bp, Klebsiella pneumoniae
atggataagataactagttcacttcttgatacattttccgaacaatatgaattaactcgtttagataaaagtgaaagattcgagcatttttctaattttgcaatagtatctaaactaattagaagcacctttgatttagaagacattcatacaggagcaggtaatgattgtggtattgatggaattatcatatctataaacggaaaaattattgattctgtagatagctttaatgatttcttacccaactgctcttatattgatgttgacatcttgtttattcagtcaaaaacaacgtcatcttttgatggtgctcaaattttaaacttttgtcatggtgtaaaagattttttaaccgacccttctactctaccacaaaaccaaaaagtccaagagataaaacaactatggaatgagattctattgcattctgatatgatgcattctcgcctaccaatcatcagattgtattatgtttgcactggtgtttgggtcgatgacccgcatttaaaatctctgatcgatcagtcaaaattagaaatacaaaaaatggctctttttgatcgtgttttcttcacgccctatggcgcaattgatattcagagattgtatcttgatacaaaaaacaaactttcaacaactatcaactttccaaatagaataactcttcctgatataaatggaattaaagagtctttctttggtgttgtgccgttcctagaatacattaagttaattcaagatgaaaatggcactatttacaatatattttatgataatgttagagatttccaaggtgaaaacagagtaaacacaaaaatcaagaccacgctagaagaaggaaaatttgatctttttagtgttcttaataatggcgtgactgtggtaacaaattctttgacatcagcaggaaacagattcacattacgtgattaccaaatagttaatggatgtcaaacaagcaatgtattacatagttgccaaaccttagcaggtattgaaagcgtaaatgttcctatcaaaatcatagttactgatgatgatgatattaaaacagacattactttagctaccaatagccaaacagaagtcaaacctgagcaacttgaggctttgagtgtattccaaaaacaactagaactttattacaatacagaaaaatctgtttccttgtactatgaaagacgttcacaacaatataattctttatcaataaagaaaacacagatagtttccatcggaactcaaataaaatgctatgcttctatgttcttatattccccacatttagtaagcggttactatgggacaatatttaatcgttttaaagaccaaatgttcaatttaactcataaattactgtcatattacatatgctctttaacattatttagaatagatcagttgtttagaagtgaaaacctaagaaaggatcacaagaagtataaataccttgtattaatggtcgtccgtataattgtaatggacaaaaaaccattgccaccgaacagcaacgaacttgaacgaaaatgtgaagaattaaaaaaaatacttattaatgaagcttatagctctttactgataagcactgcaattcatatcgtcatgacttcgggcatcgatatatcacgtgatagatataagaccgagaccgagaccgaaatggttataaaaaacgcagagaaatacatttctgtaaatgggttaatttcaaaagacgttttacatttagccctaaaaccataa

SEQ ID NO: 246456 - DNA, 1464 bp, Klebsiella pneumoniae
atggaaattgttgctttatacatcaatgaatttaatggtgttattgacagtttcataaacgtcaatagttcatttacgtgttcgtataatgagaaactgttgagaatcacatccagtgtcaaccgctcaagttattacgataaaatcccatccactcttttaataggccaaaatggctgtgggaaaaccacaatacttacttttattgaggacttttattatgataatgaaaactcaggattcatcgtatggtacgatgatgaaagtataattgttacatgcaaggggatatctccctcccaaataacctcagacatcaaatattcttgcatacatacaaatgctcaagattttagcaacctacatatatatacaataaaatccaataacaccgttgacttcaattcttatttgtttggcaaaaggaaaagcactgcaagaaatttcattgatatttcgctaaatagtataggaaaaagaaacgcaaataaaaaaaatgaagttgataaaatccttaaatatataaagcaaaaaaagccacttcctgacacattggcaaatcgtgaactatctatttcagccaaattaacatttggaacaggtgatacttcaaaaaaaatactaaaaaacttaaattttaaagaaaaatatgaagaggaattaagtgttttttttacaagccaaattaacaactatagaggaaattatattataagccctgttcatcccgaatttcaaatatcattagattaccctttcgttaacagaagtcatttaaactcttacatcaagtcaaaaaaagaaaaatggggtgtaagcttttatccttttatctttagtaagctccctcataaaaataacagattaaacatacatgaagtgaatttttattcgatcctttccgttctttactcttttacaagaaagctgaaagtagaccgaaacacctcagacctcctctttcttaaactaatagtagtcgcgtatttttcatcacaaactaatttaataagtagaattgaattctttatgaaagattcattcccaagggcgatggatgataacaacttaatcatggaaatgattaacttagacaaaaacattgataaaatctcaaaaattgcttattgctgttttaaatatagtaaaaaaacaacatctgaaggtaatactgttaactattttatagatgagagcaatactgttccagaactcattgaaatgagcaatcaactcccaaaagaattagattcaatttttaacgtagagtgggatggcttaagcagtggtgaagtctcactacttcatattttatcaagtataagctatgcaatcgaaagtgtgaagttaaaaaatggaacgaaatctattcttcttcttctggatgaaatagatctttatctacatcccgaatggcaaagaactatactgtcaaccttattactgtctcttatacacatctga

SEQ ID NO: 246457 - DNA, 1173 bp, Klebsiella pneumoniae
atgattaagatctcaactcgattctctgaggcttttttggcgagatattatgattttatagctgaggacataatacttaccaaactccccatgcttgtggcgacttatccacaatccgaaggctttgttaattatatctgccagaactttagaaaactcattacttctgagtttgacatccttattgatttacaacatgagatcaatagaatcttccctttgatttctgaaagttataatcctagcgcatattattctgaatgcaatcttcagccatatatatgtattgaacaaatcagcaacattcatctaaatagtcgcaatgcatcacggcaaatattagatcttaagcctgaagcttcatctgaattagaatcattctcagaaacatacaacagtcattatacaagactgctacgggatgatatgttagcaactcaaaatgcccgtgagataaaaaaaatatgcatagatttcaaaagaaacattcaagataaaaaaaccgcttacgacaatatgccagagtggattggaaagctgagtgatatattctcgtatgataacatccctccttatatcttaacagagttagcgaccgacattgccttggattactgccctatgtgcaatgaaagcaaagttggaaatattattgatgaagatagaacatatagacctgctttagaccacttcctaccaaaatctaaatacccacatttttcattaagcatttataatttaatacccacttgtcatacatgcaactccactttcaagagagataaagaaacatttatacccatgcatgccaatccatatattataggtgccgataatcatgacctcttcgatttcaacgacctcattgaatatgtattatataattactcgagtggattgagagtgaaattaaagaccaccaccccagaaattgacaataacatgaagttattcaaaatccgtggtgtttataataaaaaatccaccaaaagcgacattttgttattagctcaacaatttaaaaattataactctcattggaagaactcaatgacttacgaagtttttcttgaattaatcataggttacaatccagaaaaaagcctttttgagatttgtcatggaaagctaaaaaaagacataattaaattctttgaagatttcagatggtaa

SEQ ID NO: 246458 - DNA, 2391 bp, Klebsiella pneumoniae
atgagtcgtgcagcagaagagtacctcttttctgttgcacattgcgatccctggcactatgacgaattgaatgatgcgctgattgagaaggctaagcgacatgcagaactccatcgtgttgatcctcttaccctgattcgtgatgacgtcgccagcttgcctggtttcctgcgcaagccgctggaaacaaggattaagtatttggaaaaatcagaagatccgcgccatttgcctacctatctgaatgaggtcattactccctcattagtgagaattgacaaggtccgtgctaaccaggcgtcgctgtcattccaggccatggctggcagggatagccttgatcaactccttcgacttgctgaactgaatcagcgggaggttaagcggctttcaacgctggtcgcaacgcacattgatatgatttttatccagctttgcggtgagatgctgaccgatgaattagcttctcccatcgtaatactggagctctatcgtcgtgtggcggccgaagtgtcacgccttgatgttatcccgccgggttatgaagcgctccgcagcaaacataatcgccgcaacccgattaattacgagctgataccgggcgcgcttgcccgtatgcgttgtgctgactggtggcaacgtaagctgtggcaactccgcaacgaatggcgggaagagttacttcgggctgcgtgccttgttcatcggcacgcatcaccttatgtcagccatgacatcctgttgcagaagcgggaacaacgccgtaaggcgatggattttttccgcaaccatgatctgattaacgaagatggcgacacgctcagcatggaggatgtggtgcttgcaagtgccagcaatccggcgcaccgtcgtaatgagatgatggcttgtgtcaagggcctggaattgatagctgaaatgcgtggcgactgcgccatgttctataccatcacctgtccgtctaagtaccacgccacactgatgaacgggaagcctaaccctacatgggatcactcgacagttaggaaaagcagcgactatctggttgatacgtttgcggcattccgtaaggcaatgcacaaaaaagagctgcgctggtacggcgtccgcgtagccgaaccacatcacgatggcactgtgcactggcatttattgtgttttatgcgcaaaaaacatcgacgtgcaatcacagagctgctgcgtcgtttcgctatccgagaagatcgcgccgaacttggcaataacactggcgctcgtttcaagtcaaagctgatagacccgcgaaaggggactccggccagctatattgcaaagtacgtcagtaaaaacatcgatgggcgtgggctgggtgacaccgtcagcaaggagacgggtaaatcactacgtgatagtgccgagcacgtcactgcgtgggcatcgttgcaccgtgttcaacaatttcgtttttttgggattccaggccgccaggcgtaccgcgagttacgattgttcgcatcgcaggcaactcgtgcaatgaaaaccagcaaaccgggcgctccggtacttatggatccaaaactggacgctgtgctcgctgctgctgatgttggctgttttgccacttacatcatgaagcagggcggtgtacttgttccccgcaaaaattacctcattcataccgcctacgagccgacagtcgaaccaggaacctatggcgatcacgggattcgtatttatggcatttggtcgccaatcaccggtaaggaaaacaaaatatgcacgcatgtccatacctggaagatggtgaaaaaggctcccgctaacccaggcgctgaaagcgccgcccagggcgaccccgtcgccccttggactcgtggcaataactgtcccccaaaccaaaaaatcagcaaaaaagagatgggaactgacgttgctacacccgagataacgacccctagtgaaggaacgggatcgcttgatgtgtctaaactatccgcaaaagagcgccgggctgtactgagaaggattacagaggagatctataacaagaagaaagcacagagccacgtaaaatcacgcaattactccccgcttgaagtcttgttgagcgattttgcttcatctattggcattgaacttagtgaatcccaggctaatcatttacttaatggtaaacacatacgttatggtgatcgcatttactacgcgactcacgatggggcgctgcacagtatggaaccagagaattcagatgttcagattcggaacgtgtggaaactcttgaaaaaacaaaataaagtagatgtaggtcacatcacagataatccagtagggcattattccgacatgctcaggaaactggaccctaggggatggacggtactctttgggggagataaggacagggggtga

SEQ ID NO: 246459 - DNA, 279 bp, Klebsiella pneumoniae
gtgggcagtcacactgtgaagttaaaactgcgttacgtcagccgtccattgaaaatccgtcgcctcgggggaattgacgaggtgatatcaactttaaatctgtgccataccgccgtcaacaaacagttctatggcattggtaaaactggcggcatcagaagccagaaatgcaaagattttgccgacttccgctggctcaccaatccggcccaacagaacctgtgctgccagtgcatcaaacaagcccttacgctcttcctcggcaaccagtccccctaa

SEQ ID NO: 246460 - DNA, 159 bp, Klebsiella pneumoniae
atgcctgctccctggaggtggcgttaccttggtacggtcagcactctgaatgtcaggctaagccgtgaggcccgcaagctcatcaggtcgctgtggcaggggaaaacggtccgggtaacagaccgtaatcgcctgctggcggttattggccccgactga

SEQ ID NO: 246461 - DNA, 267 bp, Klebsiella pneumoniae
atgaaccatcctgaaattcacgtcaaagactggattgatgtggccaatcatgagtgtgcggtgcaacggcttcttcctccaggaactcccatcggcgtctgtactgttgttctgaataaaaccaaaccgaccacccagatcgctggctggaacggcgaaaagtggtacttcatacccagccataactttgatggctatgcagatgagtatgatccctgtgtacgtgaactgaaacggggccgtcactgcccccacgaggcaatgtag

SEQ ID NO: 246462 - DNA, 693 bp, Klebsiella pneumoniae
atggctactcggaaaagtatcccaaatgaaaccaaattacggctgttttcggcatctgcaggtcattgtcagcatccagattgtctcaagccacttttccccgcagagataggcggggataagcatattgctgaaatggcacatgtcattcctcatggtgagacagggcctcgatacgaagagagaccagttgaagagtttgaaatagactcatttgaaaacctcatcctgctatgccctacctgccacacaattatcgataaagcgcctgaatcatttccgagaagcatgattttaggctggaagagcaaccatcttgtagccttagcgcacaagcaaggcattattcgttatgaagatagagggcaagcgagagaggctgtgatcgcagctatggatgaaaataaggccatatggaaagagttcgctcctgttgatggtgcaagatttgagttcaatcctgagtctgaaacggcacagatatggtcgcaaaggatgaaaagtgtcattttacctaatcacttccgcattcaggcgatcataggcatgaaccgatgccacctgacagtcgaagagcgggaaacctttgcccaatacaaagagcatgttcgtggactttctgaacgccatgtttgtggtatttctggaagtgccattcgttatccacatgatatggaaggaattttttcatga

SEQ ID NO: 246463 - DNA, 645 bp, Klebsiella pneumoniae
atgaaatggcaagttagatatgcacttgaaaatactaataaaagattaggcagtacgggttcggctgaacatgtaaatggggacgctataagaatatcaatccgtaatagaccggaaatattggcagttatctccgaatccgcagaaattactatcgatatagctgtgcaataccatgaacaatatcccgatatggattttctttgtggcttcagaagtgaatgtgtatggacgggggcggctatcagcttcctaaccgatgcaaatattggttggggcagctcaggtactttgagttctgctctttcggataataacgtgaacacggcttctcataaggattattccttctcctatcgacttattaaccagatgaaaaagtatttcagaaacatagaaagagagtttgatcgcgttttcactatagttttgaataatggaaagaagctcagggtgggcatgcttcttgaatatgaacccacagctgatgcagttcgctctttctgggatcagtttggccccgtcgatgttatttggaacattaatcctaatggaaaccctaccaaaccggcactggaagcagggcatcaattggggtgtggagtactaaaatgggcagagttgaaacatttgattactcgctga

SEQ ID NO: 246464 - DNA, 327 bp, Klebsiella pneumoniae
atgggcagagttgaaacatttgattactcgctgataatgtctgcaagcgatgtggctcgttacctattggatacgtgtcaaacattgagtttttttgaaagcttcatgtttggctcatcgctttttggggttggctctgattacgatatcttaattgtcggtccgtcaggagagttgttactccaacttaaagcagagttgaaacttgcaggggcggaattaccgttggatatattatacatgcttcctatggaggctaatgaaacttgctttgtagctaaccagaaatgtatctcccttcagcaactggcatactttggctcataa

SEQ ID NO: 246465 - DNA, 324 bp, Klebsiella pneumoniae
atgactgcaaaaagtaaattcaaaagtcctgcatttgaggctatccacagcgcggcttctggattattcagcgtcgatgctatcccgcaggaaacaatgcgcaactttgataaagcgtgccttaataacgtggatgatctgcaacctgttgagatcaaggcgctgcgcgagaagctgaacgtcagccaaccggtttttgccagttacctgaataccagtgtatcaacggtgcaaaaatgggaaagtggcgtaaagcgtcctagtggattggcgctgaaactgcttaccgtggtgcagaagcatgggttaaaggtgttggtttga

SEQ ID NO: 246466 - DNA, 360 bp, Klebsiella pneumoniae
atgcgcgtattcaaaactaaatggttcagcaaggcagctaaatcccacgccattaaagatagcgagttatgtcaggctattgaggctgcgatgcaagggaaagctgacaacctcggcgggggagtttacaagaaacgcctgaaccataatcgcgatcgcgccattattctggcgaaaggtggggagcactggttttacacgttcctttatgccaaacagaatatggcaaatattgataatcgcgaactggccggattccgcgagttagcaaagcactacgctgcccttgctgatgaaaagatcacggcactgattaagagtaaaaacctggtggagatttgccatgactgcaaaaagtaa

SEQ ID NO: 246467 - DNA, 879 bp, Klebsiella pneumoniae
atgagtaaattaagtcgtgaaatgaaaatgctggctaggcaagtcggcggcagctttaaaaccgttcacgatcgtacccgtatcattgaccggttttgtcgccatctgatggcgcttaatatccaggttcgggatgttcagcatctgaaagctaaacatatcgaaagttatattgccgaccgccagacagcgggtattgctgttcgaacacttcataatgacatgtcggcattgcgcactgtgtttcgcctggctggcagggaaaagctcgtaacatcagcacgcttaaccaataaagcgttgggattaagcggaacaagccgcgcaggcacgaaattagcaatcccggatgaacgatttcaggcagtactgcacaacgcacaacactatgaccagggacttgcctgtacccttcagcttgcccggttgctgggattgcgctcacaagaagccgtgcaatgctccggttcactgaaaacatgggaaaaacaacttgaacgcaatcaatcaacacttaccatcgtttttggcaccaaaggtggcaggtcgcgtgaaacgcggatcctcgaccgtcacgctgtacaacaggccgtaaatgacgctctgctgattgcgaaaacgcgtaacggcaaacttatcgacaagcccgacttaaaaaccgccatgaacttctggcgctcacataccacacggttaggattgttcggcaattattccccccacagcctgcgctatgcatgggcgcaggatgctcttcgctattacctgtcacagggattttcccgcaatgaagccagagcaatgacgtcaatggatctcggccacggcgatggcagaggccgctacgtcgagcgtgtttacaccaggaaggaggactaa

SEQ ID NO: 246468 - DNA, 225 bp, Klebsiella pneumoniae
atgatgccgaatttcaaattgttgcgattatcggatgtgatggagaaaaccggcttcagaaaatcatggatttatctcctgataagcaaaggcgattttcctcctgcagtcaaaattggttcccgttcggtggcatggctggaaagtgaagtgaatgactggattgctgagcgcgtcggcaaacgtgagggggaacagcaagcggggaaaccagacaatgagtaa

SEQ ID NO: 246469 - DNA, 1080 bp, Klebsiella pneumoniae
atgagtaaattgatcactgataccgaaacagaattcagtaccacacttcccctgcgcaaagggtctgatggctttgatacccggcaggactacctgattaagggctatttgccagcctcatccgttgccagcgcttacggtgccagcggatcttacaaatccttcttggcggtatcatggggatgccatatcgccaccggcaaagcatgggcgggtaaacctgtcacacagggagccgtcatttatgtcgttggtgaaggtgggatcggtgttccccgtcgtatccgggcatgggagcaaacgcttaacggcggtagccctattgatgcattatatcgcgtcgattgcccgatctttcctgccagcccggagagcgtgcaacaggtgatacaagccgccaaagatgtcaaagccgcaaccagtatgccgattcgcctgatcattctggataccctcgcccgctgcttcggtggttcagacgagaacactgctaaagacatgggcgcatttattcagggatgcgactacatcaaagccgccacacaggctacggtgctgattattcatcactctggcaaagatcaggacaaaggcgcacgcggttcaagcgcattccgggcagcgctggatgtagaatttaatgtacgccgtgaaggtgacggtggcgcgttgattctcagttgcaccaagatgaaagatgccgaagagccgccacgtcaggcctatgatctctatcccgtcaacttatacgtggatgatgatggcgatcagatcacgtcactggtactgaacgatgaaggccgcaaggccatcgatcataatatcactgacgatcctgatttatcgggtatttcacgaatcacagataaccacgttgccttatggcaggctatccgttctcgcacaggcagcagcgatagctgcacccgtgcgcgggttcgtgacgatatgagagcgatgggttttgacgtagccaaaaaatttactcgctggctggataaactggaaaaagatggcctgatcgctttagatggggaccgcattacgccgttgtcacaaagagataaaacgagggattaa

SEQ ID NO: 246470 - DNA, 1557 bp, Klebsiella pneumoniae
atgacaagcttgcaacaacgcgctgagttacaccgccagatatgggccattgctaacgatgtccgtggctctgtcgatggctgggatttcaaacaatatgtacttggcgcgctgttctatcgctttatcagcgaaaacttttccagttacatcgaagccggtgatgacagcatccactatgctgcgctggatgacagcatcattaccgatgacatcaaagacgatgccatcaaaaccaaaggttacttcatctacccgagccagctgttctgcaatgttgcagctaaagcgaacaccaacgacaggctgaacgccgatttaaacagcatctttgttgccattgaaagttctgcctatggttatccgtctgaagctgacatcaaaggcctgttcgccgattttgacaccaccagtaaccgactgggcaacactgttaaagataaaaacagccgcctcgctgccgtgttgaaaggcgttgaaggcttaaagctgggcaactttgatgctcaccagattgacctgtttggcgatgcctatgagtttctgatttccaactatgcagcaaatgccggtaagtcaggcggcgagttcttcacgccacagcacgtatctaaactgattgcccaactggcaatgcacggtcagacccacgtcaacaaaatctatgacccggcggcaggctccggctcgttgctgttacaggcgaaaaaacatttcgataatcacatcatcgaggaaggttttttcgggcaggagattaaccatacgacctttaacctggcgcgtatgaacatgtttttgcacaacatcaactacgacaaatttgatatcaagctgggcaatacgctgacggaaccgcatttcggcgatgaaaaaccgttcgacgcgattgtttctaacccgccgtactcggtgaagtggattggcagcgacgacccgacgctgattaacgatgagcgctttgctccggcaggtgtgctggccccgaaatccaaagctgactttgcctttgtgcttcatgcactgaactacctgtccgccaaaggccgcgcagcgattgtctgcttcccggggattttctaccgtggcggcgcggagcaaaaaatccgccagtatctggtcgataacaactatgttgagacggtgatttccctcgcgccaaatctgttcttcggtaccaccattgcggtcaatattctggtgctgtcaaagcacaaaaccgataccagcgtgcagtttattgatgccagtgagctgtttaaaaaagaaaccaataacaacatactgactgatgaccatatcagacagattatgggcgtgttcgacagcaaagcagatactgaccatctggcgaaatctgtgccgtttgagaccgtggccgccaatgactataacctgtcggttagcagctatgtggccgccaaagatacccgtgaaattgtcgatatcactgaactgaatgccgagctgaaaactacagtcagtaaaatcggccagttacgcaaagacatcgatgcgattgtggctgaaattgaaggcagcgaggtacaggcatga

SEQ ID NO: 246471 - DNA, 1134 bp, Klebsiella pneumoniae
atgagcaagctgagttatctggaaaaattgctggatggggttgaggttgagtgggtatcactgaatactattttcgatatttttgccgggggggatgtcccaaaagatgcattatcagacattcaaactgaagaatttaatattccaatactctctaatggtattggtgataattctttatatggctggacaaaccaagggaaaatcaattcacctagcttaaccatatcagctagaggaactataggctggacaagttatcgcgattcacctttttatccgattatccgactactcgtattaacacctaaaacagaattaaatttaaagtatgcttactactttatgaaaatgattgaaggcgattacaaaacgcctaaaacgggaatccctcagctaacaaaaccaatgttaaaaggtattagaatccccattccctgcccagacaacccggaaaagtccctggccatccagtctgaaatcgtccggattctggataaatttaccgcccttaccgctgagcttaccgctgagcttaccgcacgtaaaaaacagtacaactactatcgcgaccagttgctgagttttgatgagggtgaggttgagtggaggacattgggggagatcacgaggaaaattgcatcagggcgtaataagactcgccaggccgaaggtgatttccctgtctacggctcaactggcttgcttggctttactaatgaacctgcatattcaggggatttgcttctagtcgctcgtgtcggtgcatatgctggattggttaatgctgtatccggccattttgacgtttcagataatactctaataattcacccttctgactcatggaatgcgcgtttcgcatttcatcaactgacacacatgaatttaaatcagtacgcagtaggagcagggcaacctcttattacaggcggaatgttaaaaaatctgaaagtaccagtcccctcactgaacgaacaaacccgtattgcgaaaattctcgataaattcgaaacaataacagtgtcaatcaccgaaggcctgccccgagagattgaactgcgccagaagcaatacgaatactatcgtgatttgctgttcagcttcccaaagcctgaaactaccagtcactga

SEQ ID NO: 246472 - DNA, 3117 bp, Klebsiella pneumoniae
atgactcaccagacccacaccattgttgaatccaataactttatcgtccttgataaatacaccaaagcccagcagacaggcgacagctatcaaagcgagtcagacctggagcgggagctgatccaggacctgcaaaatcagggctatgagtttcttgctgttaaatcacagaccgcaatgctggctaatatccgggcgcagctccagagtctcaatggtgtggtgttcaacgaaagtgagtggcggcgcttcactgagcaatacctggacagcccaagtgacagcaaccttgataagacgcgcaagatccatatcgactatatctgcgacttcacctttgatgacgggcgtctggagaatatttatcttattgataaaaagaatctcatgcgcaacaaggtgcaggtcattcaacagtttgaacagaccggctcacacgccaaccgttatgacgtcaccattctggtcaatggcctgccattggcgcaaattgagctgaaaaaacgcggtgtggcgattcgcgaagcctttaaccagatacaccgctacagcaaggaaagctttaacagcgacaactccctgtttaaatacctgcaactgtttgttatttctaacggcaccgatacccgttactttgccaacaccaccaggcgggataagaacagcttcgacttcaccatgaactgggcgaagtccgataataccctgattaaagacctgaaggattttacggccacctttttccaaaagcataccctgctcaacgtgctgtttaactacagcgtgttcgacatcagccagacgttgttggtgatgcgcccgtatcagattgccgccaccgagcgcattctgtggaaaattaacagttcctttaaagccaaaaactggtcaaccccggaaagcggcggttttatctggcacaccacagggtcaggcaaaaccctgaccagctttaaggctgcacgtctggcgactgaactggacttcattgataaagtcttctttgtggtcgaccgtaaagacctcgatttccagaccatgaaggaatatcagcgcttctcccccgacagcgtcaatggctctgacaacaccgcgggtctgaaacgcaatctggataaagacgataacaaaatcatcgtcaccaccattcagaagctgaataacctgatgaaaggtgaagcagaccttcctgtttacaacaaacaggtggtgtttatttttgatgaatgtcaccgcagccagttcggtgaggcccagaagaacctgaagaagaaattcaaacgcttttatcagtttggtttcaccggcacgcctattttcccagaaaacgcattaggggcggaaaccaccgccagcgtgtttggccgcgagctgcactcttacgtgattaccgatgcgattcgtgatgaaaaggtgctgaaattcaaggtggattataacgatgtccgcccgcagtttaaggcactggaaaacgaaactgacgacaaaaaactcacggcggctgaaaacaatcaggcctttttacacccgcgccgcattgaagaaatcacccgttatattctcaccaattatcgtcagaaaacccatcgtacgtttccgggcgcgaaagggttcaacgccatgtttgcggtcagcagcgtggaggctgccaaagcttactatgaagcctttaagcagttacagcagggcactgacacgcatactgacgcccgtaagccactcagagtagcgactatctactcctttgccgccaatgaagagcagaatgcggtcggtgacatcatcgatgaaagctttgatgtcaccgccatgaacagcactgccaaagagtttcttgatgccgccatcgatgactataacagccatttcaaaaccaatttcagcacagacagcaaggggttccagaattattatcgcgatttagcgcagcgcgtgaagaatcaggatattgacctgctgattgtcgtgggcatgttcttaaccggttttgatgcgccgacgcttaacaccctgtttgtggataagaacctgcgctatcacggcctgatgcaggcattctcgcgtaccaaccgcatttatgatgccaccaagacctttggcaatatcgtgaccttccgtaacctggagcgctcaacggttgacgccatcacgctgtttggtgataagaacaccaaaaacgtggtgctggaaaagagctacaaagaatacatggaaggctttaacgacatcgttaccggcgaggcgaaacgtggctttatgacggtggtttcagagctggagcagcatttcccggacccggcgaatattgacagcgagaaagagaagaaggccttcgtgaagctgtttggtgagtatctgagagccgaaaatattctgcaaaactatgatgaatttgccactctgaaagcgctgcaaaaggtcgataccagcaacccagaggcactcgaagccttcaaagccgagcattatcttgatgatgaaaagctcgctgaattacaaaccatccgcctgcctgctgaacgtaaacttcaggactaccgctcatcctacaatgacatccgcgactggcagcgacgcgaaaaagcagcgaatgacaaggataactcaaccaccgactgggatgacgtggtgtttgaagtggatttgctgaaatcccaggagattaacctggactacatccttggtctgatatttgaacataacaaacagcacatgagtaaggatacactgaccgaagaagtcagacgccttatccgctccagcctgggcaaccgcgccaaagaagggctggttgttgactttattcagcaaacaaacctggatgagttgcaggacaaggtggggattattgatgcgttcttcgctttcgctcaacgtgaacagcagcgtgaagcggaagcgttgataaaagaagaaaacctgaatgaagaagcggccaggcgttatatccgcagctctctgaagcgtgagtacgcgacagaaaacggcacggaactcaatgaagcgttgccaaaactcagtccgctgaacccgcagtacaaaacgaaaaagcagactgttttccagaaaattgttgcgttcattgagaaatttaaaggggtgggtggtcaactctga

SEQ ID NO: 246473 - DNA, 306 bp, Klebsiella pneumoniae
atgctccagaacaaaatcagggaggcgttctgcgcctccatctctctcaatccgagaggataccagtacctgcacacggtagactttgtttcatctatgcagcaacgaggcattcacttttcataccctgcggctgctgtggtggggctggcgggccatctttcaggatcaggaagcgctggcaggaccaccatgttttctggtggtcagcgtgaaatgagcatttttaacggaccattaactgatgatgaaatagattctgtcacaagttggttattaagtaagagaggcattctaaattcatga

SEQ ID NO: 246474 - DNA, 648 bp, Klebsiella pneumoniae
atgaaatcaatctctattatgtctggcgtattatcgtctgaatccggtgcaccgttattttctgatgcattccctgagctggttaaccctgataacaggaaatttgttgattatttcaaggggggaactggcggtggtattgccggtcgcattcttccaggcacggataaagtatgggccggaaactatgtgaatgttcatgatggttatgctcagggtggcgcatcagctaccgatttaatttcgggccgtgcggttgttaatattggggaagaggctgtaaacggcgagtggggtgtttgcgtaaacgttgcaaacctcacagataatgtcgcgggtgggttggtattccgtgattcaacagaatctggcggcattggttttgctgcgacaatcagcccggtatcgcaagtggttgctctgcgtcgtcgtaacggtagttcatactcaaccttgttaactgtacctgctgttatccctgtcggggattttaacctgcgcgttgtcgccagtggttcgtcaattaaggtctatacggaaaagggcctggttattaactacaccaccacagatcttggcgctgggtttaaccgcgcggggattatttgctacgggtctctgaaagtaactgattttatggggggataa

SEQ ID NO: 246475 - DNA, 1299 bp, Klebsiella pneumoniae
atgaacagcttacttcctgacgatatcgatgaactgaaacgtctccttgccgaacaggaggcgctgaaccgtgcccttctggaaaagctgaacgagcgtgaacgcgaaatagatcacctgcaggcgcaactggataagctgcgccggatgaacttcggcagtcgctccgaaaaagtctcccgccgtatcgctcagatggaagccgaccttaaccagttgcagaaagaaagcgatatccttaccggtcgggtggatgacccggccgtgcagcgcccgctgcggcagacccgtacccgcaaaccgttccctgaatcacttcctcgtgacgaaaaacggctgctgccggcagcgtcatgctgcccggactgcggtggtgtgatgagctacctgggtgaggatgccgcggaacagctggagctgatgcgcagcgccttccgggttatccggacagtacgtgaaaagcatgcctgtactcagtgcgatgccatcgtgcaggcacctgcgccttcgcggcccgtcgagcggggtatcgccggaccggggctgctggcccgcgtgctggcctcaaagtatgcagagcacaccccgctgtaccgccagtctgaaatatacggccgccagggtgtggagctgagccgctcactgctgtcgggctgggtggatgcgtgttgccggctcctgtcaccgctggaagaggcgcttcaggactatgtgctgactgacggcaagctccatgctgatgacacgcctgtcccggtgctgttgccgggtaataagaaaacgaagaccgggcggttgtggacgtacgttcgtgatgaccctaacgccgggtcagagctggcgccggcagtgtggttcgcttacagcccggacagaaaaggtatccacccgcagagccatctcgccggcttcagcggtgttctgcaggcggatgcgtacgccgggttcaacgaactgtaccgcaatggacagataacggaagctgcctgctgggctcatgcccgccgcaagatccacgatgtgtacgttcgcaccccgtcagcgctgacggaggaagccctgaaacggatcggcgagttgtatgtcatcgaggcggagataagggggatgccggcgaagcaacgccttgcagaacgtcagcaaaaagcgaaaccgcgactgaaatccctggaaagctggctgcgtgaaaaggtgaaaacgctgtcgcgacactcagaactggcgaaagcgttcacgtacgtactgaaccagtggccggcgctggcttactatactgacgacggctgggccgaggcgtaa

SEQ ID NO: 246476 - DNA, 1347 bp, Klebsiella pneumoniae; identical to SEQ ID NO: 220382

SEQ ID NO: 246477 - DNA, 501 bp, Klebsiella pneumoniae
gtggcaaagcaaaagttcagaatcaccaactggtccacctacaacaaagctctcatcaaccgtggctccctcactttctggctggatgatggggcgattcaggcctggtatgagtcggcaacgccttcatcacggggaaggccccagcgctattctgatctcgccatcaccaccgttctggtcattaaacgcgtgttcaggctgaccctgcgggctgcacagggttttattgattccatttttgccctgatgaatgttccgttgcgctgcccggattacaccagtgtcagcaagcgcgcaaagtcggttaatgtcagtttcaaaacgttcacccggggtgaaatcgcgcatctggtgattgattccaccgggctgaaggtctttggtgaaggcgaatggaaagtcaaaaaacacgcaaagaacgccgtcgtatatggcgaaagttgcatctggcagttgacagcaacacacatgaaatcatctgtgcagacctgtcgctga

SEQ ID NO: 246478 - DNA, 132 bp, Klebsiella pneumoniae
atgccagtccatcaattcgatcggcttgccggtcaagtgccccttcacatgggggacgaagttataaaaatcgagaacgtgctgggcgcggccttcatcaaagtaaacaccgcgctccgggccgtgctctaa

SEQ ID NO: 246479 - DNA, 240 bp, Klebsiella pneumoniae
atgacagaaacccagatctacgagaacattaagcaagccatcaacagggcaccgcgaaatggtcaaacggttgaaatgcacctccagatgatcaaatacgccgaccatctgaaaaacgttactgctaaagagttttgcgagggtgtagggcttaaagccagttttggtactgaattcagcaaaatgaggaatctcaccgaacgcctcaaagccgctgggcttgatacctcgaaactgtga

SEQ ID NO: 246480 - DNA, 438 bp, Klebsiella pneumoniae
atgattgcacgtgaagcatatcggcagtatcgggaagcggtgactgcttgcaaaggcatttttgcccgaggtggtaatgtcactggcgattatggtgaacatctcgtaaagcaactttatggtggtgaattattgcctaactcccataaaagcgccgatgtaagattagacgatggcacactgttgcaggtcaaaaccagagtcaataaaacccagttaggcggaattcgctcctgggatttcgattacctgatcggcattcagcttaatgacgatgccgaagttgtgttggcagttcgtgtccctgtagatatttgtcgccaaattgccggatatgccagccatgataacaaatttgtgatccatcttaatcgcgtacttcttaaaacgcctggtgtaaaaaatgtcactaaagagtttcgtcagtgtaatccttaa

SEQ ID NO: 246481 - DNA, 396 bp, Klebsiella pneumoniae
atgccaaaaaagaaaccaacacccgcagttaaaaccatcgaagacgccaaaactgaatgccgtaatcctaaagatggtaaacagaaatacgttgcagttgagcagtggttgaagaaattcaaaaaatggtatgctccatctggtaatgaatataccgtcacactccccgccatagaaatctacagttatatatctggactgaatgaacagggaaagcaatgctacgcgaaccaggacactttagccgaagttggaatggtaaagcctcgacaagtacgtaacattatcaggatgtttgaaaatttgggagttgtccacgtcgaggaaaggaaagggcaaacgagcatttacactgcacttccgttcactgatgctcacgttatcccaccagattaa

SEQ ID NO: 246482 - DNA, 156 bp, Klebsiella pneumoniae
atgaacatccgattcaccgatgaaatccacaaggcgcttgttgaacgtgccaaccgtgaagataagtcagccgctgcgctggtgagtgaattaataacagcagtcctaaaacgagaggaaccaaatgccaaaaaagaaaccaacacccgcagttaa

SEQ ID NO: 246483 - DNA, 1179 bp, Klebsiella pneumoniae
atggataataaattaaaactgttcattagttattgtcatgaagacaaacatcacaaagaagaaatattaaagtatcttcaacctaatgaagatattgaagtttggtacgataaagaaatgctcgctggcgatgagtttgatgaggttatatctaccaaactcgaagaaagtgatgtatttgtatttctcataacacaagactttctgacttcgaaatactgtaatgaaattgagttaagtaaagcattagagagaaaagcttctgacgatgagcttcgtattatccctgtgatacttgactattgtacattcaaacgttctcgtttgtcgctctacaatgcaacaccgagcgatgcaaaacctatttcttcctatccaaatcaaaaacaagcatatttagaagtttcggaagccattgaagatgtggttaaatatctcaaagaaaaaaagacacaatctttatatgcggtaactgaagagacggtagttgaaagaaatgcactgagaactaattttaagctgcatttacttgatcttggatttactattcagcatagaaggaaggagattctttatcttgatgatttgtttatttatccagatttaaaaagaacaaaatatgaattcgatgattatgatgtctttgtgaattcaaaaaatgttttaagccatgaaaaaattagtggtaataaaacactaattattggtagtgagcagtcaggaaagtcaactttagccaaaacccttttccgtcaatatcattcgaatggttcaataccggttcttattaaaggcgattctttcaagaaagtagccgaaattgaaaatgtagttaataattttctaaatgaacaatatgataatgtagaaattataaatcacaatgagttgattatcatagttgatgatataacagaatcacctatgaatgaaaaattccaaagagtgttgctaagtaacctcgtggaaacgtataaaagtattgttattattgctgactctaaaattagatttagtgatcaacttcttaaggatttcgatttttttacaacttatgagattgcagaatttagccatatccaaaaaactgagcttgttgagaaatggaatcaaattggcttagatgaaacatctgatatcgaggatattcaaagtttaaatgataatctaaagcggtaa

SEQ ID NO: 246484 - DNA, 576 bp, Klebsiella pneumoniae
atggacgaaaccaaaatcaatatgctctatgagcattataaatgtaatgttgaaacgcttaaagcagctgctaacaaaagggatttaatgttccttatgctaattttgtccattatgcttatagcgatccaaagtgtgaatgctgaattcattaatggactattagtcagcgtagacaagctcgatgataaaaggctccctggaaacgcattactgttggtaacctttgcattggcttcatttgttttattcatacgctatacccaagcatgtttctttatagatatgcaatataaatatctacacgcaatcgaaacagaattaaattctttattcccagatacacagttgtttacttttgagggactattttacaaaaatagcaacagcttttacagaaaggctgtttcatttttctataagcgagctttttcgattattttgatttttttcttgattgtgaagatgatgtatgaattagatgggaaaacccattttgatatttatttttatctcaatgcggttgtttttattacctacttgatatatgtgtttatttatcttttcaaaaggtga

SEQ ID NO: 246485 - DNA, 1296 bp, Klebsiella pneumoniae
atggggtacagaactcttccatacacgtttcagcgaaacggcaactactacctgcaaattcggctttcaaatggcaggatgtataagaaatccctcctcactgacagctatcgcgaagcatccgctttgatgatcagcatcattccgcatatcccttttcttaaatcattaactactccgctccctgtgttcgaagcgttcttatcaaatctgattgcgttagagcgcaaagctgcaataaatccacttttaccctatcatcagatagctcctcctgttgaaattgtggcgccagccgaaccggaaaaagagctaaccctttcggatgcgtgggcgatgtacaaagacgaaaaggggcgaaactggacgaaatcgatctcaatggcaaatgagcgctacatggaagtgttgctaactgtcttgggtggagaaactaatgtcgcggctatcaccaagcaggatattaaacaggtgatggaagttgttgagaacctccctaagcgcgttgtacagccttatcgctcaatgagcattcagcaattgatagaatgtgacgatgtcccggctgatgaactggtcggggttgaagccatccataagcatctaaagctctacaaatcactgttcaaaacttttcttactgaaagcaaagacgttttgctgaagtcgccaacagatggagtagtggctgcaccatcgaaagcaagatttggcgcatacagcacagcggagatgaaaaagtttgtagggtgggcgctcgagcagcctgatgtctggcagaaatggatcaccttgttgttggcgtatacgggagccagaagaggggagatcgccaagctggagaaaacacagattaaatttgatgaagatagccagcgttactatttcctgattgcagaaggagggcaggggaaaaccgaaaatgctacaaggcaggtagttattcaccctaagttaatcgaatggggtgtcatggagtacgttgatcgccagtggaaagagcggattttctcggaggtggcaggcactaatatgacaaagattggcaaagtatttgctgacctgcgtgatcagcttggtattccgtatcttgatgattgtggacaacggcgtttactacattcggtacgtcactcagtatgctctgctgcaatggctggatgggtgtcgaatattctgcacctacagcagacggtaggccacaagaagagcggcggcatcacaaaacgctatctgcatacgttccctctttcctcggtttcatatgtgattgatggaattaattgggaggcctaa

SEQ ID NO: 246486 - DNA, 1383 bp, Klebsiella pneumoniae
atgatctcattacccggaattattttaattgatgataatcaagaacaattagacaatattaacagagcatttattaaaataggattaccctgcctgcccattttatatgaaaataatcctgaaaacgaaagtggcattagtcatgttgaacttaacaacattactccaaggattgtaatcactgacttaaacttgactgaaacaaccgcagttgaagttacgaacttagtaggcccaatattattacttatagaacaaataaatatcaatggtccatacatattgattttctggtctaaaaacaaaagcctcgttgatgatgttattaaaaaggtcattgaaagaacttctaataaaaaaacattacctttatgctgggggttacttgacaaaactgaactcctcgataaccaagaagctctgagaagtgaaattgaaagaattttaaatagtaattctttactaaactctcttttcaactgggagaacagaataagcaccgcagcgcaagaaactataaattcattatatgaattaacttttcctgatgatacagagaaagattacgcagatactcacatattaaaactgcaagaggttattgcattaatagcgaatgaatctttaggggcgaaaaatgcagacaaattcccctccttagcagtagaccaaggtttgttacctgtcctaagtgacaggctacaaaaccttgaaatctctcacatagactggaaagaatcagtaccaaagattggtcgaaaagtttctgtcaatgatgcaatgaaagctaaattaaatacattctaccatattgaaatgactgataaagaattccctaaagaccacagaggtatatttctaccaatatccaatacatatataagcgatgaaaggaacagagctaaaatgtgttcaaaacttggtgttggtaatttttcggaaattctaaacactgaattcattgatctagataaagtatactcagaaggtaaacaacaactaatcgataatatcatcatcggttttgtagaattatccgccgaatgtgatcatgcgcaaaagaaatcaaaattacatcgatacatcatctctgctttaattcctgacaccttgcaagaatattgtgtattcgctaaaagaaacactagacacgatggaatctacagactacctccaatttttataaatgaacagaatcatattttaaagctatctttcaaatatcaaatcggcacaatagataaattccaaattgacgagaaatcagtaaatcacaaatggtttggcgacccattttttaggttaagagaacaaatattatcggacatatcattcaaatgttcccagtattcgtcaagacctggaatagtaagtttttattaa

SEQ ID NO: 246487 - DNA, 2151 bp, Klebsiella pneumoniae
atgaaaacaaatagttacttcagagctaactcccatcttctcaaacttttgggtgacgagttgattggagacgatcgcttggctgtatttgaactagtcaaaaatgcctatgatgcagacgccgaaagtgtggatgtagaattaaaccttaaccaagatcatcccagcattatcgtctatgatcattttggtgttggtatgacaaaggatgatttcataaacaaatggatggaaataggtacaaaaagtaaacgagctgaaaataggacaaaaacggttaagtttcaacgattgcctcttggagaaaaaggtgttggcaggctcgctgtacacaaactaggaagaaagcttagaataaactctaaagcgctagatagtaacgaaatcgaagttaatattgactggtctaatttattggaagcagcacaatatattgaagatactgtagttgaaatcaatgagttagatgaacctgttttttttgataattcaaagactggtacccgaattgaaattagtggcttgaataataatgagtggagtagaggagatgttagaagtttaaaacgtatgctaactagcttggtatctccttttgaaacaaactctgattttaaagttaatttcagtgtgcctggccttgagaaatatttagatggaatgcctgacgcggatgatattttaaattcggccatttggaaatatcaatttcagatcgataatgatggaaaatttttctatcaaattaattttcaacctccaaaaacctttaaaacactaaccgcacaagagaaaaaagaagaaaatacacaactacaacttcttgctccaacaaagaatgaaataattagtcgagatgacgatattaaaaataatcttttacttaattcccgagatcttttaggaataggtcctattaagggggttttgtatgtttttttacaacagcaagatattttaaatgccctggggaatgcccagttaatcaagaactacctgaaagaacaatctggaatccgggtttatagagactcgattagagttttcaactatggtgaaccgtacgatgattggttaggtcttaatactggcagaattaatcgacctggtaaaaaaatacataatgggatgattattggttcaattgatcttgaccttgagtcaagtaatgaacttaaagaaaaaacaaacagagaaggtttcgatgataataaaaagtatcgtatcttcaggtggataatatctagcgtaatcgaaaagtttcatattgaacatgctgatcagcgagattcaataacccaatttttaaaaggcaaccaaaataacaaaagattggtaactaatagatttgaggaaaatataagtgatttaaagaaaacaatacaaaaacatggactcgaaaaggaaatgtctggaaaactcacacttattgaacaagattttctacaaatgagagaggttactatcaactccggtattgctggagtaaaccttgcggtaatttttcatgaagtagagagaggggttgatgaactaaatcaatcaattaaacggtcagaagattatgagttaattaaaaagagagccgagaacctgtctcaattactggaaggttttgctcctcttcttagaagaaacgaccagaagttattttcaatgaaatcacttgttgaaagagttcacaatcttactaagcataggtttagttatcataatgtaattttttcatgcccattacttactgatcctgagcaagattttaaaataaaagctcctttcgggctagtacaagctgcattaaataatattattgataacgcaatacattggactcgttttaaattcgaaagcatcgaagataagacttataaaccagcaattagaattcaagggcttccgaattttttctctgatggtcctgcattggtgatattagataatggtatcggctttaatatttcgcctgaggaagcgattcaaccattcaaaacaacaaggccaagtggaatggggttagggctttattacgcagacaaagtaatggaagctttgaatggtaagttgattatctgcaaacccgaagatctcgaactttctgaatcatacgatggggcagtagtggttttaatttttcataaaggaaatgaataa

SEQ ID NO: 246488 - DNA, 345 bp, Klebsiella pneumoniae
atgagggcgggcagtgtgattgtaatgcttgtcctgctggccgctatcttgtggcagaccgaccagcttagcgaggcccggacccgcaacaagctgctgaccgaaacggcgaccggctacgaccaggttatccaggaagtgaaggcgaccgccatacaaacccataagttactagcagaggtgaaagtccgtgagcaacagcgtaatgcagaaggggagcgccgacgtgaagcaatgcaggccgcgttcaatggtgacacgtgcgctgttactcctgtgcctgacgctgtcagccgcagcctgcaaaaacgcaccgcccgcgccgaacattcaactggtccgtga

SEQ ID NO: 246489 - DNA, 843 bp, Klebsiella pneumoniae
atgcctctggttactcgcaatgcgttcattgatactgaattttttgtaaaagcaaacttggattttaactcaagaaccataaagtcctttgaagaactatgtgagaaagatgagtttaggcatattaccagtacaattgtagtgaaagaagtggaacggaaaatcattgagcaaatcaaagacgcattaaagggtattcacaactttagacgaaaggctatagttcttagagaatacgatgatgataatattaaaagcttttttaatgaaatcaatgagggtgatatacaaaaaaaagctctaagcgcttataatggttttattgagaactctaaaacaactgttgtagatatgtcatcagtagacctaaatgaagtcgttgatatgtatttcgacaaaataagtccttttagcgccaagaagcctaacgaattccgagacgcattcactcttttagcaatacgttcggccttaatgaaacacgaaaagatttatgtggtttccgatgatcccgaccttaaagggttttgtgagataaatgaaaattttgtaattgtagaaacgctaagtgaattattggatatttataataaacataacgataaaagagctggcttcattgagaaattcttagagattaaagctgatgagatagtccagagattaaaagaagaattagaaggagctagtgcttataactcatctatatgggaagattccgagattgaaagttttgaggttgttcatatatatgattttgaacccaaaataattcatttggacgatgagagttgtcagatttcttttgatgttactgtgaatttcaatgttaaagctaaataa

SEQ ID NO: 246490 - DNA, 153 bp, Klebsiella pneumoniae
atgctggaagatattgcatatggcgtggtttgcttactgttcctcatcacgttaccagtgtcgctgccgattatcacggcaatcaggatgttggtcaccaagcgcaaactgcgtaaagagtacggacacgatgagttgatgagggacgactga

SEQ ID NO: 246491 - DNA, 558 bp, Klebsiella pneumoniae
atgaacatcgaaacagtaaacgagctaattcggtcgctggagtcggcaggcgagctgtcaatcagagagcagaagttcctgaagctggcgaaagcgtaccagcagctggctgcggagaatgcacgatattcgatgtctgcaggtcatgccgaccagaggatggctgaatctcgcgctgtgcgctctgctctcggctttaagccagatgcagacgatgtttccccatccgatctggtggaggcaataaaccaaatcgtggcggagttatgcgtcattcgtactgctcaccctcaacctcttggaccagcaatggacgctgcgatcgatgcatttaatgcggaggaaatgccagagactgggatgctcaacgctcacttcatcctgcgtgaaagcatctgcatcaaaacccccgccaccgatcgcatcgtggccgaagccgaggcgcgcggagttgagaaggctatcgctcacctggagaagaagttcagcaatatcggcgtgcagatcatgaatttgcagtggctggcagactcgctgcgcaagggagcatcagaatga

SEQ ID NO: 246492 - DNA, 429 bp, Klebsiella pneumoniae
atgagtaaagcaaccataaccagaaaacgtcttgaagctatcgcttacggctcagtacgtcagagtcaagaagaaggtgtcatgctggctcgtatggcgctggccgcaatctcctctcagccagagcaggatgattattttgcatctctgatagcggctgcaagaatccgtgccgataaagcgatatgtatgtttccgcagccgaactacgtcctgaataaggttgcagaagaaagtggggaagtcataaaagctgtaatccactacaccgaaggacgcgaagagtggtcaaacgttgaatcggaaattattgacaacctggcgatgctactgcgtctggtgaaagagggagatcaggtgattggttttaccccgccagactcctgcagcgccgccgcgctctcagcctctcaacaggagggcctatga

SEQ ID NO: 246493 - DNA, 516 bp, Klebsiella pneumoniae
  misc_feature (487)..(496): n is a, c, g, or t
atgattggcatttatttacccgcatttccgttccggggtgtaaaagctccttatttgtggtttttatataaagccatgacggctattaaagagccgttggcattgattacgacacaagattatttgttaccctgtacaaagtggcaggaagaggggcgctgggaggttactgatgacggacagaaacgtttaggctacgaacttcctaatttttcagttcgccaaaaagacaacgtctatattgttaatgaagaatcattatctgaagcattaactgagtgtggcgataacagtaatctcctttttaagaaatttctgacggaaatcattcctgattttaaaaatgctctaatcgctgcattacaaaaacaaaacgacattgaatgtattctgaccatatgcaattgtccatcactgaatgctgcagcagaaaaatataatattccagttataaatcttgaattaggtccgctgcgttctccgacgnnnnnnnnnnggtgtcaatggcaacactga

SEQ ID NO: 246494 - DNA, 951 bp, Klebsiella pneumoniae
atggccaaaagcaaagtccaattccagaaaggctacagcctgtttgattttttcaaggactatggcactgaagcgcagtgcgaaaacgcgctgctcgcttggcgttttcctaacggctttgtctgccctgaatgtgccaacaagacctgttgtcgcctgagaaggcggccacgtgtgtggcaatgcaatcactgccgtcaccagatgtcattgactggaaacacgattttcgcaaacaccaagctcccactgaccaagtggtttctggcaatgcacctgttgtcacaaaccaaaacaggcttgtcagcgatggatctaaagcgccagttgggcgtcaaatatgacaccgcctggatgctcaagcacaagctgctgcaagccatgaaagagtccgatgacaagcagcccatcagcggcatcattcagctcgatgatgtctactggggtggagagcgccgtggtggcaaacggggtcggggcgcggcaggcaagacgccgtttgtggcagcagtagccctgaacaaggaagggcatccaatcaagatgcggatgacggtggtcgatggtttcaaaaccaacgtcattgctgattgggcaaaacggcatcttgccagtggtagcgcggtgatatccgatggattggcctgtttcaaagcggtcaaggaggccaattgtgagcacctgggtgttgtcaccgggggcaaccttgatttgctggatcatccggcattcaactgggtaaacacgatgatagggaatgtgaagaactcgctgcggggcagttgtcataagctcggagcgaagcatttaccaaggcatcttgctgaatactgcttccggtttaatcatcgttttgacctcaagagtatgtttgttgaattggggcatgcagtcgtggcaagcccgccgatgccatatcggctcttgaagctggctgagggtcatgggtaa

SEQ ID NO: 246495 - DNA, 408 bp, Klebsiella pneumoniae
atgtttaaatcgttgaatactgactggctgaagctggcattgcttcgggtatttcagtccggctggactgtagtcgtgctagtaggtttgtcgctgctgttctgcagcttcactggccgtcaggcgtttattgtctggtggctcaccttcgccggtgtgctgttaatcggtgcaagcgtatggcttggtaatctcccgtaccgcctgctgcagccgggtaattccactcgccagtggtcaggtgctctgtcctggattatctggggcgcgggtttcctgttactggccgtggcacccgccaatgcaaaagacccgtggctcctgctgtttaatcctctggcgggattgaccgccttcctcctctggttatgggcttcacataaggagccgcttaaatggatccgataa

SEQ ID NO: 246496 - DNA, 219 bp, Klebsiella pneumoniae
atgggtaagggctgggattcatcgttaatcgcggggcggctcgatcgcctccgtcaggaggtgcttcaccgggttgctggtggccctccgcccgttccactggactacacaggctgtgacggtactcatgccagctattaccgcaaaggctgggactccgtcgatacacgagacatcgtctggcagtgccagcgatataaggaaaaacagaatgtttaa

SEQ ID NO: 246497 - DNA, 516 bp, Klebsiella pneumoniae
atgaaactgataggtaatttgttgtgcataggattcattatttgggttgtttcatttttcgttaaagccgagaaaaaagagcttccgcctaatgaggtattgatttcccagttcgataatatgggagtctttgataaagacgaatggaaaaaagggaacgtggtagaaggtgtgcaagtatacactgctcgtacagatgataaaatcaccaaaagctcatggctactaggcgtgaaacaagcaggattaattgcaatatctgataagaatgatcctgcatttgagagtatttctgtattagcttcatgttacaaactcgtaaaaggagtattggggcgtgatgataaagacgatttcaaaattgttgaagataccttcagaacggccatatcatctgaacctatcgacaatacacgtagcgacacaggtgtgattgatgggtatcggtttaaagtgcagatggggccagtcgctgcgaatttaaattcatattcctgctcaatcaaagaaaagtag

SEQ ID NO: 246498 - DNA, 555 bp, Klebsiella pneumoniae
atgaaccgttcaaacgcaatccagattatccatatcgccaaaggccagctggcgctcgacgatgatacataccgctccctgctgggggcggtcgttccgggcaagtcgagctgtcgcgagatgaccatcatcgagctgcagaatgttatccaggcgctggaggctaaggggttcaaaagcaaacctctgcgccgttctaaacgccgcatgtctgccccgtcagatgtgagcctgaaaatccgcgcgatatggaaaacgatgtttaatcagggttttgtcagggatggtagcgacatcgggctggaccgtttcgtccgtcgccatacgcgtattcgcaatggcggcgaaggtgtctccagcctggaatggttgcgcggtggtgccgaggataatctccttgagagcctgaaacagtggcatatcagggagatgaaaaaagccatgctggcgcaccatgcccgacttcctgaacacccggtgaccggtgaagaaagccgggactatgacacaatctgcagcggctacgctgacgcagccagaaggtggacaaaatga

SEQ ID NO: 246499 - DNA, 198 bp, Klebsiella pneumoniae
atgtcatccgaagataaccgccttcctaaagacgttgcctttgcccacgccgtacaactggctgctgcatttatcagtaacggagatatccgcctcaacggcagcacccgcccagaatcagcgactttcgatatgacgacggaccttatcgagacgctgtatgaaagaattcagcagacgtgggacgatcttgattga

SEQ ID NO: 246500 - DNA, 306 bp, Klebsiella pneumoniae
atgaataaggtaaataaaaataatgtttctgttgctgacctctacatgaaatcacgcggcgtaacgctggactatcggacagccgctttattgaacgtagaggctgagattaaaaatatcaaacctggtacttccttttacagtggcattatgaaggcggttatttatgttcctctgcgggcgcaaatacgggcggatgagtcccgcccggaaggttctgacaaatcaatcaagatcgtcccacgtctgctgaattctttcatacagcgtctcgataaggtccgtcgtcatatcgaaagtcgctga

SEQ ID NO: 246501 - DNA, 540 bp, Klebsiella pneumoniae
atgaaaaaagaactaaatagtgtttttcctacacaaagcaaagaacctgtaatcgagcgaatctttaagcttgtcgaaaggtatccatcacgtagcgcagcagcaagggcttgggggatcaacgtcaatacgctgaagaattattatcggagacaggacatagaaccaaccccgcgccagagtcaactcatcaaaatcgcggaggtagaaggtgtttcgctggaatggttaacaacaggagatggagaaccaccaaagaaccagaaaagagctagtcagactactgcatcagataagctcatagctatgctttcttttctgactgaagatgagaggagaggtcttactgaagttttagcaagaaaaggggtggaaacagttctctatctccttgacgaaaaaaatctcaagttgttgagatatagcgatcaagataaggatcgcatgctcgccattttcgaagagaaaaaaggggcatctgcgcttagtgaggatgtagccgaacctagccagtctaaagccagcaagaaggccggttaa

SEQ ID NO: 246502 - DNA, 261 bp, Klebsiella pneumoniae
gtgatctactattccgaacagttatttagaggtcctaatacatcagggggatattatgacaaagaggatggggttctttatacttttaactccacctcaaaccaagaggaagaagaaaaagagttttcagtggagttagatttgtcatttgaaatcgatgaggatgaattcattaatgatgaattttatttacatgttaaagggttaagtgcgggtattgagttttgtgtcgaagaaaactcatgggaagattatatgtag

SEQ ID NO: 246503 - DNA, 999 bp, Klebsiella pneumoniae
atgagtcaaagagcatggtcttttaaagcagtaggtcaagatgatctccgatactatgggaataatggttatcacgatgattccactagtttttatagatatgacaattttgtcccaaatcataagcaagttaaaaaaggggatattgtcatagtcacggataggaagaatgttcttggtatatcagttatagataacttgttatcggcaccataccttaaagtgcgtaaccgatgcccatatacaaattgcacaccggcaaaattaatacatcgaaaatctaaaaaaccggaatggcgttgtagtaatggccatgaatttgattacccaacggcagaatatgtaccagcagttgagtttaaagctgagtataataaaaattataagcctattaatcatgttacaataaaagaattaatatcacacacaccacgctacaatgttcagagttcaattcaagaaattgactttgaatgggctaataacatttttgatgacctcatccaactgaccccgaccgaggcagactgtgaggttactcctctagatgtagaagatcaaagaaaggcagttttacggcaaattaagcaaagacgtgggcaaaaagcatttcgcgacagtttgctagctcaaacggctaaatgcgcagtaagtagttgtgaaatagttgatattctcgaagctgcacatatcactgcctacaagaatgatacgcacaaccatgtaagtaacggattattactacgttgtgacattcatactctgtacgatctagacctatttgcaatagatccggactcattaaatatttactttgctccgcagataaacgatgaagagtacacaagatttcatggaaaaaagttgcttgttacgtataaagttaatcgcggagctcttctcgagaggtggacgagattcactgataagtatggattgattgtaggcatgccgcaggaagtgacaaatcctatcttaacaaagaaagattcattctag

SEQ ID NO: 246504 - DNA, 204 bp, Klebsiella pneumoniae
atgaaccagcttcatggaaacgccctgacttcccatctcaatcaggtcatcctgattaatgaccacctggggttcgtccggcttttcgggttcagaaaagaattccgagagcgacagcccatagactttcagcagcttttgcagcgtactgatggcaggactgactttatcctgctctatggtgctgatggcactatgtgttaa

SEQ ID NO: 246505 - DNA, 2262 bp, Klebsiella pneumoniae
atggaacttggcgtttatcgcgtatttgaggatatcctgggcatttatgcggtggcggccacatcctggcttggcagcgtggttgccgatatcacgttaaataagtggcttaaattacgaccagcggaaatagagtttcgccgggcctatctctacgatatcaatcctgtcggcatcggttcgatgacgctcgccatgctctgcggtctctcagcctggatgggatggcttggtcatcctctacaggtttttgcctcaatgttatcgttgtgtctgacgtttatcaccgcccccttcatcgcctggctgactcgcggacgttactatttttcccggacgccggtgcaggtcacggcaacggaatgctgtgtctgcggtaattattttgaaaaaccagagatgagctattgtcctttttatcagggcagtatttgctcactatgttgttctctcgatgtccagtgcaacgatacttgcaaacctcatgcgcgctatacggaacaggcttcaaagcttatcgggatatttattaaagaaaaatcattacgcaaaattgatcccagagtgtggagttttatcagcattttgctgttattcagttccgtcatcggtctgcttttgatgctggttttcgctcagatgcgcgatgaattcggcagcgagcaggaccttctcgccgcggcgttatggaaagttttttttatcctgcttatcgtaaccggcgtcaccacctggctatttgtcctgacaaataaaagtcgccagattgcgcaagaggaattgcgcctgcaaagcgaccgtctgatgaaagaaattattgcccatgaagcgacggaccggcaattgcagcaggcaaaggaagatgccgacgatgctaatcaggccaaaagccgctatctcaccgggattactcatgaactcagaacgccgctcaatgcgatgctgggttatgcgcaattactcgaacgtgctgatgatatccctccagcccggcagcgcggtatcggtattatgcgcagaagcggcgagcatctggctaatctaattgagggattactggatatttcgaaaattgaagcgggaaaattagaaatatatcgtgaagaagtgcgcattggcgatttggtgcagcaactggtcgccatgtttgaacaacaggccagcgataaaggactgacatttcactacaacgccccacactggctgcccgaggcggtgatgacggatgagaaacgcctccggcaaattcttatcaatctgctttctaatgcggttaaattcacggacagaggcagtgtaaccctcgatttccagtatcgtagcgaggtggcgtttttctcggttcacgataccggcatcggcatcgcccctgagaacctggaacgcatctttaagcctttcgaacgcgtatccggcgatagtcgtcggatcgggacgggccttgggctgacgattacccggcttctgacttatatcatgggtggcgatctccaggtggaaagcatccgtggcgaaggcacaacgtttaaactcaccctgatgctgccaagctatagcggggatgcctaccaacccgccgagcctgcggtaatcaccggatatccaggcaagcgacacaccctgctggtagttgacgatgatgaatcccatcggcagctgatgatggatttactcacgcccataggcttcacgctgctaacagccgaaaatggtcatgtcgcgctacatttagcccggcaaaatcatatcgacctttttcttctggatgttgcaatgcctgaaatgtcggggtgggaactgctacgtcagttacgtaataagggacaattagcgccggtaattatgatttctgcggaagcggatgagggtaaatgccgccacttcactggcgaaggggaagttcgctacctggttaaaccgctgcgtttccctttactactggagaacatcggtgaaatattgcatctccagtggcgcacggaatgtcagccgccaaagcagccggaaatacatgaaccacgctcgcagcttacccgtgtccagattgagtcgttaaaagagatggccagattgggttatgtgagagggtttcgtgaactgctggacaaacatatttccgctaaccagatcagcaaagccgagggcgaaaaatttgccgagttgctgaggcgctttcgattcaaagagatagtcgagagtcttgaacgcccggagggagagaaaaatggcaatagcaaagccgacggtacttatcgtcgatga

SEQ ID NO: 246506 - DNA, 345 bp, Klebsiella pneumoniae
atgagcaagtcattaaacgcgcgttgcattcgtcgctgggaagtggaattcaaacctttctgcgattcaaaagttaacccttactggcgcaagcgtgacctgcgcgggtatatccgcgaagcggctcttaccaccgcctacagcatggtagagagcatggccgaacgtaacgccaaggttgactatgacggtgagccgaacggctggactccagagttttcggcttggtaccggaagcgccatgaacagtacctaaaagaggcgcgtgactatctggacgaagacgctaccaacgaagaaatcgacgaagagatcgaaaacgaactggaggcctggaatgactaa

SEQ ID NO: 246507 - DNA, 165 bp, Klebsiella pneumoniae
atgaacttaaagtatatttattttatggtctgtttggttaagagaatagaaatggtgttggcactggatgtgttgatgctgcgggaagagtggggcagtaaaaacccggcgcggtggccgggtcaattagacttggggggaaggggggcattactgccttggtga

SEQ ID NO: 246508 - DNA, 258 bp, Klebsiella pneumoniae
atggggcttaagttaaatttaacctggtttgataagaagactgaggaatttattggtgaggagtattctaaagactttggtgatgatggttctgtcattgaaagccttggaatgcctttaaaggataatattaacaatggcgggtttgatgttgagaaatcatgggttccgttgttgcagccatattttaaaaataaaattgaagtcgataagtactggtatcaaatttcatttgattatcgggacggtaactggtaa

SEQ ID NO: 246509 - DNA, 567 bp, Klebsiella pneumoniae
atggacaaaaggacaacgttagtagctctcgtttctatcatctttttcacttctggatgtgatgaccagacaaaagggaatggcaacgctgaatctacacaaatcactaaaaacgatgtaacaactcaacttaagttagataaaacgcaacaacctgatgatatagaaaagaaaataaaagaaatccaggccaactcaacccctgaaaaaataaaaaaattcaatgaattaaaagatgatgacccaaaaatcctacgagagtcggttgtttcagaaattaagaaaaaactaccactattggttgacgaagccacattaatgacagatgtatcaactgacggaggtacattctcatacaaatatgtaatcaaagggatttcagccagcacgatggaaagtgatgtgtggaaagatgccatgcaaaaaaacataaaaaatagctactgctctgacgatgccagactaaaagtattcagagagctattttctgaaggtgtcatttacaactactacttaagtgacaaattaatctacacatacagggcacttccatcgatttgttcctaa

SEQ ID NO: 246510 - DNA, 264 bp, Klebsiella pneumoniae
atggctgcatataccagcgaaacagcgaagtttttacaaagcgtcagtagcgatcaaacatggtggaagtcacgatataatccaggagacagcgttccccattctggcatttatcgatgtacagtctgcggaaaagagatcaccagtaacggcagcgacccgttcccgccgcaaaaccaccatcagcacagtcagcaacaagcaatcaaatggcaactgattgtcagaacggacactaaaggtgaccgtttcggaatcaaatga

SEQ ID NO: 246511 - DNA, 480 bp, Klebsiella pneumoniae
gtggtctcgtccccgccggcctggaaggcaaagaaagcgaaacttgagaaggctaaacaagcggccgaagccgacgcgcgcaacgctgcgccggcgccggataaagcggtaaagacgccacctccggtgcgttatcttcgcctgctgccgccggaacaggccatcatgaccctgaaggcattctggccacagctgttcgacggaaactcaccccgtctgctggcgacgggaatgcgcgagcagctgtttgccgacattgtgaaccgcgacctgccgctgtcgcataaacaggtcattaagtgcctgaagagtctgacccggtctgcgggctatctgtcccggatgaaggtgggggcctcccgctatgatctgcaggggaatgccgttgcgaccgtcactgcagaggaagcgcagtacgccagtgagcgcatgatgaaggagctgctgcgagctgaacgaaagatgagtcagaccctttaa

SEQ ID NO: 246512 - DNA, 1092 bp, Klebsiella pneumoniae
atgactgaagagttaaccctgaacgttgacggcaaggtctggggcggctggacggacatgaccattaaccgctcactggagtctgtggcgggcgagttcgacctgacagttactgcccgatggtcatctgccacgccgcgctctatcaagccaggtcagtcctgcacggtctccatcggcagtgaccgcgtcatgaccggctacattgacgacttcattcccagctatgacgcggagaacgtctccctgcgcgtgatgggccgcgacaaaaccggcgatctggtggacagctcggtggtcgataagtccggccagtggaaaggtcagaaactggaacagctggcggccaccatctgcaagccctacggcattgaggtggttaacgagaccgacaccggcgatgcctttggcagcatcaccctcgaacagggtgaaaccggctttgaactgctcgaccgtctggccaaacagcgcggcgttctggtgacttcagacgcttacggtcggctggttatcacccgcgcatccacgctacgggccggagtgacactcactctcggcgacaatattctggctgcacgtggacgcttcagctggcgcgaacgtgccagccagtacatcgtcaagggctccgccagcgcgggcggttcaacatgggacgaccagccggtgaagatgatcggcggccgccagacggtagtcagcgacccggagatcacccgctatcgtccgaagattctggtcaatgaagacagcctgacggtcggcggtgccagcgcccgtggtgagtggcataaggcgtatgtgctgggcgaatccaacactactgaaatcaccgtggcaggctggcgggagaatggcatcagcgggccgctgtggcagaccaaccgactggtgaaggtaaccgacgccattcagcagctcgatgttacctggctgattaaaactgtctcctttatggaaggtgacggcggtcgtctgacggtactgaccctggccccgcctgagtcgctggacatgccgtcccagaaggctaaagcgaaagggaaaaaagcgaagtcgaaaacgaccgtgggggcaacatgggactga

SEQ ID NO: 246513 - DNA, 1872 bp, Klebsiella pneumoniae
atggcaaaccgcctcaccactgaaatactcatcaatctggcaggtaacctgaccgccaaagcccgccagtacggtgccaacatgtccgagttcgcccgtaccaatcagcgggcaatgtcggttgtcaaagcgacatctgctgctgcaggtcgtggccttgatgcgctgggaaatcgatacaccactatgattgcaggcattggaagcagtatgacagttaaaaatgttgctgattttgatgcacagatgaggcgtatgggtacggatgcacagttaactgcagaacaggtaagcaaattaagggaaaaaatccgtgaggtttctaacgaaagtgatatcagaattgatccatccgcccttggtcagggagctagtgagttactcggcttaaccggcgatgaaaaatttcttgatgagaacatgagaaatctgggtctcaccatgcaggcctttggtgttgatgggcagacagccgcaggactactggcacagttctgggagaaaggtgttaaaggggcagatgatgtcagcaatatgctggataagttgtatcagcagttcgcagtgggttcagtaagtgtctctgatattgcgaaagtagctcccaaactcttttctattattggtgagcaggggccgactgccattgcccagatgggagcatttgcacaggttttcgctaaaaccaaaggaagcgccgacgaggttgttaccagtattcaggcgatgtatgcatccttgcaagacaagaagaacattaaatttcttcagcgtcaggggattgatgttttcaaaccaggcacaaaggactttaagcttccgtttgagttaatgagagaaatactcaagcgcgcaaaaaatgaccccttgaagctgcaggatgtattcgatcagacgggaatgcagggtattaacgcattgttaaaacctgaaaacatgaagcttatggaggaattgatttacggcacagctgaatatggtgcaacacagaaggcggcaaaaaccaacgcagaaggatttaatgcggctcttcagtcgttaaataacgaatggcaacgtttcgctgaatcaaaccttgctgaacctatccaggatctggctgatgcgctgaattctgtcgatcatgagactgtgcagcactggcttgaggtgggtaaaaacgttgctatcgccatcgctggagtaattgcagcacgcaaggcttttcagtttggtaaaggtgtctgggatttatttggtggaggaaaacccaaagggatccccggtggagttacggacatatttggctcaggtgtcatgcctgtctatgtcgttaacatgcctgccgggctcggtggcggtggcggtgacaacgatatttccgatgcgctcggcgatgcaggggatctgcttggtgagcgtaatgggcgatgggggcgcgccggccgctggctgggaagattgggcaagatggccggtattgctggtgtcggatataccctctatgacgaagcgaaacagcgatatgagtcatatgacaacatcagtggattaacgcaggatatctcgaaaaacgataatgcgaccccagaggaaagagcctttgccgccgagagtaaccagaaccgtgagcacatgtcagcgttgtgggacgaaatcaggagctggtttgtctcagtaactaacgatccgcagattgctaacccggcaccgtgggcatctatgcagccgcaaaaccagcctggctatccgttcctccagcagcctgagctgaaaggcagtatcgaggtctccgtaaaagatgatcgggttcaggttaccagcgtcaaggtcaatgcccccggcgtcaccatgagtgcgtccagcggtgttcgtaatatggagcagcagtaa

SEQ ID NO: 246514 - DNA, 795 bp, Klebsiella pneumoniae
gtgttcccgttcaacgatacacaaagcctgaatgccatccgggatgagctgctcgaacgctgggggccgctcaaaatgattgaggcgcagttgtggaccgcgttccggggcacccatgccgagtcgggcacctttggcgaaactcgcaatgactggctgatttcctgtatcgggaccaacatcgcgccgcaaccgcactggctgtgggcggcatcctacggcggcatcgcctcctactatctggccaacgacccggcccgtccgctgcagacgctggtgctgccgggcatcctgccgccggtcaaaacggtgcgctgggatatgccggagcgcaacctgctgctgcatgacggcatcgccacccattacgttgacgccagcgacaacgtctgcatcgagcgcgaaatcaccatgtaccgcgtcaaccagtatggcgacgccgatacgtcgtacctcgacgtgcagtcaccggcgacgctggggcgcatccgctatgtcatcaaaaaccggttcaccaaccgctacccgcgtcacaagctggccgaggatgatgtgctcgacctgcttgatccaggccagccggtgatgacgccgaagattgcccgcgccgagctgctggatatcgcactgactgagctgattcctgctggtctggttgaggacttcgacgactacaaagacacactggatgtgtatctcgacggcgacgataaaaaccgcctgaacttcatctgccacccgaaccttgtcaaccagctgcgtgtgctggccggtctcgtccagttcaaactttaa

SEQ ID NO: 246515 - DNA, 1092 bp, Klebsiella pneumoniae
atgactgaagagttaaccctgaacgttgacggcaaggtctggggcggctggacggatatgaccatcaaccgctctctcgacaatatcgccggagagtttgatctgaccgtcacagcccgatggtcatctgccgcgccgcgctccatcaagcccggccagtcctgcaccgtttccatcggcagcgaccgcgtgctgaccggctatatcgacgacttcattcccagttatgacgctgagaatgtttccctgcgcgtcatgggccgcgataagaccggcgatctggttgacagctcggtggtagataagtcaggccagtggaaaggactgaagctggagcagctcgcagccactatctgcaaaccctacggcatcgaggtgattaacgagaccgacaccggcaacacctttggcagcatcaccctggaacagggtgaaaccggctttgaactgctcgaccggctggccaaacagcgcggcgttctggtgacctcagatgcttacggtcggctggttatcacccgcgcctcggcccaacgggccggagtgtcgctcacactcggcgacaatattctggccgcccgtggtcgcttcagctggcgcgaacgggccagccagtacatcgtcaaaggttccgccagtgcgggcggtgcgacgtgggacgaccagccggtgaagatggtcggcggacgccagactgttgtcagtgacccggagatcacccgctatcgtccgaagattctggtcaacgaggacagcctgacggtcggcggtgccagcgctcgtggtgaatggcataaggcggcgatgatgggcgaagccaataccactgaaatcacggtggcgggctggcgtgagaacggtgtcagcggtccgctgtggcagaccaaccgactggtgaaggtaaccgacgatatccagcagctcgaggttacctggctgattaagacggtttcctttatggaaggcgatcaggggcggttaacagtgctgacactggtgccgcctgagtcgctggatatgcctgagcagaaagctaaaggtaagggtaaaaaggcgaagtcaaaaacttcagtgggggtgacatgggactga

SEQ ID NO: 246516 - DNA, 1803 bp, Klebsiella pneumoniae
atggcaaaccgcctcaccactgaaatactcatcaatctgtcaggtaacctgaccgcgaaagcccgccagtacggagccaacatgtccgagttcgcccgcaccaatcagcgggcaatgaacgtaattaaagctacgtcagcagcagcaggccgtgccattgatgcaattggcaatcgctataccggcatgattgcgggttttgccagcggtgcaatgttgcgtaactttgccgatacagatcgtcggctgacccgcctgggcatttctgctgataaaacaaaggagcaaattaccagcatttacagcgatgttcaggatgtctctatcaaaacccgtattgatgataaagagctggtcggcttcctggaaacagtcaacgcaatgaccggtgatattgaattcggtatcaaaaacctcaagtctgcggcattaactattgcaggtacaggcagtagcggtgagtcagttggtgcactattcgcacagttccagaaatacggaatcaacgacgataaaaactctacattagctatggatgtacttaaccggctaggtaaagaaggggcatatgagctgaaggatctggctgaaaaagcaggtccctcgctttctctttatgctgccgctggtggtcgtggcgtcaagggcatcaaggatgtgggtgtggtgatggagtcagcaatggatgcgacgggaaaccgtgatacggcggcgacgttagttgagaattttatccgtgaagtccagaaccctaaaattgcaacggcactagagaaaaaaggggtaaaaatcagggacaagaacggaaagctgaaatactcactcccagaactactcataatgctgtctgaagggtcagccagaggagggaaaaaaagcggtaaaggtcaactcggcgaactgatggatgttggttttactcagaccagtcttgatcttatttcaggtgtctccagccagaaaggtcaggaaaacctgcgccgatacaatgccgttatagcagatggggcatctatacaaaaagatgcaacctacgccgcacaggattttacctctgcactacaaagccttaatacgacttggcttaagttcgctaatggtaacttggcggagccagtgcaggagctggcagacgcgattaactccgtggatcagaagaccgtccagaattggctggaaaccggcaagaatattgccatcgcggtcggtggtgtgatcgccgcccgcaaagcattccagttgggtaaaggcgctctcgatctctttggcgtcggtaagggtaaaggcatccccaaaggtgtttctgacgtattcggttccggggtgatgcccgtttatgttgtcaacatgaaggacggtatgtccggtgggagcggcagcaatgaacgtccggggagaagctacccacccagtaagtatgacaaggggggattaattggtgcagccatcaacacggctgccgaagtcagcgagctggtacagttccctgaaaccgatgacgataaaaaagctcttctgcagcgcgtcaaagaaaacaacgaacgttcaacgatgtggcagaacatcaaggactggctaacctcttcaagccagccacctgctggctatcaggacccgtcaccgtgggcgtctatgcagccgcaaaaccagcctggctacccgttcctgcagcagcctgagctgaagggcagtatcgaggtttctgttaaagatgatcgggttcaggtgaccagcgtcaaggttaatgcccccggcgtcaccatgagtgcggccagcggtgttcgtaatatggagcagcagtaa

SEQ ID NO: 246517 - DNA, 795 bp, Klebsiella pneumoniae
gtgttcccgttcaacgatacccagagcctgaacaccatccgggatgagctgctggaacgctggggaccgctcaagatgattgaggcgcagctgtggaccgcattcaggggcacccatgccgaaagcggcacctttggcgaaacccgcaatgactggctgatctcctgcctcgggaccaatatcgccccgcaaccgcactggctgtgggcggcatcctacggtggtatcgcctcctactatctggccaacgacccggcccgtccgctgcagacgctggtgctgccgggtatcctgccgccggtcaaaacggtgcgctgggatatgccggagcgcaacctgctgctgcatgacggcatcgccacccattacgttgacgccagtgacaacgtctgcatcgaacgtgaaatcacgatgtaccgcgtcaaccagtatggcgacgccgatacgtcgtacctcgacgtgcagtcaccggcgacgctggggcgtatccgctacgtcatcaaaaaccgcttcgccaaccgctacccgcgtcacaagctggccggggatgatgtgctcgacctgcttgatccgggtcagccggtgatgacaccgaagattgcccgcgccgagctgctggatatcgcgctgactgagctgattcctgcgggtctggttgaggacttcgacgactacaaagacacgctggatgtgtatctcgacggcgacgataaaaaccgcctgaacttcatctgccacccgaaccttgtcaaccagctgcgtgtactggccggtctcgtccagtacaaactttaa

SEQ ID NO: 246518 - DNA, 1923 bp, Klebsiella pneumoniae
atgccggtaggtggtgggacattttattatgatagttccctgagctccgtgaataacggtgtgaccatttttaacggatggtgccgggttattgaaaacaacaaactcactgattttcacgcaggttgtcagcgcggtgacgccagtgatgtaggccataaactggcgaatttgttttcagtcgttactgagggaatgacgattgagcttcattgttataattattcctcccgtaattttgttatcacgtttaaagaaaatctggatatctacgcggtaaatggcgggggaatcaactgctggccgtttcgtgataatttcacatttacgttcgaccccaattttgaggcagggaacgacgggcttaccggtagtctggggatcctgagtttttacggttgccacggaacgaaagtccatgacattgaaattataggcatacagcagatcctaccgcagtcaaatgagtggggggactgcgcgatacggtatgagaattgccagaagttccagacattcggaatttttggtcggcatttcggtgcgtgggggatatttggtgggtttggtagtcatgattctgtcagtcaccataataatatatcagatacacatcgtcagagcggcatcaatatctgggcgaactccaacaactgccacgcatggggtaaccattgtcacaataacgggctctacaactttgaggttgagacgttcggcaaccatgattttgcccgcataaccggaggctcctgtaagctgaatttcgggacgctggcaaaaataaatttcgctattgttggtgtcatgaaagatatggaggtttcaggaaatacgacatcaatgggcgttggagcaattgccgctatcggtgtcaaagatacgcagagcacacgtatcaaaatcgccagaaacattattggtccgagctggtatggcctgacatctaacaactgccggaacgtatcgttcattaaaaacactggcgaatactccgaaccagatttcctcatcactgatcagtaccaggcccctgtgaaactggacgcaacagatcccaattctttctactgcacgcttcctatagcagcagggaaaataattaaaattgtggattctgtctataccgtagcttcatattcctcaattagcgcccaagaccttttcgggcaatcaaaatattacaagctggatacattctacaaaataacgctgacaactccgattcagcctgatttccatacattcgcaaatatcctgtttgcgtggtctacactgaacaccaccaacgggacgtatgccatgattaccaacaatgctgcgttcagtcagggtaatgtcgtcgatggtgcggaaaacgtgaagtttatcggtaacgacatggcgggctggaaatacggatttaacccgcaaaacaccttctccgctcttggcggggaacaggagttttacctgagcaacacgctgaaatgtgagtcgtggctccggactgggttagcccttgcctcgcgggtatctatcagcgggaacgtatcttcaatgggttcatctatgaccgcagtggttacaggaagtgacacaacctactggaaaccatcgaaaactatcggtaaagacggcgtggccgcagctggagcggcgccaacccgagactatttcagagtggataaaacctgctttgttatcggctaccgggtcattctcagaaactggtctgcgacagaggatgtaaaactgattcttgctaacgtcaacgcccccatcacgataaccgccgccggggcaggtactgagaaggtggtggaggttaaaacgcacctgtacgcgctgtctgccggcacgacctatccgctgtaccttatgacggcatcaaataccctcgtagctgactggtacagcatcgaggcgttaattctggaatga

SEQ ID NO: 246519 - DNA, 258 bp, Klebsiella pneumoniae
atgagttttgcattagcaggtactgaatataagttgctgggaattgagttgccggaaggctccgaaggtgctgagttaacgtatagcgttctgcattttttctcgttatcaaagggtttcgccactgtagatttcggggtttatctcccggatggtacgcaactggctttccggcagttcggttttgaccattcaggaacggaagatgaagccatgcagattgctgaagaaaaactgcaggagtatttagaggcgtaa

SEQ ID NO: 246520 - DNA, 255 bp, Klebsiella pneumoniae
atggcattaaaaatgacattcaattttaacggagtgaccgtggtagatggcgtgcttaatgtgattatgccctcaatcagcaccgaccagacaacgcttaatttcggactggcttaccgggtcagcgaaagcgatccattgctcaactcggaaacgtacagttgcccgtatgacctgacgggagcggaccctttcacacaggcatacaattatattaaatcgctcagccagtttaacgatgctgttgaagcctga

SEQ ID NO: 246521 - DNA, 414 bp, Klebsiella pneumoniae
gtggaagcggaaggcctgcttctgcgcttccccaagtccggaccagtagtgacgggccgcctccagcatagtaaaagtgccgttcacgttggtctggatgaaggctgccggaccatcaatggaacggtccacatggctttctgccgccaggtgcatcacgatatccgggcggaactcgctgaactgggccgccacggcagcagcatcggtgatatcagtctgggaaaacgagtagcgttcgctcccggccaccggcgccagggattcgaggttgccggcgtaggtcaggcagtccatcacgcggacttcatcccgggtattttcaatgatatgacgaaccacggcagagccgataaagcctgcaccgccggtgacaagaatcttcatactttctctcgtttttcaatgacttaa

SEQ ID NO: 246522 - DNA, 1971 bp, Klebsiella pneumoniae
atggatttgaaactaacacaacacaagagggaactaacgattccagtaacggcaattaatgtcgataaacgtacagtagaagttgcattctgttctgaaattccagtaagtcgcattattgatgatgaattatattatgaaattctcctatgtggagaagagaatgttgatttaactcgtctcaataatggtcgaggtggtccggttttatttaatcatgaccgtgataaattacttggtcgagtacttagtgctcgcatggattcagataaagttggtcgtgcaacattgcaaattagcagtgcaggacttggtaataccatgtggacaatgattgaagagggtattctcaattcaattagtattggttataacatttatgattatcgcatggatggtaataatattattgttactaactatgaaatttatgagatttcattagttaccgttcctgctgatgataccgttggaattggtcgttcacttggtggtaatccagacactgcaatgcgtgatcttcttgaggatgaacttgaagaagcacatgaagacgcgtcactaaatagtaatgaacaaactattttagaggaacgtctcatggaagaacaagaagatatggcagaaacccgccttgataatgaatcatatgatattaaagaaaccttaaaggttgataatgatgaaaatggtggtgttgctaatattgaacttagtgatggtgaactagaagagatgctttcaaagcgtccagagttattagctaaactacaaaataaaggtattgagccttcaacacttgaaagtaaagatcccgttgaagttgaagatgtccgtgcagttggtgaattcagtgatgcagatggtaaagctgaacatccagaagatatggaagatgaaagcgaaaaagcagaacaagagcgtaaacgcgaattaactgctatgggaaaaatactaaataaagatgtaactgatgcaattactaaaggaattagtgttgcggagtttaaacgtcaattaaatgaaaataaaaacaatccacaagttaaggaaaacaaaatggaaaaatctgtaattaatggtcttattcgtgctgctgctgaaggtaaaccttttgagggtcaacgtattgaagtaccagtaaaccaactacgtgcaacctctacatcaaccgcaactggtggtgctctagttaaagaagtatatgttgattcctatatcgatgtactacgtgcaaactctgtattcgcacaactaccaatccagacttactctggtctagaaggtgaaggtaatctagtactaccaaaactatctagtgatttcactgcaatgtttgatttcatcgctgaaggtgcaaactctccagaagttgatgcaaactatgaaaaactaattttaaaaccacgcacattctctggttccgttccactaactcgtactctaattaagagtgctgacactgctgaacgtttcactcaagacgcaatggtccgtggtgctggtttgaaacttgaaaaagaaattctagctcaaatcgtaactactgctccatctgaaactctaactgctgctccaactcagcaagatatccaatcagcattaggtactctagctgctgcaaacgttcgcgttgataacgttgttgcaattgttcacccaactactgctgcaattttacgtagtactctagttggtagtaacactgctgctaagtatatgattgaaggtttccgttttgaagcatggttatgtgattcagtacgtgttattgaatctactcaaatcggtgctggtcaaatcgtatttggtgacttctctaatgtagtactagcatcttggggcggattaaccgttgaccgtgatgatactactctacgtgcaagccaaggtattgtgttacgtactttcgcatacattgatcatgcgattgcacatgaagaagcatttctagtactaaaactagcgtaa

SEQ ID NO: 246523 - DNA, 1677 bp, Klebsiella pneumoniae
atgtcaaatatttttacagggaatgagtttaagctttcattaaatcttgatccaaataatagagtaccgcaaggtgcaggaattcatgaaattccatatatatcaactatgccaactcttgaaatctcatcatcagtacaatcatatgaaacatatggaagtggatatgaagagtatctacttgataatatgtcagtaagtccaatggatattacagtatcatatgtgcctgataatacgattcacatgcaacttgaagaacttgtatcttctcgtgcagaattccaattaattttacaatataatattgacgatgatcgtatttcatatgccattgttaatggtaagttatcatcaaagagtacaagtgggtcaaaagattcagtagtttcaaaagtatataaatttactccaacaaatttaattgcacagtactcaaccatggatgcattagatgctctatatgttggtaactatggtgttggttcaaatgggaatgatgtaccacaatatgaaacggatgcaccaactggcaatgcattcattaaggttccatcaaatcttcaaaataaccccaccggtacagatctaatgggtgttggtttcattgatggtgatagtacagcagccattgcaatgaccaaatcaggtacattatccctctttgcacgtaaccaaactacagcatggactcgcatttatactgcaacacaaatggatgaccgttatgttccacttatccgtactgtaaatggtaaaccattatcatctaacattacattatcaaaagatgatgttggtctaagtaatgtaactaatgatgcacaacttaaaattgcatcaaatctaagtgatcttggtgataaagcagttgcacgtactaatattgatgtgtattcaaaaggtgaagttgatagtactttaaacaattatgtaccaaaaacaacaaccgtaaatggtaaagcacttagtgaaaatataacactagcaaaatctgatgttggcctaagtaatgtaactaatgatgcacagttaaaaatatcttcaaacttaagtgatttaaataatgtaacaactgctcgtgccaatcttggtttaacagcccttggtatcggtggtacaccaacaaccttaaccactatggattggttaactcaatctttcgttgttggtggactatatgtagttgcagcgggtggaatgacaaacgtaccagcgggtttagtatttgacgatgaaactacaattacaatgattcgcgtcgttgcaactgatggtacttttttaacttgtgaagtatggccttccactagtactgaatcaaaatttagaatgtataatgtacgttttccatctggtacaacaagtacaagaacattctgggtacgtagaatatgggattcatcatcagtcgtaccaactacaagtggtggtactggagcatctacagtatctgctgctcgtactaacttagatctttattcaaaaggtgaagttaataatatagttaaaaagattgtgctaccgactactagtagtgggattcagtactataaaatatgtacattacgtgattctggagctggagctggttatgcaactctaatcatttctggtagtaatggttttggtgcagcagttaaaatgacctgctccccgttgattaatacaccgtga

SEQ ID NO: 246524 - DNA, 993 bp, Klebsiella pneumoniae; identical to SEQ ID NO: 152579

SEQ ID NO: 246525 - DNA, 1290 bp, Klebsiella pneumoniae
atgcaaatgctcgcgaaattaccagcacgtcgctggtggtatttaatgccgattatttttattacctatagtctggcgtaccttgaccgcgcgaattatggctttgccgctgcggcgggaattgaaagtgatttaggcattactaaaggcacctcgtcgctgattggcgcactcttttttctcggctatttctttttccaggtacccggtgcgatatatgcggtaaaacgcagcgtgcgcaaaatgattttctttagccttattttatggggcttctgcgcggctgcgaccgggtttgtcagtaatattccgatgctgatggcgattcgctttactcttggcgtggtcgaggcggtggtgatgcccgcgatgctgatttacatcagcaactggtttaccaaaaccgagcgttcgcgcgccaataccttcttggtcctcggaaacccggtgaccgtgctgtggatgtctatcgtatccggctacctgattcactcctggggctggcgtgaaatgttcatcatcgaaggtattcctgcggtgttgtgggcaatatgctggtggatcctggtccgcgataaaccctctgaggtctcctggctgaatgagcaggaaaaagagaccctgcagaaggcgatggatagcgaacagagcaatatcaagccggtacgtaactatggcgaagcgctgcgctcgcgcaatgtgattatgctgtgcgccgtgcatgcgttgtggagcattggcgtatacggtttcatgatgtggatgccatcgattctgaaaagcgccgcgcatatggatattgtggcggtaggttggctggcggcggtgccgtatctggcggcgatctgtctgatgctgacggtctcctggctgtcagataagttccagaatcgtaagctgtttatttggccgttgctgctgattgccgctatcgccttctttggttcctggatggtgggtgaccacgcgttctggttctcctatgcgctgctggtgatcgctgccgcctgtatgtatgcgccttacggtcctttcttcgcgctgatcccggaactgctgccgcgtaacgtctccggcgtgtcgatgggcttgattaacagcttcggcgcgctcggtgctttcctcggcgcgtggctggtaggttatttaaatgggattacgggcgggccaggtgtttcttacacctttatggcgatcgcgctgttggcttcggtggtgctgatgtacaacgtgcgtgccaataacgaaccttcctcgtcatcggtcaaggcaaaaaaggtcgcgggttaa

SEQ ID NO: 246526 - DNA, 183 bp, Klebsiella pneumoniae; identical to SEQ ID NO: 152589

SEQ ID NO: 246527 - DNA, 939 bp, Klebsiella pneumoniae
atggagattattttttaccatccgacctttgatacccaatactggatctgtgagctggaaaagcagttacccggcgcgcgggtgcgcgagtggaaagcgggcgataaccggccggcggactatgccctggtctggcatccgccggtagagatgctgcagggccgggcgctgaaggccgtgttcgccctcggggcaggggtggactctattctcagcaagctgcgcgaccatccggatatgctgccgctgtcgattccgctgtttcgtctcgaagataccggtatgggacggcagatgcaggagtatgccgtgagccaggtgctccactggttccgccgctttgatgactatcaggcgctgaagctggcttcccgctggcagccgctgcccgagtaccgcgccgacgaattcaccgtcgggattatgggcgccggcgtgctgggggcgaaggttgcggaaagtctgcaaccctgggggttcccgcttcgcgtctggagccgtagccgcaaatcctggccgcaggtgcagagcttcgccggccaggccgagctgggcgaattcctgcagggcactcgcgtgctgatcaacctgctgccgaatacagccgaaaccgccggcattattaaccagacgctgctggcgcagttgcctgatgagagctatgtcctcaaccttgctcgcggcgtgcatgtcgttgaagaggatctgctggcggcgctgaacagcggtaagctcaaaggggcgatgctcgatgtcttcagtcgcgaaccgctgccgcaggagagcccgctatgggcgcatccgcgggtggccatgaccccccatgtggcggcagtgacccgtccaatggaagctatcacctacattgcggagaccattagccggcttgagcgaggggagccggtaagcggtcaggtcgaccgccagcgcggttattaa

SEQ ID NO: 246528 - DNA, 1644 bp, Klebsiella pneumoniae
atgaaattgtactcatatcagcgttggagtagtgcagtacaggcagatggtacaagtaaggctagacagtcacatgcagcagagcagtatgcagttgcaaacaatctagaactagtagagatagtggatgcaggaatatcaggttttaaatctgcaaactcaaaaagtggtgcacttgcacagtttcttgaagcagttgatgcaggtttaataatcaaaaattcatatctatatgttgaatctcttgatcgtattacacgtgatgaaattgatattgctattgaattattcatgggtatcttgcgacgtggtattactatagtcactggtatggataacaaagtatatacacatgctggtattaaaggtaatccgatagatttgataactagccttttattgtttatacgagcacacgaagaaagtaaaacaaaacagaatcgtactaatggtaatgctcttgctttaattagacgttttcaggaggggaaaccaacaacaattaaatcagttggttcacatccatggtggattgattgtagtacagacaagtttgaatctgttcgtagacacccaacattatggcaaccagcacaggatgctatgaatatgtttatggatggtatgagtgtttttaaggttgttcagtaccttgatgaaaaatacccccatgcgtataagggtaaggcatggaaagcggcaaatattcgtaaactacgattcaataaagcagtgtatggtttacgtgaaattaaggtagatgataaagactatgaattacaaaattattttcctgcattaataacagaaggacaatttggacgccttaagaagattcgtgaaaatactaagtatattggtaaggttggtaaaggcaaaacagttactgataaagaaggtaacagtaaagtaattgccgaaagaaataatatcaacttactggctggtatgaagttgtttaggtgtggtcattgtggtggtactatgatggcaatgcgtaacggtgatactatccgctatctatgtgagaagggtagaggacacctgaatgactgtaaaacatggtcactacccggtatattagtagagcatacactgatgattattactactattgcctatatcaacatacagcgtaaaggtggtattgaaaaagaagattacaccgtacagatcagtagtactaaaatgcttattgaagatataagtaagaaaatcagtaatggtactcgcttagtaatcgctggtttgggggatcttgatgaagtgattaaagaacttcaggagttgaaagactcaagatctaatctggcgttagaactggaagtattacagcgtaaacaacttctattacaggataatacttttgaatcattaatgatggatttctttacatatgcacagtatggagtacttcaagatcctgtacatgagtatagaaataaattacgtgatattgtttattcatcaattgatgaagtgaaggcatggaagattgataaaaggttaatgatatcgttcaagatcaaaggtgatgatgagtactatacattctcagctggggatgaacgatataactataacttctactatggctctccagtgcagcttggtgaagacttaacagtacaggggctttgttga

SEQ ID NO: 246529 - DNA, 468 bp, Klebsiella pneumoniae
atggcaagaaaagaaaaaatcaaggaaaataaattagtacagcaagcattgaacaatatatcaatcactacactatgttcagaagcaaaaacagtaatgcgtaaactcatccaggatagtacttttttaggtataaacagagtaccagaggatgatgtatattacatcgtacaaaatgccccagaaattagtgaagaatcagtactattatatctaaagaactaccgtcaaataaaaggtaaggactatccaaaagggaaatcttcagcagaaaagtataagcgtatctgtactgaagtatctaaggcatttgacgagattctaaatgatggtacttcgatgaatggtttacgtaagtatgtgaagaaaaatccacttactgaagaccaagtaaaggcagtacaggcactattagaacagggtgtagatgcacaatcggtaattgatttgttggcaaaaatgaaatga

SEQ ID NO: 246530 - DNA, 474 bp, Klebsiella pneumoniae
atggaaaagtataatgatctaaaaaacaataaaggtatttaccacagcgaagcactagtagcatggcataacatgcactatagagttagtaatatcccaaactatggtaatgtaacaatatgctctgaatggtacacgtttagtaacttttataaatggtatagtactaattatgtagaaaattggcatttagacaaagacataaaaggaggcagcgaatatagcccacaacattgtgtattcgtacctacagaagtaaatcagttatttcgtaatgttcgcacaacttatgccaaaggtgtgacaaaaaataatgatggttatcaggctcaaattacaatcaatggcgtaaataaaaaattaggtacttacaaaacaattgaaaaagcaactgaggcatatcaaattgctcgtgctaaaagattgaatgaactgactgttcagtacccaaccctagcaaacatcatcaactaa

SEQ ID NO: 246531 - DNA, 243 bp, Klebsiella pneumoniae
ttgcagcatgaactggattgccacctcatcgtcctcatatccccggcgtttgtaggcgaggtcacccagacaatcccaccacttattaaacgcagcagtatcgtcgtgatcgccatctccgacagcaccaaagtttttacgaagacccgcctttccatcaagcagcagatcaataacccggcgagtcatgactactggcgcccggtttggctgacactgggtttgttcagaaataatcggtaa

SEQ ID NO: 246532 - DNA, 192 bp, Klebsiella pneumoniae
atgaaacttgcaccacaaacccgcgatatcctgctacagtacaaagccctgattaatgcccgccgccgcgatgccggtcagcgggaactgaccactgcgcaggtgatggatgaaatctgcgaatacatgacctgtcagtgcgccgtctatattggcggccatttcattcttcaggggggaaaggcacgataa

SEQ ID NO: 246533 - DNA, 1572 bp, Klebsiella pneumoniae
atgctgaagaaactctccggtgcgatccgacgcctgcttaacccggcaaccgatgaaaccgtcgccgttaatgaaaccgacatgacccagcccgaagcgcgggccagacgcgccagcgtcaggtccccctcagcgggtatcagcgtggcgagcaccttatccccggcgagattagccggggtcctgcgcaatgtgaccgagggaaacgcacgggactacttcatcctcgccgaagagatggaagagcgtgacctgcactacgccagcgtcctgcgtacccgcaagctgaccgtcgccggtatccctcctgcagtggaagcggccagcgacgatgagcatgacgtactgctggctgatgcggttcgcgatcttgtcgagcagcctcaaatcccggagctgttatttgatctgctcgatggcctcggtaaaggcgtcggggtctgtgaaatcctctggagtacccgtgatggctggattccgcgggattatgagtgggttgacccgcggttcctgaagcccgacagcgacacgctgcgggagttccgtctcctcactgacgagcagccggttgatggcatccctatgacgccgggaaaatatgtgatgcattatccccggctgaagtctggtttgccgctgcgtaatggtctggcccgtctggtggcggtgatgtatatgcttaagtcctttaccgtccgcgactggtgggcgtttgccgagaagtttggtattcccatcgtcgtcggaaaatacgggaataatgccagccctgagcagattaagaccctcatcgatgctatcgcttccatcgcctctgatgccgggtgtgccatcccacaatccatgcagcttgagatgcaggaaaccgccagccgcaacaacgggggcgcactcttcaaagagatggcggaatggtgcgacgcccagaccagcaaggccgtcctgggtcagaccatgacaactgataacggcagctcccggtctcaggccgatgtgcatgaccgggtgcgaatggatattgcccgctgggatgcccgccagctggaaaacaccatcaatgagtttctggtccgcccgtttattcagttcaactacggtccgcaggaaaagtacccgcgtgtgaagctggctatcagcgagccagaggacctcaaggcgtttgtcgatgcgcttatccccctggttgatcgtggtctgcgggtgcaggaatccgaggtccgggacaagttcggtctggctgagccggagaacggcgcggcggtactctcgccgtccaacagcttctctgccttcagcccggcaccggcactcaaccgcgagcggctggcgctgaaccgtgagcaggacgatgagattgacgtgatggccagcgaggcgctgaaggactgggagcagaccggcgacgcctttaccagtccggtgctgcaactggcgcaggaagccgggagttttgaagagtttctggcgcgtctgccggacctgcagaagacactggagcctgcagcgttcgtcgagcaactggcgatgctgagctttaaggcccgagcactgggagatgcgaacgatggctaa

SEQ ID NO: 246534 - DNA, 696 bp, Klebsiella pneumoniae
atgccggaaatcatccgcgcactggatatgcaggaatggctggataaggtggcgctgcctgtactgaacacactgccgcaaaacctccgccactgcctcggcgaggactttgcgcggtcgggccatctgaccgtctttgcgccgatgacggtcaacgacgataccacccgtaccgtaccgttcctggtcgaactggccaacgttccctacaagcagcaggagcaggcgctgttctttatctgtgaccgcctcccacgccgcgacggtatcaagctcgatggccgggggaacggtaactatctggctgagcaggcagctgaaaaatatggcgcagaggtggaggtggtcatgccgtccgtcgcccactaccgcgagaatatgccgcgcttcaaggcggcatttgaggatgatgaactggtgttgccgaagcatgaggacgttatcagcgacctcgggcagatcgtcgttcagcgcggggtgccgggaattgatgaccgggagaataccggcagcgatggccacaagcgccacggcgacagcgcgtatgcgatcttcctggcgttcctcgccagcaaagaagactgccagcgctacgaactgcaccggcttaacaacccgcaacagcagcgcaacagcgacagtcgccgccagttgcgcatcacccgtggccttaaaaatcagcgaggaatgctttga

SEQ ID NO: 246535 - DNA, 654 bp, Klebsiella pneumoniae
atggacaaagacaaaattgaattgattattaagtcattaacaagaactgatagctatttgaactatgcaaatactaaatctaccatattgctaacattggcatcagccatattgacgatcgttggagttaatctgtcaaaggtgcttcctgaaaaactttatgaattaagttatttatcgttgtttttctttatgttatttttagtagtaggagttttattgaatgttgcttctattatcaagtcattaggttcaatagcaccatttattaaggcaagcgaaaaggagaacaatttctcgtttgtggatattgttcattactacaaagatgggattgattatttcaataagttatctgagacaaaatatttagatttagggcaacaactagcaattctgaattacactttgtccaatgggttaataaaaaaatacaatgggcaaaaaagatcaattctatatttgaaattatccctcatttccttttttatatcgatatcaatcccttgggtagaattatcttttgggttattcaagaatgaagagaatagtgtgatagtcttaagccttatcattattttccttttgttgattattgtattcatggtatgtgtcatttattacttgctgcttataggaagaaaaacaaaatga

SEQ ID NO: 246536 - DNA, 1398 bp, Klebsiella pneumoniae
atgagtattaagaatttatataaaaatttaaactctgacatggaaagtatagctaaaagaaataagagtgatagttataattttttcacaaaaaaatccttcgactctgctgggatggaaaatttagaaccagtgtgggaagatgcaaatgacatttctttggaaagttttaataaaacattgtatgaaagtgtgaattcggaaagtgccgtcgtaagaaatggtattacgccactaagagattatgacgctgtccgtgggctaagagaagcttttggtaagcctgatcgagaggaagagcctgcgattggaacacatcctgactttaaaaatttggagacaaataatataacgcaatttgggtatgtggttaccatgtttatggatattataggctcgactaaacttggtctttcatatagtccatctgatgtttttctttttaaaaacaatatcattagcggttttattgagactatcaatgcatttgatggacatgtgcatagaattatgggagatgctgttatggctttcttccgaagcaatgaaaatgaaaaccttaatacattagaaaatagtgctattgatgctattaactgcgcagcatactttattgaggtaatgaatgaaatcgttgttccacaaattaaagaagtcgctgatgagaatattggtattagaattggcatagatatcggtgaaagtgattatgtgttgtgggggaactatggtatccctggcattaatgaagtaactgctacatcattctatgtagatatagcatctaaattacagcacaaggcacccaaaaattctataatgcttggggaaagtttagttaataaattagggcttactattaaggattatctggattacaaaataaaagataacgaaccagatagatatgttattgattacacctctaaaaataaagaaagattgcgatatcgtcaatatttacttaatcaggaaaaatacttttcacttcttcctcatggtattatatcctcccgtataaaaattgaaatcacatatagtagcgacgagtttggtttttcaaataaaaaaacttataaaagttgcggctctgtaattccaaaaaataaatgggttaagtttcatgctattttttctgagggttatggagagaactatgattcgcttaaattcaagtttcgtgttgtaaataatggaattgaagccagtaaaaagcacgactatgacaatcatgaaactgaaataataaaaaaagctcacgagaaagaagatggggtatttcatgctattcacaaagaaagaacttcgtacaagggacttcatcttatgtatgtttctgtgatctctaacggaagagtgattgagaaagaggttccttgtagtatatttatacagtaa

SEQ ID NO: 246537 - DNA, 252 bp, Klebsiella pneumoniae
gtgcaacagctcgacgacagcggccagccaaccggtcatattatccgccagaccgtaccggtccgcaccgaagccccgccggtcagacgggtgaagtgggtcaacaagcgcacaggcgaagaggagatggtgccggaggggattgatccagggtgggactacaatccgggtatgcgccgacaggccgaactggagcgccagctggccgcgaagcaaagcgccttcgacagtgataatgaaacgaggcggtaa

SEQ ID NO: 246538 - DNA, 972 bp, Klebsiella pneumoniae
atgccaaagcctgcaacacaactcgaatttctggccctgtgcttcgagcttcccgacctgtcggatgccagcacgccgctgccggaatggttgccgatgatccctgcgggcacattcactggccgggatggtcgtacatgggtaaacgacaatccgcaggccatcattgccacgtcctttcgttacccgacgttgccgtttgatgccgaacattccaccgagctgcttggccctaaaggtgaagaagctccggcttatgcctggattgatgccatgcgcgtcaacgccgacggcagcattgacggtcatatcgagtggacgcctgacggcgaagcgctcgttcgcggtaagaagtaccgctattacagcccggctttccgtcatttccctaccggtcaggtctcgcatctttccagcgctggcctgaccaacaaacccaacctgtatttacccgctcttaactcggagaacaccatgcctttacctgtgcagattgccacggcactggggctggctgagaccgcgtcggttgacgatgccgtatcagcgatccagaccatcaagaacagcgaacagaccgcgctgaaccgtgctcagaacccggacctgtcaaagttcatcccgcaggagacctatcaactggcgctgaaccgcgctcagacagcggaagatcgtctgaagacactggatgagaagacggccaccgctctggttgacgatgccgtaaccgccgggaaagtcgcgcccgctaaccgcgatatgtatctggccctttgccgcagtgaagaaggccgtcagcagtttgccgagttcgtgaaaactgcgcagccgctggtcaatcaggacccgtccaaaggtaaagagaacaaggggcagcagaccacgctgaccgaaaccgaactggcgatgtgtcgcagcatgggtcttacccaagaagagtttctcgccgctaaaccgaaacaggagcaataa

SEQ ID NO: 246539 - DNA, 573 bp, Klebsiella pneumoniae
gtggtcactgctgaggtcatccagtgcctggaaattgaagggacggcggttctgataaagaattggcttgagtacctggctctcatcaatcaggaaccacggctcgccggtgtcggtcgtgatatcgcctacaacgttgctgtaggtgccgcccgccattggatggtcagtatcaaagaagttctggccgtcaaaacacagggtgctgaaaccggcaaccagcagcgggaagctcagtgtgtccgggaactcggcgacctgctgaccgaatgcctgcgcaatcacgctgtactgaccaatctggtcgtcttcgatattttcccgcttgacgcggatcgagttttcccaggtcttgttggcgatggtgtagccgtactgagacaactgggcgaactggcgggcgctgacccattctttgatggtcggcaggtccgagagccagccgtaagtattggacgcagagccgctcggcacttcagtagcgatgcgcaggtactgcggcttgacgcccgcaagacctttggtaaatgccgcgctcagggacgtggtgagcgcgtgcagaatttcagctga

SEQ ID NO: 246540 - DNA, 240 bp, Klebsiella pneumoniae
gtgcagcagctcgacgacaacggtcagccaaccggccacgttatccgccagaccgtaccggtccgcactgaagccccaccagtcaaacgggtgaagtgggttaacaagcgtaccggcgaagaggagatggtgcccgaaggaattgatccgggctgggactacaatccgggcacgcgccgtcaggcggagcttgagcgccagctgaccgcgaagcaaagcgccttcgaccgtgataattaa

SEQ ID NO: 246541 - DNA, 867 bp, Klebsiella pneumoniae; identical to SEQ ID NO: 212762

SEQ ID NO: 246542 - DNA, 756 bp, Klebsiella pneumoniae
atgtatcacctggataatgcctcttccgtacctgatatgcccgccatcaagccggtattatttaccgagcgccgctggtttaccgaaggcggcgacggcattcagccgagttatccgggcgcggactggtttaatgccattcaggcggaaatgctgaacgtgctggcgctggcgaatatcacgccggacaaaaacgcactggatcagttcgctcaggccatccgtattttctcctcggactatatgctgccgccgggtattccgtttgcgtggccgggggcgatagcgccgaccggctttatgctgatgctgggtcagagcttcgataaaaccgcctatccgcgtcttgctgtcgcttacccctccggcgttctgccggacatgcgcggccagaccattaagtttttacccgcctccgggcgggcgctgttgtcttatgaagccgacggaataaaggctcacgctcataatgcgacaattagcagcacggacctcggcactaaaacaaccagcgacgacaacgagcactttcatcagggcggaatggttgctccgggtgatgtctgggacagcgattatgtggtcgggtcagataacgattctcatcgcacccgcaacaataccagcaccgcaccagcgcatcatcatacggtttatatcgggccccatgcgcacacggccacggtggccagcacaggcaatgccgaaaacaccgtcaaaaatatcgcctttaacgccattgtgaggttagcgtaa

SEQ ID NO: 246543 - DNA, 876 bp, Klebsiella pneumoniae
atgtcatttgaattctctcaaggcccgcaggccatctggctttatcagtacgatgccgatggtgtttatattggttccgtctttatgacgatcccggcgggcacgggtctgcccgttaataccacgcatattccttgcgaaccggataaagggcagaccggtatatttaaaaatggcgtctgggaatatgtggaagatattcgcgggacccgttactggaatattcacggcaccggttttgttatttccgcgctgagtgagtcccttcctgaatgggctgtgaccattgagccgccggtcgctgatgccggttacgttctgctgttcacggatggccagtggacgcaagttgaagataaaaccggtcagctttattacgagagcaacgggactaagcgcgtcgtttctgacgcgtggtttattctgccggagggttgcacgttcgttgccccgccagaagacaagccgacgttcgtcacccgctggaacggcacagaatggatttacctcaaagacctgcgcggtcagcttgcctggaataccgaaacccgcgaatcaacgacgattctggaggttggccctgttcctgacggctataccctcaaaatgccgggccagtttgatgagtgggatggctcagcctgggtaaaaaatgcagaggccgagcgggcttaccttaccgctcaggctgaccgtcagaaggctaagctgctgtctgcggcatccgagcagatttcaatgctcagctacgccgtcagcagcggtcaggccactgacgaagaagctgcgcaactggcactctgggaggcgtatcgcctcgccgttagccgcgtggataccactgcagctgatattgtctggcccgagaagccgtaa

SEQ ID NO: 246544 - DNA, 237 bp, Klebsiella pneumoniae
atgattacactactacaatatgataatggctactatgctctatacgttgatgaccatgtaaggattgaaactccttacctatttgaaacaagagatgagattgaactcatgattgaaacacgagatggtactaagcgtgagattgaatggcacattgaccatataccggaagatgaagagtactatcatgaaattgatagtttacgaaatgtgatactgaaggctttatccacttga

SEQ ID NO: 246545 - DNA, 210 bp, Klebsiella pneumoniae
atgaagaaacatattaagcccgcccgcgcgggactgcaggtgcgtaaagccgatggccagcgcctgaatcccggaggggaagaactgccagtaagtgcgtggtggctgcgtcgcgaagctgaaggtgatgttgttatctcgaatatccaggctgagtctgtaaccgaaccggcggaagcccgccagacccgaaccgtaaaggagaagtga

SEQ ID NO: 246546 - DNA, 150 bp, Klebsiella pneumoniae
atgtgggccgtgacgtgggaacaggagttccgcctggatgatgaagtagaccttgccaccctcccggacttcctgcgactgggtgcaacgctgcaggtcagcgacgacaccgaccctattaaaggcgttattaacgtaagagagccgtaa

SEQ ID NO: 246547 - DNA, 210 bp, Klebsiella pneumoniae
atgaaaaaacatattaagcccgcccgctcgggactgcaggtgcgtaaagccgatggccagcacctgaatcccgaaggggaagcgctacctgtaagtgcatggtggctgcgtcgcgaagccgagggtgacgttgttatcaccgatatccaggctgaatccgtaaccgaaccggcggaagtccgccagacccgaaccgcaaaggagaagtga

SEQ ID NO: 246548 - DNA, 150 bp, Klebsiella pneumoniae
atgtgggccgtgacgtgggaacaggagttccgcctggatgatgaaattgacctcgccaccctcccggacttcctgcggctgggtgcaacactgcaggtcagcgacgacaccgaccccattaaaggcgttattaacgtaagagagccataa

SEQ ID NO: 246549 - DNA, 720 bp, Klebsiella pneumoniae
gtggagcccaggttgctgtccaacatgaatgacgtgtttcgcctacatgacccgcttctttattatgtcggtcatccgcagtctacagttgttccctccggctctcaacaggtcggatttgaactgctttactcaggcccgacatcaggaatgggcctcagtaatgccacgcgaacatcactcaataattcctatggcgggattttcgaagctgctgaattcaccatgaacacttccgaagggcgggcggtagcaaccatcagtggtgggctggcgggccgtaaacactggattgatttcgatctgcgccgggggtcatcagctccggttggttccgtggcgatggagattatgaatagtactggttccaccgttattttccgtagaattatccttctggattcggtggcccgctggcaaaaagtagttatcccgtttattccaaatgaaaacggcaacatcatcatccgattcagttcaaaactctatgttgctggggtagcgacaaattttgttgtcggcaatctgaatgtttaccgcaacgaacaggccataaatactggtcacaacagcggcctgcgtatgcagtgggatttacagcactctgtgaaaggcgctcgccatgaatggtatgacgtctcaggaaatctaagggctaaaaatggtgcgccgacgtcagtgacagatggcgtaatcattagtacgaatccggtattgtga

SEQ ID NO: 246550 - DNA, 240 bp, Klebsiella pneumoniae
gtgctggaggttcgcgccagacatgagcgcgggttctggcgctgtggtcgcttctggccacgcgagccggtgcatgtgtttgtcagcgatgaccccgatggcgataacgaggcgaacgcgctggaaggcgatgtggtggtggagtgtttcatcagccatgaaaccgcagaacgcctgaaagctgagcctcatctggtggtggcggtaatgccggttcttcaggtggcggagaaagactga

SEQ ID NO: 246551 - DNA, 441 bp, Klebsiella pneumoniae
atgggaatttacgttacccgcgatgacctgctggctgcggacgggtcgctggtctggaatatggccatcgacaaggcaacgaaccagctcgacgagacgaagatagccacggccatcgaagatgccgacgcggagatcaactcgtttctgtcaaagcgctatcagttgccgctgaacatcaccaccgttccgcgcccgctgcaccgggtagctgtatccatcgccatttactggctgtccgagcgcgacaatcagatcaccgacctgattcagaagcgctacgacagcgccatccagaccctgaaggagatggcgaacggcacccgtgaccttggtctgccgaccgacacgccagccccggagaccgataacggcaggatgattgttgtctccgataacaaacgcctgttcacccgcaataacctcaaaggggtgctgtga

SEQ ID NO: 246552 - DNA, 309 bp, Klebsiella pneumoniae
atgaacgtcgttctggcggcagatggtcaggacagtgctgtcacgccaaccgtgcctgcaaccgacgatgttgtggtgctggaggttcgcgccagacatgagcgcgggttctggcgctgtggccgcttctggccacgcgagccggtgcatgtgtttgtcagcgacgatcccgatggtgataacgaggcaaacgcgctggagggtgatgtggtcgtggaaagcttcatcagccatgaaaccgcagagcgcctgaaagctgagccgcatctggtggtgacggtcctgcagacggtagcggagaacgactga

SEQ ID NO: 246553 - DNA, 576 bp, Klebsiella pneumoniae
atggcggaacaggtaggcctgcatggcctcgcggtcggtgccggtcgggataatgtccgtgcgctggtcgtagacccacgcaaggccgaccgttcccagaccgtgccagcagtcaaaagcccatgcccggctgatgcccggcagttcggtggcccagataacataatcatgcagagcaccgccggttggcgggttgcgcttgcggtacagcaggcgggtctgcagctcggccacggactcgacgtccgctccgccggagataccggcatccgccaccacgccgtcgctgttcactccggccaccggggaaataagagtcaggacgtcacccgccgtcaggttgccgctgaggcccgtctcgtcggcctgcacggtgacggtgattttgcccgccgacgggtcactggtggcggtgacgtggtagcgtacgccgtcctgcgtctgcatctccgtatcgagcggcagcggtcgggtgccggtgaaggcgaccggtccgctggcataggatgcggccttacgaataacgccctcatagcgggcggtatcaataatggtttcgtcggcggactgctctga

SEQ ID NO: 246554 - DNA, 393 bp, Klebsiella pneumoniae
atgatgctgtttcttcgaaagtatggatttttgtttatccctccaatctactggctcatctatctgggagccagactgacttacaatgggctggcgggagagttttctcctgatttctttcagggtattcgacatgaaggtgtctatattatctgtagtttgtgtgtcttttattttttctgcctggaagtggatattagtgatggggagttctcagcgttcattctgttcctgattgttttctttcatgcggttttattatttatcactctgcttatttgtttgtggaaaggggaggtgttgttggattcgatctttatgggtcagattattgcctccatgtgtttattgttttttattccagtgttttccattataagaaggagcttctag

SEQ ID NO: 246555 - DNA, 315 bp, Klebsiella pneumoniae
gtgggcggacgtcgtggcggtctggtggccatcgccgtcgaggataaagggagccgtccccgtggcggcgaagaaggcgacgttattctttatcatcaggaaggccatactattcgtctgaaaaagaatggcgtgattgaaataacagggaagacggtaaatgtggttgccgaagagagctgtgacattatcggcaaacagataaatatcaccggccccacttctttcagtgaagatattcaggttaaaggaaaaagtttccttgaccatattcataaggatggtgacggtgaaaacacgactaaacccttatga

SEQ ID NO: 246556 - DNA, 258 bp, Klebsiella pneumoniae
atggacactataccggaagaacaacggcttgagtcgggcgtgtcagccggcctggtgatggcactgatagaccaggtgaaagagaacgggcagagggtgactgtgccggttgacctgcttgaaaccctgctgattaccgccgaacaggcattgtgggacagggaatggaccgcacgggatcgcaatctcccggtgccggaaagcgtaatgcgccgcctggcggatacagcaaaagtgcgggcattactgaaaagctga

SEQ ID NO: 246557 - DNA, 585 bp, Klebsiella pneumoniae
atggcgcatcgtgtagaggactggcaggacgtcctgcagcagctgatgccacgcggtaaagcgtggcctcgcgaccagacggcggcgctgacgtcactgctccggggcttcagttcccgcctgcagctggcggaggcgaacgcggatttgctggtcaccgagatgcgcccggagacaaccgacctgctgctggccgactgggaggattatctgggtctgccggactgtaacgccatccctgacggcttcgaccgccgccgcgatgccgtggtggagaagtatcaccgcaagggcgggctggccacctggcagattgagcaggccgtgaatgatgcgctgggcttcaccattcaggtgaccgaaatcctgccgcatcacgtcatgcgcgacatcatgtatccgatttattcccacaaataccgctacctgctgcaggtgacggtcacggatatgccgatgatccgctttcgcagtatcagcaacgtcctgacgccattaatcagcctgcaggcgcagatactggaatgttttttacgtcgttaccggctcgctggccacgattatgattttctttacgaggtttaa

SEQ ID NO: 246558 - DNA, 276 bp, Klebsiella pneumoniae
ttgccgctgaacatcaccaccgttccgcgcccgctgcaccgggtagctgtatccatcgccatttactggctgtccgagcgcgacaatcagatcaccgacctgattcagaagcgctacgacagcgccatccagaccctgaaggagatggcgaacggcacccgtgaccttggtctgccgaccgacacgccagccccggagaccgataacggcaggatgattgttgtctccgataacaaacgcctgttcacccgcaataacctcaaaggggtgctgtga

SEQ ID NO: 246559 - DNA, 288 bp, Klebsiella pneumoniae
atgcgtgacattctcgaccaggaccagcgcctggttattctgcgatcccttgtcgaatgcggtgacagcgccaacgagtcgattctgcagacgtgcctgcagacttatggccatcgcgtttcccgcgataccgtgcgcacgcatctggcgtggttgcgtgagcagggtctggtcagtctgacggatgtttccggctgttatgtggctgaaatcaccggtcgcggtgatgacgtcgccagcggtctggccacagttccgggggtgaaaaagccccgcgcgagggggtaa

SEQ ID NO: 246560 - DNA, 303 bp, Klebsiella pneumoniae
atgggctgggaaattattaagggtaactgggcgatcatctgggcgttgtttatgtccgccgtgaacgttattcagctcctgctggccaaaacctacgtcaaacgagaggagctggagctgatgcgtacccgactgcagggcattgaaaataccatcgcgggtctacccagccagaaagaccttcaccagttgcaactggagatgagcaacctgcggggcgatttgcgcgaactgggcccggcgattcgccaggtgaaacacgtcagcgatctgcttctggaaaacgagctgaaggaaaaataa

SEQ ID NO: 246561 - DNA, 240 bp, Klebsiella pneumoniae
atgaatgtaataaaagatgtttggactattatgattaattttaaatatatagtaatcactgttgtgttatattccgtggcgtgtctatatggcttgataataaacttttctgatacggctaacttgccaatgaaagctttatttggaactatttctttttcattgattatgttcttgccgatactttataaatggatctacatatcggcaagaaaattaattaataattttgatgattaa

SEQ ID NO: 246562 - DNA, 162 bp, Klebsiella pneumoniae
atgcattatataacttcaatctacaaacattttataataatgaacttggtgaaccatgggaagatgaatatcaaaaagagattgacatacttctacttgaacaacttcgtgatgattcatttaaccttcatgcaatcccagaagaaacacttgggatcgtaa

SEQ ID NO: 246563 - DNA, 276 bp, Klebsiella pneumoniae
ttgccgctgaacatcatcaccgttccgcgcccgctgcaccgggtagctgtatccatcgccatttactggctgtccgagcgtgacaatcagatcaccgacctgattcagaagcgctacgacagtgccgtccagaccctgaaggagatggcgaacggcacccgtgaccttggtctgccgaccgacacgccagccccggagaccgataacggcaggatgattgttgtctccgataacaaacgcctgttcacccgcaacaacctcaaaggggtgctgtga

SEQ ID NO: 246564 - DNA, 261 bp, Klebsiella pneumoniae
atgcaacagggggcctttttgcaacatgaactggattgctacctcatcgtcctcatatccccggcgtttgtaggcgaggtcacccagacaatcccaccacttattaaacgcagcagtatcgtcgtgatcgccatctccgacagcaccaaagtttttacgaagaccagcctttccatcaagcagcagatcaataacccggcgagtcatgactactggcgcccggtttggctgacactgggtttgttcagaaataatcggtaa

SEQ ID NO: 246565 - DNA, 267 bp, Klebsiella pneumoniae
atggagtttgtgaaaacgctggcattcgaaacgtcgatgtcactcgctgaaaaagaaggcccggttgagccgaaggcactcggtcagctggcgctggttgctcagcgtctggaagcggcagcgatggccagccacaaacgcgagaaagagatccgccaggcattcgccgaagaagccgccgcacaggcggagaaaatcaccaaaagtgccgggctgtctgcggaaactgccgctgatatccgtcgccagattctggggatcgcatga

SEQ ID NO: 246566 - DNA, 249 bp, Klebsiella pneumoniae
atgcttcagcgcccggccaaacgcctgatgaatgagacgtttgtgggcgctgaccgggacgctacctgcaaaaccgtcctggtgaacgccgctgtaactgagcggcgaacccacacgaacacggccacgctcgacgatgtactggatgctgtcgagcagatcgccattgccctgcaggaggctctgatttccgctgcgtgtcttacggtagccctcggaccattcctcccagcgctcaccagccggtga

SEQ ID NO: 246567 - DNA, 225 bp, Klebsiella pneumoniae
atggacctggttgactggcagcaacgatttgagcgctggatactgacgcaccatgcgcaggatgacgccgcacacgatctgtcccattttcgtcgcgtctgggcgaccgccactcagctggccgcgggggaggaagtcgaccggctggtactcctcacggcctgctattttcatgacatcgtcagctgccaaaaaatcatccggagcgaagtcgatcctcgatga

SEQ ID NO: 246568 - DNA, 2499 bp, Klebsiella pneumoniae
gtgtcgctgtccgaatcggagtcgctgtcagagtcggagtcactgtccgagtcagagtcgctgtcggaatcggagtcgctgtccgaatccgagtcggagtcggagtcgctgtcggagtccgagtcgctgtcggaatcgctgtccgaatcggagtcagagtcgctgtcggagtccgagtcgctgtcagagtcagagtcgctgtcggagtccgagtcgctgtccgaatcggagtcactgtcagaatccgagtcgctgtccgagtcagagtcgctgtcggaatccgaatcgctgtcagaatccgaatcgctgtccgagtcagaatcgctgtcggaatcggagtcgctgtcagaatccgaatcgctgtcagagtcggagtcgctgtcggagtccgaatcgctgtcggaatcggaatcggagtcgctgtcagaatccgagtcactgtcagaatccgaatcgctgtcagaatccgagtcactgtcagagtccgaatcactgtcagaatccgaatcgctgtccgagtcagagtcgctgtcagagtcagaatcgctgtccgagtcggagtcgctgtcagaatccgaatcactgtcgctgtcggagtcagagtcgctgtcggagtccgaatcgctgtcggagtccgaatcgctgtcggagtcggaatcgctgtccgagtcagagtcgctgtcggaatccgagtcgctgtcagagtcagagtcggagtcgctgtcagcatccgagtcgctgtccgaatcggagtcactatcagagtccgaatcgctgtccgaatcggagtcgctgtcggagtcggaatcgctgtccgagtcagagtcgctgtcggagtctgagtcgctgtcagaatccgaatcactgtcgctgtcggagtcggagtcactgtcggaatccgaatcgctgtcggaatcagagtcggagtcactgtcggagtcggaatcgctgtccgaatcggagtcgctgtcagagtcggagtcactgtccgagtcagagtcgctgtccgaatcggagtcgctgtcggagtcggaatcgctgtcagaatccgaatcgctgtcagaatccgagtcgctgtcagagtcggagtcggagtccgaatcactgtcggagtccgaatcgctgtcagagtcggaatcactgtccgaatcggagtcgctgtcagagtcggagtcactgtccgaatcggagtcgctgtcggaatccgaatcgctgtcggagtcggagtcactgtcagaatcgctgtccgagtccgagtcgctgtcggaatcggaatcactgtcagaatccgaatcgctgtcggaatcggagtcgctgtcggagtcagagtcgctgtcggaatcagagtcgctgtcggagtccgagtcgctgtccgagtctgagtcgctgtcagaatccgaatcgctgtcagagtcggagtcgctgtcagaatccgaatcactgtcggagtcagagtcgctgtcggagtcggagtcactgtcggaatccgaatcgctgtcagagtcggagtccgaatccgaatcactgtcggagtccgaatcgctgtcagagtccgaatcactgtcggaatcggaatcgctgtcggagtccgaatcactgtcggagtcagagtcgctgtccgagtcagaatcgctgtcagaatccgagtcactgtcagagtcggaatcactgtcagagtccgaatcgctgtcggaatccgaatcgctgtctgaatcagagtcggagtcagaatcggagtcgctgtcagagtcggaatcgctgtcagagtccgagtcgctgtcggagtcggaatcactgtcagaatcggagtcgctgtccgaatccgagtcggagtcggagtcgctgtcggaatcggagtcgctgtccgaatccgagtcggagtcggagtcgctgtcggagtcagagtcactgtccgaatcggagtcactgtcagaatccgaatcgctgtcagcatccgagtcactgtcagcatccgagtcgctgtcagaatccgagtcactgtcagaatccgagtcgctgtcagagtcggaatcactgtcagagtccgagtcgctgtccgagtccgaatcgctgtcagagtcggagtcgctgtcggagtcggaatcgctgtcagaatccgagtcgctgtcggagtccgaatcactgtcggagtccgaatcgctgtcagagtcagagtcggaatcgctgtccgagtccgaatcactgtcagagtcggaatcactgtcagagtcggaatcactgtcagagtcggaatcactgtcagagtcggagtcgctgtcggagtcggagtcgctgtcggagtccgagtcgctgtcggagtccgagtcgctgtcagagtcggaatcgctgtcagaatccgagtcgctgtccgagtctgtatcagaatcggcatcggcatcactttcgctgccgccagggtcggtatcgctgtctgagtcagaatccgaatcactgtccgcatcagaatcagtatcatcgttcggagaatgcgacgaatga

SEQ ID NO: 246569 - DNA, 678 bp, Klebsiella pneumoniae
gtgattaagcaggcgctggaggcaaagatccagaagctggaagccgatcaggggcgcaagctgaagaagaccgagaaagattccctgaaagatgaagtgctgcactcgctactgccgcgcgccttcagccgcttcagccagacaatgatgtggatcgacaccgtcaacggcctgatcatggtcgactgcgccagcgcgaagaaagcggaagatactctggccctgctgcgtaaaaccctcggctcgctgccggtggtgccgctgaccctggagaatccgattgagctaacgctgaccgagtgggtccgctccggcaccgtggcgcagggcttccagctgctggacgaagccgagctgaaagcgatgctggaagatggtggcgtgatccgcgccaagaagcaggatctggttagcgacgaaatcgctgtacacattgaggccgggaaggtcgtcaccaagctggcgctggactggcagcagcgtattcagtttgtgatctgcgacgacgcgtcaattaagcgcctcaagttctgcgatgaactgcgcgaccaaaacgaagatatcgatcgggaagatttcgcccagcgctttgacgccgactttatcttaatgaccggcgagctggctgccctgatccaaagcctggtggaagggctcggcggcgaagcgcagcgctaa

SEQ ID NO: 246570 - DNA, 240 bp, Klebsiella pneumoniae
atgctgtggttcaaaaatttaatggtttaccgtctcagccgcgatatcgaattgcgcgccgaggagatggaaaaacagctggccgagctgacatttaccccttgtggcagccaggatatggcgaaaaccggttgggtgtcgccgatgggatcgcacagcgacgcgctgacgcatacggcaaacggccagatcattatctacgcgcgcgtaaagaagagaagatcctgccgtcgccggtga

SEQ ID NO: 246571 - DNA, 855 bp, Klebsiella pneumoniae
atggaagctccattcgttatcaagtttatcgagaccaaatggcacgataagcaaaccttagtcagtgttagcgagtcggagtactcgctaaagcttgagcagacggggaacaatgcattttccgcacacaccaccatctaccctaaggtcgatgagctacgttttgctcaacttgcgataaaaactaagcagggtgatcagtctccgccttacattgtcatgcctaatggtgatagaaagcagttagagtcgataaccgatcccgcatctaatgctgtgtggtgggttgagcctgctcattgggacgcaaaacaacgggtgtggcgcagtgaagcgaggcgaacggctggtcagatcacgtttgttattggtaactcgacactaaagcttgatattgatatctccgaacagaccaaatcggatctttcacgttacctgtcagattttaaagcggacctgtgggagctgatcctcgatgagaatagtcatatcacgggcgacgctaaaaattcacaggttgcagccatcggccaagaagcgctgtcattagtcgcatcaattcttagcaatgcacaaaccatcctcaaaaagcccaaagttgaactgaaagaaattcaagcgttaaagccagcaaaagaagtacgtcctgttccacgtacatttatggagatttgtaccaaaggttcgcgtaagcatttaacgagccgcgcatctgagccgagttacaacgtgccagaaaaccagtatgtgctgtatgtggtttcgagcacgctgagcattgtaaagcaattggttaaggtggctgagagcaaaaagagtcgtttttctggggctattgaaaagctcaatgggtaa

SEQ ID NO: 246572 - DNA, 267 bp, Klebsiella pneumoniae
atgccgacgctggggcgttttatgagcctgctgtcaccctttgacgtggtgatatggatgacggatggctggccgctgtatgaatcccgcctgaagggaaagctgcacgtaatcagcaagcgatatacgcagcgaattgagcagcataacctgaatctgaggcagcacctggcacggctgggacggaagtcgctgtcgctctcaaaatcggtggagctgcatgacaaagtcatcgggcattatctgaacataaaacactatcaataa

SEQ ID NO: 246573 - DNA, 309 bp, Klebsiella pneumoniae; identical to SEQ ID NO: 21175

SEQ ID NO: 246574 - DNA, 363 bp, Klebsiella pneumoniae
atgtctcaaccagacgccattattcgtattaagaacctgcgcctgcggacttttattggtattaaagaggaagagatcgccaaccgccaggacgtggtagtgaatgtagccattcactcccctgccgataaagcgcgcgacagcgaggacatcaatgatgcgctgaactaccgcaccattaccaagcgtataatcaaccatcttgagaatggccgtttttcgctgctggaaaaattaactcaggatgtgctgaatatcgcatgcgaacatcactgggtcacatatgctgaagtggagattgataaacttcatgcgctgcgctatgccgactcggtgtccatgaccatgagctggcgtcgctaa

SEQ ID NO: 246575 - DNA, 2988 bp, Klebsiella pneumoniae
atggcagaagtaccgttaccaactcccacaaataacactgttccgagcacggatatccgggatgcagtttatgccggcgccatgctggataaggttgttaccagcaccgaactgaaatacatcgatcgcttgggaggtgagcactacaccgtagacgggattaaggcggaaggggataaagttgttgaggataccaggctaaacttaattccacttggtaagcaatatatgtcgcttgaccaagcgcaggcagacatcgcgaatattcccgaggggagcaccgcctattaccgcagccctgacgacagcgccctcgcgatcgaggtcatgaacgttggcgggacgctgaccgcaaccggacgaaaaatgccgtccagtcaggctgtagattcagtgaggggattaatagacagccagggcgaaaacccattttcagtggtgtttaaaaatggtctttcaccgttcggctacaaagacgggcgactgtatgctgatgaatttcagaagctctattcttcagatgccgggttagagtttggcggcagcatcattgataacaatccgccggatggatggcgttttgtcatctactatcgaaatggtctggtgatgtgtggtcaacggaatgacggcacgatgatcggtttcggtgagggcggcagcggtggcggctcgattgagccaggcgatacggcagcggactatgactcaatccgcaactacacgggcacagcaactgtgcgcgacgtcgtcggccagcgtatcgccggcaggttcgtggtcaatccggacgatacgacctccgaggaaataccaggcgggatattggtcgatgtactggggcgccgctggtaccggcaagcagactacgtgaactatgatatgttcctcgctacccgggtgcctgacgctacgttgacttcgatccggcaagcactcgctgcagggaacaccgcatccgcgatcgcctacctgtcgggtgttgccgcttccgaccttgccatccagaacgcccacaaatatgcgaacctgctgaaaatacctgttcggcagaatgacggtgcctttctcgttcttgtcgatattgaagtagaagttcggacagatacagacctttctggctctatcatcttcacatcggcagattccggtctgaatgagactcgctgggggccgctgcgcattcttgaccccactgcaccggagccgcttcggatattcaacctcaagggtaaagaccgaatcgaactgacgcccgcggaactggccacgttcaacgccagctattcgcagtacatgaaaaaagggtcccagtatcttccttatcccaagctatacccgtactacggcggcatgttctatgccctctccacggcggtagaactttaccgaaacggcaaccggaccaacccgagagatcgtgtcctttaccgagatttcgcccgtatcgggaaagcaggcggcctgacacagcgccttgtaaaagacatccccaatgggaccatcggatacgcagccattatccccaaggaggacaactttcttgaattcaaatgtccgcactttatcgagctcggcgacagccgccgattcctgaacatcgaagtatcccgtccgatggtcaagataaaaaacctcgtacacacctcactacagacagggggaacgagtctggaaagccgagtattggtatcggcgcgggaggtgtttgacgtttactgtgaatacggcgaggcgatgtgccatccgaaagaaaacgggtcttacgtcatttgcatccgcgacacctgtgatgtgcatatcgacaagtattacggattgcatggatggggttttcaggggcatcacgggatcaaaggactcttcattaacgattccacctttaaccgattcgacttccactcattcgggtatgactgcttctcgaacaacatggtcattaaagggaagcagattaatatacaaggcgggaacacgtggcgcttccggaatctctcgtttattgtcacgaagacggacggcaacgcgctggaatacttcctgaactttgtaatcggcatgcgacaggactatgcgagcgactgtgagtgcaacctaactgtcgatgggctgacggttctttgggataaaaacctgcccgcgtggtacaacgcgacacgctcatttgatgttgtgcggatgatcgatacggctaactctgatgatcagggtatcgatagcaagctgccgtacaccatcgacattcgcaatgtcgtatttgacctcgctggcatccagaccggaaaaccgaatgacaattttgagttctgtgctgttacggccttacgctctcagtttaccgaccacacggtaaccggacgtaaaacgctgttacccgacaatatcaccgttgacggaatgacggctattaacgttcagcccacgcagaacgcggtgatgtgcggcatcaaattgcctgccgacctctatcagaacactgtgggctcacgcaacaaaaagggcagcgacgggacgaacgcccgcattacgctgcgcaacctgcacagcgttatcaacaatccgtctatcgagctggctgcagcccagaccgtcgatattccgggagatgcggcaaactggaccgctgattacctgaacagtgattacagctggataccgcggattaccctggaaaattgcatcccggcaattatccatgctcctggagcaaaagctgttgtcgatattcatggcggcaagctggcgcgggtctacaccaacggtaatggcaaccgctgccgtgtcaccggtgctgatattgagctgatacctgatgcggcgggtgtgacctatttcgcagcagataaaacgctggtgacgggctgttcatggctgaacccggccagtggtgcaacctatccaggcacgttgcgtggttctggaaacgaaatgatcggagaaagtgctaaagcaccaaaccttcctgcaaaagcttttattgaggaataa

SEQ ID NO: 246576 - DNA, 294 bp, Klebsiella pneumoniae
atgtcagaatctaaaagctacgagtacctagtcattggtggggagcatcatgggtctgtgtttgttggcccgcatactgctattttagaagtccctagcaagcatcaaccattggcaaaattctataccagggatcaccctgccgatgtagtagagcaaaaagtggaaccccatccggtttatgagcatacaagaggtgatggggctcatttcttcatcgcaactaatgaagatataaccgcatgggacattgatgccgaaatcagaaaatataatcctcggccgataaattaa

SEQ ID NO: 246577 - DNA, 825 bp, Klebsiella pneumoniae
atggctatgcaatgtcttctcgccaaagtaatggagcgcggcatcttccgcgtgccggcgcgccgcaagcgcaaagttgaagttaaaccttccgacatcccgacatttcactatacggctcacctggcagcgcggcgcagccagaaggaaaattgcatgagcatttatcaacgcatcaacggcgctgactggcgcaatatctgggtagtcggcgatctgcatggctgctacaccaatctcatggcccagctcggcaaggtggattttgacccggcgcaggatctgcttatctccgttggcgacctcatcgaccgcggcaccgaaaacgtggagtgtctggatctgattactcagccatggttccgcgccgttcgtggtaaccatgagcagatgatgctcgacggactatcctcctccgggaacgtgaatcactggctggccaacggtggcggatggttctttaaccttgactacgacaaagaacgcctggctatcgcgttgtcccatttggttgcaggtttgccactcatcatcgaggtaatgaccgagggtaagagggtggtggtctgccatgctgactaccctcataacgaatatgcgtatgacaagcccgtcaatgcagaacaggttatctggaatcgtgagcgagtgagcgcagctcaggatgggatagtgaatgaaatatccggtgcagacctgtttatttttggtcataccccggcacatcagccaagccagtacgccaatcagatgtatatcgacacaggtgctgtattctgcggccgcctgaccttggtacagatccagggtggtgcgcatgcgtaa

SEQ ID NO: 246578 - DNA, 498 bp, Klebsiella pneumoniae
atggacggcactttccatcatccctgtttcgcccggttcgccgggaatttttttaaggtgattagaatgagtaaagatcttttcgacatgaagcgtcttcctgttgaccgggttgctgcgagagttgttggtaagggcgtggattggacgccaaataaagttattcaaactggtgacagcgatctaccacttcctatttttccgacctgcaacatcaaaaacccacaacatcgtcgtgaagttgagtcgatgatcggaagggttcgcggcaggctaaaaatcattggcctttctgagcagcagggtggtggaaaatctggggcaagatacgtcgttcgctgtgtttgcggaacgtacacctatcgacgaggcgcaccatttaagaaaaattcagatgagtttgatggctgcgagcgttgtcgagagctgctgttccttaagcgagaggaagttaaacgcagaacggggaaatgggtagaatggaaagagctaatgtga

SEQ ID NO: 246579 - DNA, 852 bp, Klebsiella pneumoniae
atggaaaatcatgttttaatgtttcctgatatgtttatcaacgcagataataacaccctgcatatagcagacctaaatttggactataggaagttattaataaacgccctttattgggataaaataattaccacaagaagcaatatctttaatatttctcatgatgaaagcccaggtgttcttgaacttaaaaaggaagggatttttcatgaggtacatttaccgtttactggtggcggtgatttggctaaagtactgtatgaaattaatatgaaattcatgatggactctcttgcgcgtagagatattaattttattgcaagtgatgctgataaggtgttgattaaaaatactaatgatgtttcgccagataacggcgagttatttactttgataaatgcaattccagaacctgatgaaagtgtaaacatcaatgatgtgctcgaatttaggctaaagaggaaagataatttaaaaaatctcatgaataaaatttgtgagttgaatgctagagtgttaaaagctgaaaaccgtgacttagagttaaaagtagcaataaatgaaatagatatagcttgtgccgatgttattagattatatggtgagagtcgtgtaaaatttaacttatcagaaattaagtttaactttaacatccctgagatagtaactaatgctggcgcagcttattttggtgcgaaacaaataggtcttcctgaaacaggtgccgtactggcatcagcaacttacgggctcagtacctttgtaaatatttcatctgcaatgtcgctaagaaaaatagataaattaaatccatttaattacgttggggaaatgagcgtaaagcttaattaa

SEQ ID NO: 246580 - DNA, 750 bp, Klebsiella pneumoniae
atgaaagagcgcggaatgatttttaacggggaaatggtgcgggccatcctcgacggccggaagacgcagacgcggcggattatgaaggtacagccagagcactcagagcttgggttgcgccgggtggttgaatccaaaaacggcattgatgacggtaagtatttttggtcgcagtccgatgcaaccggcttgaagtcacgatctaaaccgttcgcctgtccgtttggctccgttggcgatcgcatctgggtgcgggagacgtgggcaatcctgggtaacgaagatggatgctgtatcgactgggaagaaaaaatttgcaaaggggacgagcgctcagcggcgaggatttaccgcgccagctgcgagcagaaaccgaataattacggcctgtggtctattcctgatgatgccgactggaagccatataccaaagactaccagtacgaaggtgcgtggcgtccatctatccacatgccgcgctgggccagccgcattctgctggaaattacagacgtgcgggttgagcgattgaacgccatcagcgaagaggatgcgcgagcagaaggcattattgacggtggctgtcttaattgcggggaacctgagccatgcggatgcgcaaatccagagcctgacgctaccgatgcttttgcctacctatggcaatcgatctacgggcaggaaaactgggatgccaacccctgggtttgggttatagagttcaagcgcgttgaaggcggtgcagcatga

SEQ ID NO: 246581 - DNA, 1137 bp, Klebsiella pneumoniae
atgaccctgctctctactggcaccgattatgacgcgctggcggccgccttccgcccgatattcacccgtatcgcccagggcgctgcggagcgcgaacagcagcgcattctgcccgatgagccgatccgctggctgaaagaagcgggcttcggcacgctgcgtatcccgcgtgagaagggcggctggggcgcttcgctgccgcagctcagcgcgctgctgatcgagctggcgcaagcggactctaacctgccgcaggccctgcgcgcgcactttgcctttgtggaagatcagctgaatcagccggattccgccgggcgcgaccgctggtttcgtcgcttcctcgacggtgagctggtgggcagcggctggacggagatcggcgcggttaagctgggagaggtgaacaccagagtgacgccgacagagggcggctggcgactcgacggcgagaagttttacagcaccggcgcgctgtacgccgactggatcgatgtgtttgcccggcgcagtgataccgccagcgggaccacccgctttaccggcgctcgggtggaaaccgaacatgtctatgattttgcccagcgctttcgctatcagaccgccttctaccagcatgtgctgctggcgaccctcgcgggcattggcctggcggttgagcgggatgccgcgcagggcgtcaaacatcgctcccggatgtacagccacggcaacgccgccgtgccgcgcgatgacgcccaggttctgcaggtcgttgggcagatcagcagctgggcatgggcgacccgggccgcggtcctgcaggccgcggaatcgctgcagcaggcctatgtggcgcacgtcagcgacgacgaagcattgattgcccggcgtaaccagctggcggaagtggaagcggcgcaggcgcaggtgatcgccagcgactggatcccgcgggcggctacggagctgtttaatgccctcggggcgtcggatacgcgaactcgccttgcgctggatcgccactggcgcaatgcgcggacggttgcctcgcataatccggtgatttataaggcacgtaatatcggtaactggctggtgaacggtgaagcgcccacctttatctggcagataggcaatggtgagaaaacggcggggtaa

SEQ ID NO: 246582 - DNA, 3516 bp, Klebsiella pneumoniae
atggatgaaaatgctttagggtttgcctcatactggcgcaactcgctggcagatgctgaatcaggaaagggcagttttgaacgcaaagacgccaaaaatttcactcactggcatgggatagcggcgggacgtcttgacgaagcgatcgtcgataaattttttgaaggagaaaaagacgacgtcgaaacagtcgatgtcatcttgcggccaaaggtttatttccggttactgcagcatggaaaggaccgttccgctggtgcgcctgatattgttaccccgatagtgacgccagccctgttgagccgtgaaggttttttatatccgacgccagcgacctccattcccagagacctgcttgaacctttgccaaaaggggcattttcgattggtgagattgagcagtatgacaaatacaaaacgacacatacgtcattctctatcaactttgatgacagcgttgataacactgccgaaacggatgaagaacgagaagcacgatatgccgtctggcagcaggattggcgtcaatatctggatgattcagagaggctactgaagaacgttgtcggcgactggattaaaaatcccgagcaatatgaactcgctgagcacggttatattgttaaaacggcgcaatctggcggcgccagtttccatatcctttcgctttatgaccacctgcttgtttgcaaaaaggatgtgccgcttttcaatcgtttcgcctcgcgggaggttcatgcagcagagtctttgctcgctccggaagcaaaattcagcgacaggcttggacactccggagataagttcccactggcaaaggctcagcgcgatgccttaagccattttctggatgctaggcatggcgatatccttgccgttaacggccctccgggaaccgggaaaaccacgctggtgctttctattatcgccactcaatgggccagagcggctctcgaaaaagcggaacctccggttattatcgcgacttcaacgaataaccaggctgtaacgaacattatcgaggcgttcgggaaagacttttcccagggtactggtgcaatggccggacgatggttgccagagctgaaaagcttcggcgcttatttcccctcaagcactcgtaaagccgaggcagccaaaaaataccaaactgaagatttcttcaaccaggttgagtcaaaagagtatgtagaggatgcactgctgttttatctggagaaagctaaggcagcctttcctaaaaaagattgttcatcccctgaaaaggtcattgaactcctgcatggccagttggcagaaaaattcgaacaactggtaagactgaacgcaacatggcaaacgttaagccaggttcgggaggcgcgagagcttattgctaatgacattgagcaatatctcactaatctaaataaattactctccgggcaagaacaaaaagtcactctgctgaagagtgctaaaacggaatggaaaaaatatcgggccagtgaatccctgatctattcattattttcctggcttccggcggttcgcagtaagcggcagtaccaaatacaactgtttctcgaagataaattaggtgcgctgattgcgggaaatcagtggtctgatcctgaaaccatcgaacgtaatatagatggactgctcaactccgctgagcgcgagcaaacaacataccggcagcagattgactccgctcatgaaattgttcttaaagaacagcaggcggctcagaagtggcagaatctggcacttgatttagggcatgagggcgacgaggagctgagcttctcacaggcagatgaactggctgatacgcagattcgcttccctgcattcttacttacgacccactactgggaaggtcgttggctaatggatatggcgaagatcgatgatctgcaaaaagagaagggcaagaaaggagctaaaggggtaaccgcccgctggcaacgccgaatgaaactcacaccatgcgtggtcatgacttgctatatgctgcccggcaatatgcagataagtgaacacaaagggcagcgtaaattcgagaaaagctatttatatgacttcgctgatttactcatagtcgatgaagccgggcaggtgcttcctgaagtggctgcagcctcttttgccttggctaaaaaggcattagtgattggtgatacggaacagatcccgccaatatggagtattgctcccgctattgatataggtaacatgctggcggaaaaaattctgtcaggtagtacgcaagaagagattactgagaaatatacggcaatcgcagagcttggtaaaagcgccgcatctggtagcgtcatgaaaatagcgcagtgtgcttcacgctaccaatatgatcccgaactggctcgtggtatgtacttatatgagcaccgccggtgcttcgataatattattggatactgcaatacgctctgctatcacggtaagttgttgcctaaaagagggtgtgaagagagcaatttaatgcccgcaatgggttatctccatattgatggtaaaggagagctggcaagtagtggaagtcgatataatttgcttgaggctgaaacgatagcggcctggctgacagataaccagcaagatattgaaacgcattacggcaaatcgcttcatgaggttgtcggtatcgtgacgccttttagcgcgcaggtatcgaccatcaaacaggcgctgggtaaacaaggtatcagcactggcgcgaatgaaacgtcgctcacggtgggcaccgtgcattctcttcagggggcggaaagagcgattgttatattctcgccagtctattcaaagcatgaggatggcgggtttattgatagcgataacagcatgctgaacgttgctgtctcccgtgcgaaggacagtttcctggtcttcggcgatatggacctgtttgagatccagccagccccatctccgcggggattactggcaaaatatctctttgagtcagagaagaatgcgctctcttttgattataaagagcgtaaggatttaaaaactgccgagaccaaaatctacacactccatggtgtggagcagcatgataatttcctgaatcagacgtttgaaaataccggtaaacacatcacgatagtttctccatggctgacctggcaaaaactggagcaaaccggttttcttgattccatgattgcggcgtgttcacgtggtattaacgtcacggtagttactgacagaagctacaacactgaacataatgattttgagaagcgaaaagagaagcagcagaacctcaaagcggcgctggagaaactgaatgcccttggtattgcgacaaaactggtcaatcgcgttcatagcaaaattgttattggtgatgatagcttgctgtgcgtgggatcattcaactggtttagtgcgacacgtgaagcgcgatatgaacgatacgatacatcgatggtttattgcggtgataacctgaaaggtgaaattgaggctatttatagtagccttgagaggcgtcaggtttag

SEQ ID NO: 246583 - DNA, 303 bp, Klebsiella pneumoniae
atgaaattactaaacacttacgaagataaagatgaagcagaggatgcgttaactaaaatatcaggtgagaaaagactagcgagtgagcgcgacagcacagttgttatttacaatctttttggtactccatcatgggggaatttttataaactgggtatgtttaatcttcctgagttgcagaatatactggaattacgtaaggctgggaaacctattgatacggcaaagcatgatgagtacatcaaaacgcttagctatgctgctcgtgcatttgatttatccatcccaaaacattggttttaa

SEQ ID NO: 246584 - DNA, 708 bp, Klebsiella pneumoniae
atgaaacccattatcggattcaatcggcatctagagatggactggcttgttcaaaccgcctcttggtcggccaatggaattcaaggacaggcattaaaaaataaaattgatattttgcttgcccctagttttgacagtaaggtagcacaagataagaccagaaatcttctttttggcatttgggattcagaatcaaaatctgtaccaaaagaatttcattccgatgcctgtaaattgctcattgaacacagcgaaataaatatagctgttcattggggaatgatgcttgttaaataccccttcttttataatatcgttgtacaaattggtagaatgaccaaacatgaaggtctgttcgtttacaatcagttagaacaacgaattacagaaaattatggtgacacatcgactatcaaacgttgcttgcaatttgttgtccgaaccttaatgaatctagaattattatccaatccaaaatcaggtatgtatcagttgcgaaaagcaattcggattagccatgatagtattgttgcctggctagttgaagtatcagtgagggcccaaggaaattcgagcaaaagcatgactgctattattaatgatccagcttggttcccctttgatattaattttaatgaaaataaactatcttccaatttacgactagacattcatcatcaggctaatgatgccatcatttttatataa

SEQ ID NO: 246585 - DNA, 717 bp, Klebsiella pneumoniae
atggttaaaactccaggtttctgccgccacgtcgagaaggaatggcttgaacaaacgctccgttgggttgctagcgaagcagatagtatgcaattaaataataacctggaagtttttcttggtgcgtatatagcaacaaaagaaaatcgacgcaaagctcgaaatttattaacctcaatttggatgcgccccaaaaacaaagatgttttttttgagacaagcattaaattacatcaagagattgatgcattttcattacctattcattggggaatgttaattgcaaaaaaacctttctttgctgaagtcgcgcgttttatcggccgacaagctaggttaaataacgcatttacattcgctcaagcatttcgtcgaatgagtatgttatatggcgagacacaagcaaccagtagagcgctcagcgctgttttaaggaccatgatcgagttaggagtgttagatagaagtgataaactaacatcatattcggttgttccttttcaggaaaaggttaataaccatatagcaaactggttaactaccgcagctatgatttcattgaacaaaatgagcattagccttgatgaaatattaactgaccaagtgttcttcccattccaagttgatatcaatttgaatacacttgatgtatcaacatttgaatacatgcaacaaggaaacgcgatagtcgttttcaaaaggaatcattactcatga

SEQ ID NO: 246586 - DNA, 1965 bp, Klebsiella pneumoniae
atgacctggcaggatgacgttattcataaaataaatttggatggagcttttgtttacatcataaacgatccagatggactactatacgagcctgtaatagcaacctcacttcaagaaaaaaatgcgttcatttttgatgatgatgacccattagcattacgtctggcctatgaaacatggcgtagtggtgagaataaaatatctttcctgatacggctgacggttgagcgtgatatttttatacctcatgatattcaacatgagtcaaaagagattgattgtcatctatcagaatttttccaagatattgattcagacatactaagattactaccagccacgttatatcagtcagttatagatgcgctgaaattatttgctccgggtaggctcagccaacagtccagtctagatttcttattgcgccatatatatagaattgcacctgagataatccaatccagtacggaccttgttaggctattgattagaaagcattatattggcattgaaatgccaataccaattgaaacgagactaattcatctactgagtttagtgcctagttttggcttatggaatatcagtcgactgatttccaataaagcttatttttttgattttcttcaaaaacaatgggaaatatatttacaagatgaagaaaagagtcctatctactttgcatctcgaccaaacacccagctaattgttccttttgctgatggtgatgttcgcgtttttattgataatctgtttgctgaaggcattataaaaccagtggcgataaaaagcctacctcctgaacactgggcatcatttgctgtactaaaagaaccaaaagtaacagaaaaagaacgaatactacacctacttaataatgcaaaaaaaacattcaaccaatactcagaagaaagtacaaatgcagacttttggcttgagcagtcacgttctcttggtatcatgaacgcccttttttatcaaaataaaaatttacctgcagttgaagttttgtttgatgacattaaaaatatcaacactgatgtagatggattatttcaacattggttgctaatcaactatgcaaaaatacaaaccataccaactgttcgttatccatctatgttgcataaagttcctgactggatatcacgcaggatagattctggtaataaagtttgtttgcttgttttagatggtatgggggctcgccaatggccattattacgtaagcaattgcaaatatgcgaaaatatttcaatagaagagcattcttgttttgcttgggtgccgacgataacgtcaatttcacggcaaaccttgttctcagggaagcgtccatttttgtttggcgaatctttattgactacaaataaagaagaacaactgtggcttaattattggatggataaaggcttaaaaaaacgagaaattaagtatgcaaagaaaattgagaattattcagtcgatgaatggcaatcactagttgggtcactaccagttaaaattgccggtttagtcataaattttatcgatgaacagatgcacggcatgaaaatgggaatggctggattaaatgtagtagttgatagctggctagccgaatggaaattcaaagataaaatttcagacctactggagaatgggtttgaagttataattacttcagaccatggtaaccaagaggctatcggcatgggatatatcaatgaaggggtaaaagctgagactcgtggagaacgagtacgaatttataatgaccccagtttgcgagacagctctgctgcaaactatcaagattctgtgatagtatggcccggtcctgagatgggcctgccaaaagggacataccctttgctagccagctctgataaggcctttaaaagtaaaggggacatcgttgtagggcatggaggaatcagcctccatgaggcaattgtgccgttcattattgttaataaaaagtag

SEQ ID NO: 246587 - DNA, 2799 bp, Klebsiella pneumoniae
atgtggcaggtaggggattgggcctggagtcaggcccatcaacaatatgtcaaagtgattgaatgtgctggcctctggggccagcagcattaccgtgtctggttacagcaacaagatgtagtactcaaggtattagacaccgatctctacaaccaaccggtacagacaatcgtgacggctgatacgttatgctacttggccactgcagccaaaattgccaacgtccagcaagaagatactttactggcaccaatagaatcgaatgtcattcctttgccgcaccagctgaaggcgctcaccaaggcgatgagcaaaaaacaggtgcgctatctgtttgcggatgaagtaggtctgggcaaaaccatcgaggctggactggtcatgcgcgaattaaagttgcgcggactggcaaagcgaattctagtttgtgcacctaaagggttggttagtcagtgggtaagtgaaatgcagatccactttaacgagtcattccaattgatgctgcccggtgaacaaaaaccacagaatgaacatgacaatatctggtcacgttatgatcaggttgtctgccctgtcgacagtatcaagcccattgaaagccgcaaaggatggtcactcaaacaacttaatgagtataacaagcttcgttttgatgacctactggctgcgggttgggaccttatcatcattgatgaagcccatcggctcggcggtagcaccgaccaggtcgcccgttataagctaggccaaggtttggccgaagcagctccctatttattgttattatccgctacgccacatcaaggcaaaagtgatgctttccaccgtttgatggcactactcgatgccgaagcctttccagatgtaagctcggtctcacaagagcgggttcagccatttgtggtgcgtactgaaaaacggatcgccatcgatggcgaaggtaagccacttttttgtcctcggcaaacagaaatggttgccgttgcctggaaagcccagcatggactacagcgtcacctctatgaagaggtgactgagtacattaaagaaggctacaaccaggcgcaagccaaacaacaaaatgctattggctttttgatgatactaatgcagcgtttggtgagttctagtagtgcggccatctcacgaaccctcgcccgtcggctaaaagtactagaaaataagcgggtagaagaagaattacctttggcgtttgccgatgagtgggcggatctggatggtcaaacccagctggacaaattattagctcagtgccaaacatcgttggagaatgaaaaaaacgaagtgcgccgtttgctagcgttagcggagcaatgtgtaagtaccgaaaatgatgccaaagccgaagccttgctcgattggctctaccgcctacagcaagaagagggagatccatatctgaagatgctggtgtttacagagtttgtgccgacccaagaaatgttggcgcagttctttgttgaacgaggcatcagtgtcgttagtctcaacggctcaatggatctgtcagagcgtaaaaaggtacaagctgccttcgccagtgatactcgcattctgatttcaaccgatgcaggcggagaaggtctaaaccttcagttctgccatgtgattgttaattacgatatgccctggaatccgatgcgcatggaacaacgtattggccgcgtcgatcgtatcggccaacagcatatcgttcgcgcactgaactttgtgctcgaaggtaccgttgagcacagagttcgcgaagttctcgaagcgaagttacagattatcctcgaagagtttggcgttgataagaccagcgatgtattggattcctctgctgctaatcatctgtttgatgagttgtttatcacatctatcactgatcctactttaatggatcaggagttagctaaagccctggccatcttaagagacggtgcagtggacaagcggcaacaggatgcactgtttggtggcggagatcccttatctgctgaggactatcgccaaaccttgaaccacccactcccctattgggtacagagcatggtcgctagttacttgcgctggcaacgtagtatgcagcatacagctgattttactgacgaaattgatggaagccatactctaacttggccagatggtgcaacatggaatggagtaacctttattgggaaaatcgcccagcaacagccaagtttcacgcatctaacgctcgaaaaccccaagataaaagggctgtgtagtcaattacctgtctggagtgaagcacaactcatccccagtgttgctgttaagtcactaccagccggagcaaatggttattgggcattatggagtatccgccttgtggctggccatgagcgacgctgccaatatatgccagtctatatcaagcccaacggtcaatattatgcaacagcatcccaaagagtctgggatgctgtctgtagtaaagaatttgagattttacctcaaaacttagcagtcgagtcttctttacatcagtcgatctatacccttatgcataaggtggcacaagaggaaggaaaagctatcttcgaaagcatgttgacagccaatcagaccgatttagataaccagtttgaaaaaggtgaatactcatttaatgcaagaaaaaaagcaatagaacgagttggattaccagaggttcgccaatttcgcttgcgtcaattaagtagtgaatatgctctgtggctccaagatatagataaaaaacgcagagtgattcctgacatggttttacacaccattattgaaattaaaggatga

SEQ ID NO: 246588 - DNA, 2805 bp, Klebsiella pneumoniae
atgcaacaagacagcttattctccaacgagaactcattacaggaacagaaagtaggtcaagtgacctgcttgggaaaaactttcgataacgatcaagctcgtcgagtatattttttggctttgctagcggaaaaacttaaagacccagaatttcgcaaaatagaaggatttcccatcggtagtgatgagaacattttgaacctaagtgatccacctttttacacggcctgccctaacccatggatagaggatcttgttgcagaatgggaatcaaaaagcctatttagaaaagaaaaatatcatagggagccatttgtcgcagatgttagcgaaggtaagcaagaacctatttacaatgcccattcttatcatactaaagtcccccatagagcaataatgagatattttcttcattacactgaacctggtgatattgtcctcgatgggtttagcggctcaggcatggccggggtggcagcacagatgtgcgccagtcaagaagaaattagaaaactaggctataacgtcgatactcaagatggttcggttagttctgacggagttgttttcagtcatgttggcgctagaaaatgtattttaaatgatctttctccttccgccaacaatattgcttttggaagcaacagtccaattgatgtcactcgtttgcacaaaattgcaaatagcattttatcttcggccaaggagaagtattcatggatgttcaagactatcgatcctgaaactggaaatactgtcgatgtcaaatactatgtatggagtgaggtgctacagtgtagtagctgctctaacgatgttgttttttctgacaatgcactatccgaggattactcgaaagtttctgataactttcaatgtaaacactgtggagtgactctcaacaagaaagatttaatacctgtctacgaaaaatacattgaccaatatagtaaaaaaatgcttgaaagaccaaaaagagtcatgactttagtgtgtttttcaagaaaacgaaaaaatatcattaaaagacctgatgagcacgatctaaatattatcaatgaagtcatgaagttaagtgatagtatttacttccctagtaatgaaattcccgacatgcaaatgatgcgtgtagggagaatgaaaccatcaaaaattagccaaatcaatcatttctattatgataaaataagaataatcttgtcttatttatggcaagaagctaactccattgatgattttgagataagagaagcgctatgttattggctagattctcatttcgtaaatttatctttaaggaataggtttaggccgggagtttcgtttccttataatccaatggcgggggttttttatgttccaatgatgagttcggaagcgaatccttttattgcatatgaaaataagctagagagaatactaacagcattcaattctatcaaaaaatgcaaagataactttgtgataagctgtggttcagctagcaatctaaaaatacgcgacaatacaatagattatatttttacagatccgccattcggtgagaatatttactactctgatctaaatttcttcatagaggcatggagaggtgttttcacgaatgtggaaaaagaagctattattgaccgagttaaaggaaaagacctaattacctatataaatataatgtgtgatagctttaaagaatacttcagagtattgaaaccggggaaatggataacagtggaattttctaatacacagtcatcggtttggaatggaattcaaactgcattatctaatgctggctttattgttgctggtgtttctatactagacaaaataactaatacattccaagccgtcaacacaacaacagcggtaaaacaagaccttgttatctccgcttataaaccaaatgcagattttgaacaacgtttcaaatctgagcttaatactccggatggtgtttgggatttcattttcacacacttgaattacttacctgtaacaaagcagcaaaatggtgcactagtttatatttcagaaagggatccgaggattctctatgatcaacttgtcgcatattacgttagaagcggccaccctgtgccaatgtctagtatagagttccaaacgtctatagaacaacggcttgttatacaagatggaatggtatttttacctgaacaatctgtagaatacgccagaaagaagattttggcaaaagaactcattcaagcatctttatttgttaaagatgaagcaacagctattagttggttaactcaattacttaaaagaaagccttcagttttttcagatgtgaatccactatttatgcagcaactaggaggatggagtaaaaatgagattgttctggatctgcgtgaacttttaacacaaaactttctctgctatgacggacaagacgaagtgcctgagcaaattcatagctatctatccagcaactggaaagaacttagaaacctgccgaaaaacgatcctgcactagtttccaaggccaaggatcgatggtacctaccagatccaaacaaagctagtgatttagaaaggctacgtgaaaaatcgttgctaaaagagtttgaagagtacagggccaccaagaaaaaactaaaagtcttccgcatcgaagcagtgcgggctggctttaagatgttatgggaacggcaggagtatcctgctttaatcgccgtagccgataaactaccaagcagcatattggaagaagatccggtgttattgatgtatttcgaccaagcggttaccttgagtcaagtcgataccgatgacgagtggtga

SEQ ID NO: 246589 - DNA, 3726 bp, Klebsiella pneumoniae
atgaaaaagtacggagagctcattcaatttgagcccgtcacaactatcatcaaactcaaggagtctgctgaacagcacaaagctcagcagttggtggcgtcttatgttatttcggagaagatgtcactaaagctagcggacattataatcccacagctgcagtttgaagaatcagtagataacaaatccctctgggttgtcggtaactacggttcaggtaaatcacacctgatgtcagtgatctcggcagttgctgagtttccagaacttgcaaagtttattactaacgacaaggttcgccacgctgctggcaaaattgccggaaaatttaaagtcattcgctttgaggtcggggctagcaaaaaagcttttgctgatatcgtcacagacaacctgacctccagcttggcggaaatggggattgattatcaattcccctctatggatgaaatctcatccaatcacaaaccctactttgaagagatgatggcgctatttcatcaacgctatccagatcaaggtttacttttgatttgtgatgaaatcctcgactacctgcgctcacggaaccagcaacaactaccattggatatggcgatgatgcgcgtcatgggagaagtaattgatggcacacgcttccggtttatttgtggcgttcaggaagccattttcgacagcactcaattagcttttgctacgcaggaagtcaaacgcattcgtgaccgtgcagagcaggtattgatcacacgtgacgatatcaaatatgtggtcgctgaacgtttgctcaaaaaagatgcccaacaactgcactggatccgtgagtatctgcaacaattcacgtcttgttttgatcgcatgaatgaacgactcgacgaatttgttcggatgttccctgttcatcctgactacatcaatactttcgagcgagttcatggtgcaggcatcgaacaacgacaggtattgcgtagcctctcgcggcagatgcaggctttaatggagcaacaagtcccccttgataagccaggcgtattttcttatgacacctactgggatgaactcagaagcgatcccagcgccaagaccaaccctgatgtaggtcaggtcattgatgtcggtgaaaccctgtttactcgtattgaccaagcctatccaaccgcaaccgaagtagactttgccaaacgcctagtagcaggtttggcaattcatcgtttgactgttggtgatgtttataacgagatgggagcaactgccgccgagctgcgtgattcactttgcctctatctacctggtatcgagcaactgccaggagaaaagagtaaaaatttggaaactcagattgttgctgtactgacgaagattcgaaaaaccgtcaatggccagttcttttcaaagaacaaggcaaacgatcagttctttttggatttgaaaaagactgaagactttgatgcttacatcgaaaacaagattcccttgctaaccgatgatagtcgtaacggtgcctatcgtgaagctatgctgcagattctggaagaaactgatatgcagcaacccaatatccagatgtggcggcacgagctgaaatggttggatcgcaatgttaaccgtccaggttggatgttcttaggctcacctaatgagcgggaaacagccaagccgccgctcgactattacatgtattttatacagccatacaacccgccaaaacagaaaaaagagtacatccgcagcgatgaagtgctatttatactgcaaaatgctgacggcgattttgatcgcagcctgaactactatgcagccgctatcgatttgcatgcttctgctacaggtaacgccaagaatgtctacaaactcaaagcggatggttatctgagagagatgcagacttggctaaaaagccatttcaaagatgcctacattgcccaatacaatgggcaaagcaagccgatgatggactggctcaaaggtacctctgtccgtaacatttctgggctcggtgatagccaaattggcagcctcaaggatatttttgaatccgttgccagtcatatcttggctaatcactttgtttcattagcacccgagtatcctacttttagtcagtggatcacctatgaaaacatagaaagcgcagccaaagatgcgttaagtgttgtctccggtggcgctgcgaccaagcgagctaatgccgtccttgatgcacttgaattactggatggcgataaaatttccccgctacaatcacgctatgcccaagctgttttagctgttttgcaaagcaagccacaaggccaagtggtcaatcaggcagaactgctggaggccatcaattcccgactctattttaaaccagaaagcttccgactagaaccggaatggctgctagtcctgatcgcatgtttggtttatagcggcgagcttgaattagtagtggtcggccataccctgactgccagcgatgccgtcaaattcaaatccattgcatttgatgtactgaaagactttaaacatatccaagcgcccaaggattttaatgtcactgcattaaaatctctgctcactctattggacatgaatgacggtttagctacctcgatccagcaaggtgatgagagcatagtgcgcgaaatgctaaagcgcacagacctgctgatcaacgaactagtcaaggggcagcaaagtgtcaaagaacgtttgccgttatggggacaattagttctggaagaaagtgaagagcaaactctgtcaacacagctaactgagcttaaaaactttttggaaacaatccagcgctatgacaaacctggtaagttgaaaaacctcaaggtcactgcttcagaaattacctgtttccagcaaatgcttcaggcatggagaaattttgttcaactcaaggcggcagtcaatgatctgaccccattatgcacttacctcaaagaggctcagttggtactgcctgagcagcacatgtggcaagaacaagttaaattggctcgtgacacattaagacaaggtttcgctgacccatcattacgatacaatgagaacttcaaagcgacgcagatctctgttttgacagggctaaaaacagagtacgcgaagcattatattgagctttatatacgggcgcgtctcgacagtagagaagagaagactaaatccaaactgctaagcgatgaacgtcttgcagaattggatattttgagtggcatcaccttgctcccagctcaacaactagctgattggcgtaaagaggcagcacatttacaagtggctaagcccattgatcccaaacaactggcgatgaatgccaatccagtagaattcaatgctcgtcaagaaagcagcaaggccccagcgagtgagcaattaaaaaatctggaacaacgactagatagtttacaaaacgattggcttagtaatctgaatagcctgctcgatgatccgtttattaacctcgacctgctcaagcccaatcaggcactgctaattcgcgattttattcaggacggtcagctccctgagccacttgatacagcatttatacaagtggtaaaccaagtgctagcaggattggaagagttaagaattaactcgaccgagcttattaatgccctaggaaaaggccttcctcagagccgtgacgaagtagctgagcgctttaatcggctgctcgacaagctttgtcagggtaaggacatcaataaagttcgtatcattatcgattaa

SEQ ID NO: 246590 - DNA, 519 bp, Klebsiella pneumoniae
atgattggtcaaaacatccatactacaatcgtatcctcgacttacgatctgcttaaggaaaccaactctgcccttttgagattgcgtgaccaggctagctcgctggtgctaatcgtcaactcaactgaacgagccatatggccttctcaactgtcagaaaaagtaacgttgctcgagctatctgaacagctatgtgaacacttgctaccattatcacgtggtgatcgatcctgtaaggcaccagatatcctcactcaaatgctaaattgcatagcgtctgaagtagtatggattgacaggattcaagctctatttgaaccatctttggaactagatcctttgcgccagctacaagagctagcgcgtatcaagcctatcatcgctatctggccagggcagattacagaacaatttttaaccttttcagttcctggaagggccgattatcaatcttacacagcgaatgagctggcaaatctgccgatcattcattttgttgagcagagggaatataaatga

SEQ ID NO: 246591 - DNA, 516 bp, Klebsiella pneumoniae
atggatattaagcaacgaccattaacaaaagctgacttgacgtttgtcatggatgaactagcagcaggtgcccggacggggaatttttccaataattttattgattcccgaatctcaaagccttttgagaagcagatacgtgagatgatccgagttagagataccgggaagtataccggccattactttaatattatagctcgagggactgacgggaatcgactgggtttcatatggttgcaggatgtcatcattgacgagcaaccggggctggaattacgagtgttgtgtgtctccaaacgctatcgtgggaacaatattgcaacagccgtgctcaataacatccttgagcattatgctgagcggcctttccaggcgaagtgttatgccaaatcaacacaaatgatcgagatgctaaagaagcgggggttcaatgtattaaataccgccgcgtcgggtaatatgtttcttgtacgaaatgccagtcttcatttgcccattattaaatcactgtag

SEQ ID NO: 246592 - DNA, 582 bp, Klebsiella pneumoniae
gtgaggcaaaacagcagggccgcgccggtggcgtttttccataggctccgccctcctgccagagttcacataaacagacgcttttccggtgcatctgtgggagccgtgaggctcaaccatgaatctgacagtacgggcgaaacccgacaggacttaaagatccccaccgtttccggcgggtcgctccctcttgcgctctcctgttccgaccctgccgtttaccggatacctgtaccgcctttctcccttacgggaagtgtggcgctttctcatagctcacacactggtatctcggctcggtgtaggtcgttcgctccaagctgggctgtaagcaagaactccccgttcagcccgactgctgcgccttatccggtaactgttcacttgagtccaacccggaaaagcacggtaaaacgccactggcagcagccattggtaactgggagttcgcagaggatttgtttagctaaacacgcggttgctcttgaagtgtgcgccaaagtccggctacactggaaggacagatttggttgctgtgctctgcgaaagccagttaccacggttaagcagttccccaactga

SEQ ID NO: 246593 - DNA, 327 bp, Klebsiella pneumoniae; identical to SEQ ID NO: 5975

SEQ ID NO: 246594 - DNA, 1584 bp, Klebsiella pneumoniae
atgactctcatctctcttttgaagcacgaaggtccctgcctgagttcaacgctggcggatctgctgattcaaagcaaaaacatctctgctgaaaatgcgaggaaggttatctcacgggctgtcttagccggtgagataaagagcattaaaaacgtattcccaaagagggagcagtttgtatatctcagggactcctatggtagcgatgagttctggcaggtactgaccgataagctgatagagagtggttcagcattgggccttgcactgagcgcccttctggccagaggagggatcattcctaaacgtgattttggtgctgcaagtggttcacctgtagctatgaagaaaaaaatttcgttcactgtagtatggcaaaggctggtgaaaatcggcttatgcactgaaattatcctgcctgaaattggagaatgcatcgctctcagagaaaaagatgaaaggcggtacgattacgtatcgagacagatacatgcacgtctggtgacagagagcatttttatcgcgacgatggttcagtggagtcagaacctcaatctgatcagctataacctggcaaggacgaggctggatgtagaagggaagccacctgctatttcaaactatctgttcgatttaacaggtccctgctatttgtctcctcttgtgacaccaggaagcgatgtaaacaagccgggtttttttgcctgtgacgttctgcttgggactaaagtcactctggcccaggtacagcccttcatagctaaatgtaaatcgctaaggagcataagaaacgtaggtaaaagtctttttatgctggccgccagtcagttcgataaagatgcttttcatgctctgaagaaggaaggcgttatccccgctacaccagaaaatctgttcggtgaagagtttgcaaagtcactgcgcgagctgaacgattttctgttctattacttcacaaatgccagctctaacctagaaaaaattgattctattatggttgcgctaacgaatgttaaaggtgccgcggcgcagctgcagggggcgctcttcgaatatcttgttgctgaagtgatgaaacatgaaggagccgttgagataggaaaagttttccgttctgttgacggtaaaaaagctgaaagtgatgtattcatcgctaaggggtatcaggaggtaaggtttattgaatgcaaaggctacaaaccctattcctttgtcaagcatgaagacgttaaacactggataggagatcaggtacctgtatttttcgatgccgccaaaaaagagaagccagaagccgacattcatgttgaattctggaccacggggaagttgggcttagacagccaattatcgcttgaaaaatttcgtgataataactcagtcaggaaacgctataaaatacacgtgctggaagctcatgatgtaaaaaaaagattccatgcgactagaaataaaagcctgattaacgtttatgaaaaacatttcgcagaacctttctataaagaaaaaaatttggatgacttcagcgaaagttaccgtctggcaggagggccgcaatcatacttcgacaatgaagaaaaatga

SEQ ID NO: 246595 - DNA, 162 bp, Klebsiella pneumoniae
atggggtttgtgctccactgctcaggacgggataacacacttattaccttcagtaaaggttttggttgcacggttcctgaactagaaattgtactgcttgatactgatcttgaaaaggtctttacagcggacccgtatattccgaaaacagcttctgtttga

SEQ ID NO: 246596 - DNA, 1410 bp, Klebsiella pneumoniae
atgctcaatgatgaacatgaagggaagcccgtgataaatctgataatgaaagtgagtgatgaagactggaacgttcccgtgggccaacttgcccacagctcgatgcccctgagtcgttatctggaatacacgaatgacagactctcgatcatctacagagaagtgaataaaacggtcctcgataaacttaagctcataccctgcctgctgatgactgagtttgtgaatgaacagaaccaggatggacggtcgcgcatggtatccaatatccgggtgggtatgcttgagagtgtagcagtcaaagggaaaaatttagagtatgcagtccgcatcgattatgactacgagaaagtgacagtcgataacttcaaattgctgggtgatcggttcttctttcatctatttgaaacgtcgaggacccactgggccatcaaggaagtcagccttcctgaagtcatgaatgcttttgggttaagacttccgacacccccgcttgccaaggttcctccgccgccgccgccaggattgtatgaacgcgagcagagcgttacgtcggtagaggcgttcctgcagaaaataaatgaatttaaggctcaggaagggcaggaagtcttttaccgcggacacagcgactataagtacaagctggagccttccctcttccgtgaagaggaggccgtgcctctctataggcataaagaaaagaacatgattaatgagatcctgacggcccatccggctgaattttatcaggaccatttcatgatagataagctggttcgcatgcagcactacggtctgccaacccgcctgctggacgtcacagccaatccgctggtcgccctctatttctgctgcgcggacatgctcgataaaaacgcggaggaagagaaaacaggggatgtgaaaatttttaccgtccaggcggacgacatcaagttttataactctgacaccgtaagttgcatcactaacttgtccctgcttagtatggaagataaaaataaaatcattccggaaactgacattccgattcatcttcgaaacaaaaaatctacggaaatgaagaggctaattcatttcatccgctccgaaaaaccgtacttcgaagacgcaatacgtccaggcgacttgagccgtatactttttgtgcgcgggagaattgccaaccagaggatttcatcccagtccggtgcatttctgcttttcgggcatgaggctgtcctgccggataccggccacagcggtcttaaggtagaccgaatctatatcagcaacaagaaagcgatcctgcaggaacttagcaggcttaatatcaaacctagtaccatctaccccggtattgaagagacggcgagagaaattgcccgcagaacgaagggtgaagagatccttaaccggctaaaatga

SEQ ID NO: 246597 - DNA, 714 bp, Klebsiella pneumoniae
atgtccgaagatacaaagaaaaaaggagtttatgacagttttttccgacctgtattgaagttgtttcttcaattatgcttatttgttttgcttgtcgggtttgtttctttcctgtttttttatttctttaaaagtccgataaaagaatttattaatacctttggttggtatgtttcagctaattccgtttcggatatgactgctaaggaaactaaggcgctagctcatttgatgagtaagaattatatattaagtaccaatgatttgctttctcaaattggtagtttttattcatatacaataacaatattgatatttttttgcacgttctctgcattttttgctgtattggtaataaaaagcaatgcggatgacaaatttgatatcactatagctgaaaaagttagatacttttttgcaaatgataaaggttttgacagcgatgtaaaatctaaagtttctgatatctttgcagaagaaggcgaacaattatctgggataactaaaaatgaagataatgatactattatccagctcaggcatgaaattaaattacttaagatggatttttataaactaaaaaataagttggctcctgatgatgagtcagaggttaataccgatgactattttaagaatatgatagattctttgcaagaaaaagagcagatagtaactagtgagaaagaggatgttaaccatggcaatccttaa

SEQ ID NO: 246598 - DNA, 546 bp, Klebsiella pneumoniae
atggcaatccttaaaagaaaagtaagcagtacctctgcctttttgcctgtggatatgatggatttaaataatccacaagacgtacttgattatgccattacacttaatgttaaaccaacaccatttgatctagatgattttataaataaaattggaattgagttaagacgtgttgtgatggctgatgatatttctggtcaacttcaaaagaatgacaatggcaaatgggttatatcagttaattctttacatcatcaaaaaaggcaacgttttactttggctcatgagcttggccattattttttacatagaaatagagccatagagtttattgataaggctttatatcgtagctcgcagatggacgcaatggaatacgaagctaacaattttgctggagccttgctaatgcctaaaaagatactcattgagtttattaaaatgaaaggggctaatgccgaaataatctctgattactttgatgtctctgtccttgctgcaaaaataagagtggagactttacagaggaagttatatgaatattaa

SEQ ID NO: 246599 - DNA, 1086 bp, Klebsiella pneumoniae
atgaatattaaatattaccctattataaaaaccactattgctgaaattagagctttaaagaaccttgatcaaaatacttggcagagtatgacaccaatcattgagcttacaaagtcgaggaaaggcaaaaacaatcaggatgctagtgtctacaaaaaaatagacgagttgtgtcaagtaattaaatcggaagaattgattcttgatctaacgacaattgattctctttctaatgaacaaattgaaagtttttatgatgatagtaattactttgaaaactggtgctcttttatagagtatgtaaaaggcaaaataccgggtgttttacctgtattgcttgcttatcctgactccaatattaatgaattgattgttcaggctgaaaatttgtgtaagcatactcgccatgtagttatccgtataccaatcttcgaacaaggattaagttctttatttaatacgttattgcaattggttcagcagaaaccatacctcattcacagtatcatctttgatgcatcatatattaaggaaaaaatcgaacaaaaaccattcgaatatattgtcgcgtttatttcttatttcttccaaaaaataaatgggttctatactgggaaatatatattttgctctgagcattatcccggaaatattactgaatacttagataaaaatcaaaatcaatatgagaataaagtttactatggtaatctttcattatatgaaaatattaatttggaactcgctaaaatagctataccaaatgttttatatggcgattatgcatgcattcacccatttaggaatgatgttaaagcttataactggattcctagaatagattttccaacaagagattctatctttttttcaaaagttcgtcgtgatgttggtggatatgataaatgtgcgaggaatattgtcacattgaatgcttttcaaaatgacaccttagtttgctggggaaaaaatgagatcacacaagccagtttaacaaaagcaggtggactcaatccgtcatattggatttctgttcgttctaatattcatatttctaggatggcaaagcttgtaaaaaacaattaa

SEQ ID NO: 246600 - DNA, 606 bp, Klebsiella pneumoniae
atgaatgaacttgattttaaaatacctttaactgcttattttggggaaaataaatctgcagccctaaattttgaatttccgtttgacttcaatagacgtagatgcgatctacttgtttcaacctgtgattcaattataggagttgaaataaaaagtgatttagataatcttgatagattagaggatcaactgaattcgtattataaatgtttcaatcaaatttacgttgcatgtggtaagaaacattatcagaaaattagacagatgaaaggacgattcggaattatactcatctctgatggtacattaacaattaagagaaaagctaaaataataaaatctctagcattactgcccattctagatatgtgcgataaaatatctttagaaaagttaagcaatttaaaatatcagaataaatctgatttaatcatgtctataataaataattttagtaaggaggaaatttatagaatttatcacttatctattcacgaaaaggtatcgcgagtatataatgcgtttctttcagaaaaaggagatgtaataaccagcgaagatatcactctcctgagtctgaaatcaatgaatctaggtgcattttaa

SEQ ID NO: 246601 - DNA, 252 bp, Klebsiella pneumoniae
atgaagttaacagcccgtcaagttgatactgctagaccgaaagaaaagccttacaagttatctgatggcggtggtctctaccttgaggtagcgaccagcggctcacgttactggcgtttaaagtaccgttacgctggtaaagaaaaacgcctagcctttggtgtatatccagaagtctccttagctgaagcgcgtgataaacgtgaagctgccaaaaggtactggcagcgggtaacgatccgggtgaagtaa

SEQ ID NO: 246602 - DNA, 714 bp, Klebsiella pneumoniae
atgagtcgctcacaaaaccttcgtcacaatgttattaaccaggtcatcaacgacatggcgcgcggctttatcccctcgccgctcccctcgcaaagcgcactggcggaaatgtataacatcagccgcaccacggtgcgccatatcctttgccacttatgcgagcgcggcgtcctgagccaggtcaatcacgactaccagatccttcgtcaaccggaagtacaggacggcttcgatagttccagcgcctcgctggccgaacaaaaccgtctctttgaacaagcgtttttcaccatgattaaccaacgccagttacgcgccggagagcgattctccgaactgcaactggcgcgtgccgcgggcgtcagcccggtcgtggtcagagagtttttactgaaattcagccgctacaacctgattgaaagcgaaaaacgcggccagtggaacatgaagaaatttgagcaatcctgggccgaacaactgttcgaattgcgggaaatgctggaaactcacgcacttcaacactttcttaatctgccggacagcgatgcccgctggctgcaggccaaaaccctgcttgagcgccaccgcactctgcgggacagcattggcgacagctttcgtatgttctcccagctcgatcgtgattttcattcgctgctgctttccgccgcggataatatatttttaatcaatcccttgagattatctccgtga

SEQ ID NO: 246603 - DNA, 204 bp, Klebsiella pneumoniae
gtgatctttcacttccactatcagtgggatgaaagcgaccttaaacagcgcaatatcatcgctattgacgaacatatgactatcctgagcgcactcatctgtcgcagcgatctggatgccaacctggcgctacgtaaccacctgaacaccgcgaagcaatccatgattaactctatcaagcaaagtgaatcgctggcgcattaa

SEQ ID NO: 246604 - DNA, 252 bp, Klebsiella pneumoniae
atgaccttaaaaaaatggctatcagtttttgtttaccttcttgcatcatgtgcttttggaatgaatatttttgttgtgctattgctctatggtgtaaggttttttttctgggttatgtttgatgtaccatttgaaattcatattgatgatttaatcaaatatagtaaggctgcaacatttgctggaataattgtcgcggtcggctgttggtggatttattaccaaggctacaagaaaaatcgtaataggtag

SEQ ID NO: 246605 - DNA, 456 bp, Klebsiella pneumoniae
atgaatgacttcaaaccctttgaggacaagctcgccggattgatagcggccctttcccccgccgggcgtcgtcggatgaccgtcgacattgcgaagaaactgcgccagcggcaacaacagcgtattaagtcacagaaagcgccggacggttcgctctttgccccgcgtaagcgcccgcccgtcagggcaaagcaaggccggattaagcgcgagatgtttgcgaagctgcgcaccaatcgctatatgaaagcgaacgggaacgacagggcggcggtagtggaatttaccgggaaagtgcagcgcattgcccgtgtgcatcagttaggtctaagagataagccaacgctcgatagcacatctgtagactatccagctcgaaggttactggggtttaataataccagtgtacgagatgttgagaatataataatctaccatctcaagcttatgctttaa

SEQ ID NO: 246606 - DNA, 1119 bp, Klebsiella pneumoniae
atggccgcgatttatgcagcaaggtcagctagaggggtttttctgtcaaataaaagcatagaggaaaataataagaatgagtcatttgatagggtttttagcgttcttcttgaacagcattcaatgtatttagataaggtgaacgtttttttgagtgagagggcggaaagtaaattattcagtgttgaatatttgcgtgatagaactataggcgaggcattggatattgttcatggtgataacaaagttctctatgaagcagggtattactatgagtgtgccactgacggaaaagtaaaaagaaatgatggtaaggatattaaccatattgagtcggagaggatcgttggggttgttgggaaatacaatgaatttgccagaaatagtctaagcccttatatgcgtattctttatcatatattaaagtctattcatgaaagctttggtcgtgggacggaggagcagagaaaaaaagcaaagcagtatagtaatattgttcgctcaactattccaagcgacctcctttttttgattgcgataaatagtgctggatttttaatcaagaaaagaaggctctccttgcaaataaatcagccaagtgacttctttagtgattactataagtatcatttccttctcaaaaaatatgatttctttgagcatttgccacaatcttatctcgaaagtgatttgaaagtagatggcgctatcacagaccggatgcctctaaaggatgttgaggggggtgttaaggtgaaaaataataatggtgttttgggggtttggttttcaaatcctgaaatttttggttttcatgatttgttgggtgatattgttttggggatgttgaaggagaggtctttgcggtgtatttgttttttctatgggttggggggtaataaattcaaagtcagagaatattttaaaaacaaatatgttcttggagtgattgactcctttgatgaaaaagatgttagtgatttagatttaagtttgagcccttcgagcctgtttgcatatgaaagaaatgaatctggatatatatcatttatgagtgtgatttgttttgaaatgataatttcagggaattatctggaaattaaaaacaatgagagttag

SEQ ID NO: 246607 - DNA, 318 bp, Klebsiella pneumoniae
atgctccagcggcggcagatctggagtgttcacaccaaacagtgccgccagtgcgcgatagttctgctcgctgtgatagcgacctttgcagcggaccagcttctcggctgctgcgttgatggtctgcgccttctgcagcgcctctaccagcgcgaggatgttggcagggtctttcactatgctttcgtattgttcagcggcacgtataaactcggcaatagtgatttcgactttgtcatatttaccccatgcctcttgccacttctctgctgccgctttcaggctctgcgccagttcggtgatatcagtcatggttga

SEQ ID NO: 246608 - DNA, 261 bp, Klebsiella pneumoniae
atgagcctcgctacttatctcaataccggtttagccattctggggtgggcatacatcatggttaaaacaggccagtggattaccaaaaatgctctgaggcagtgggacaagcgtcgtaaggaatctcgccgccagaaagctgtgaatgagttttatgacgcctttgagcttaacagcctggaacctggctctaccgttcgcctggccactaaaggcgatctgacaatcatgatgttccgcagcgagggggccgacaaatga

SEQ ID NO: 246609 - DNA, 156 bp, Klebsiella pneumoniae
atgatgtcatttattaaaagagcgcttttgtggttgttccagcaattaatttcgctgtatgccccgccactttgcattgtcatatttgcagtgttttttttcaaatttttcctgaggggccggtttggcctgttggtatattcgctgtacttatga

SEQ ID NO: 246610 - DNA, 159 bp, Klebsiella pneumoniae
atgagctataaggaaagcaacagcatccgtgctgcttatacccacaaagccaagcatcttgagcagcgccgcctgatgctgcagtggtgggctgattatctggatgcgaacagcaacggtatggtcaggcggtttgagtttacgaataatccgctgtaa

SEQ ID NO: 246611 - DNA, 1182 bp, Klebsiella pneumoniae
atgaaaatacaaaaaattgatatcaaagatgttggtggtataaaaagagcaacaattaattttgatgcaagtatgaatattatttgcggaccaaatgggatcgggaaaaccacaattttagattccgtggcacatagctttatttctacaagcagctatgtcctgaaaagacatgctcagtcgactgatggtcagataaataccgttttaaatgattgtgataatattaaagaagtccatatttcttttgcgaatttcaatccgcaggattattcatttgttcatgggttaagcgatgctggaaggaaagtgatttatttgaacatttctagaatgtttaaatatgtatctttatctaatatttctaaagatgaggaaagacaagatcatagcataaatacacttttgactgatggaatttcggttgcggatatgaaaaattggttcgcaaaacgttgtctgttcgttaatacaccagaagcattaagtgaaaataataaagttaatttgaagttggcaaaaaaatgtttttcactgcttaatactgaatataaattttctcgcgtagatgcgaaaaaatttgatgttttcgtatctactccaaatggagaaatttggtatgaatatttatcatcagggtttaaatcatgtctgagtattttattcggcataataaaagagattgaactaagaatgcctgatgaagattgtttagcacagcattttgatggcattgtattgattgatgaactggaaatgcatcttcaccctgaatggcagtccaaaattgtttctgttctgcgagacacatttcctgcaacacaatttatagttactactcatagtcctcacattatacaaaatgcggaacctaatcagataattgcattagggacagatagtaatggatatacatacgtcagagaacttccgagtaatgagtttggttatacaggatggacagtagatgaggtactcaaagatgtcatggggatggaggacacaagaagtaagaaattacaaaatatgcttgctgcatttgatcaagctattgatgaggagaataaaattgaagcagagcgcatttataaagaattagatagggcacttcatccagcaaatgtgcttagaaaaatgcttagtattgatctttcctcagtaatcgaggagggcaataaatga

SEQ ID NO: 246612 - DNA, 747 bp, Klebsiella pneumoniae
atgattaagctggaaagaaattttacacctctattcttttctcctcagaatgttagtcgtttaactgaaaaatttaagagcaacggtactcatgtatggcatcacgatgatgtaaaaaattcgttgatggagttaagtgataaaaaatgtgcatactgtgaggttaagcttggtgaaaaaagcacatatcatgaggtggagcattttaaagataagaatgattaccctgatgatgtaatagagtggaataacctattaccttcatgtcgtcattgtaatggttctaaagggacacatgatgttgtccaagaaccaatagttaatccttttgaggaactcccggcagagtttttttatattaaaaatttcagaatgaaaggaagaaatgagaaaggtattctgactatagatgttttaaatctcaacgatagagagcatttggttaagccaagatgtgaaactggagctataattgcggaaaaaatagaagattctttaactttatttgagatatatctttcaaatccaacaggaaaaaataaaagaaagttaatcggtactgttagagggatacttaaagaatgtcaaagaagtgccatattttccgcagtatctgctactatattacatacgagtgaggattatctggctttacggggtaatatgatggcccataagttatgggatgaagatatggagaaccttcacataatgtcaaacaatatacaattaccaacaacagcttaa

SEQ ID NO: 246613 - DNA, 258 bp, Klebsiella pneumoniae
atgtcacagtggaacattgcaaccaaatcgaaagatgagcaggacaaggtcaacgtagacctcgcagcgtccggcgtcgcctacaaagagcgcctgaacatgccagttgtcgctgaagtggtagccagagagcagcccgagcatttacgcgagtatttcatggagcgcgtccgctactaccgcgagcagagcatccaactaccccgcgcatccgatccgcgctatctcgaaatggcagagcagaacgccaagaaatag

SEQ ID NO: 246614 - DNA, 408 bp, Klebsiella pneumoniae; identical to SEQ ID NO: 99744

SEQ ID NO: 246615 - DNA, 162 bp, Klebsiella pneumoniae; identical to SEQ ID NO: 99742

SEQ ID NO: 246616 - DNA, 972 bp, Klebsiella pneumoniae
atgacaagtatagcaattcttgaagcagttaacacctcttacgtaccgttcaacggccagcagattatcactgctatggctgccggtatcgcttatgtagcaatgaagcctgtcgttgaaaatctcggtatgagctggggtactcagcagcaaaagctgacgagatctaaggaaaaatttgggtgtattcatatgaatataccttctgctggcggcatccaaaagatgcttgtccttccactgaagaaactcaacggctggttgttcagcatcaaccctgagaaagtccgcgctgatatccgtgacaagctgatccagtatcaggaagagtgcttcaccgttctgcatgactactggacgaagggggcggctgtgaaaacctcacctgaaaccacagttgatgatcgcacaccattgcgcggaatcgtgaaccgtattatgggtaagtacggcatgacgtaccaggcagtgtacaaactggtgcataaagagtttggcgtgaagcatatagaagagctttcaccaaagcagacggcggaggcggtggaatatcttgccaccaaggtaatcgagggtgagttcatgggtaagcagcagccagctgcaactccacgctatcatttccctgtggaaacggcagatccgcataatcgtaccttcgctaacgactggatttcagctcaggtcatattggatgagagaaaccgcgcacctgagcttgagctgctggaagctctgcagaaggacggttgcgacgtgcagggagcaagaatccgaattcacgcgatgtacgacatagcgaagcaattcattcacatgcaatctgaactcgcagaaatgaaaaaatacctcagagtcattaacgacattgttaataaccagacggtagagcgtggaatgaatgtctgcttcacgggcaattcaaagggtcacgctgttggcgggtatgccaaacgctgcttaccaagataa

SEQ ID NO: 246617 - DNA, 1509 bp, Klebsiella pneumoniae
atgaatggggggaaattgccggaggggtgggctaaaagcacaatcaatgaaatgtgcaacctgaatcccaaacttaaacttgatgatgacttagatgttggatttatgccgatggccggtgttccgacatcctatttaggtaaatgtaactttgaaaccaaaaagtggagtgaagtaaaaaaaggatttactcaatttcagaacgatgatgttatttttgccaaaatcacgccatgcttcgaaaatggaaaagctgttgtaatcaaagaatttcctaatggctatggtgctggtagcactgaatattatgttcttcggtcaattaatgggttaattaatccccattggttgtttgctttagttaaaactaaacattttttaactaacggtgcacttaatatgtccggttcagtcggccataaacgtgttactaaagaatttgttgaaaagtattgttttcctgtccctccgcttgccgaacaaaaaatcattgccgaaaaactcgatacgctgctggcgcaggtagacagcaccaaagcacgtcttgagcaaatcccgaaaatcctgaaatgttttcgtcaggcggtgctagctgctgctgtcagaggagaactgacagagggctggcatacagaccaaaatttagttagcgcaaaatctattctaaacgagatcgaaactgagcggaatcaagctaaaaataataagcttattaaacagagtttcggaaaaaataaagatatatcaccattattcaacataccatcaaactcatgggaatgggtttgccttgaacaaatttgtgcaaccaacaacaatgctcttaaagcaggtccgtttggttccgctttgaaaaaggctgattgcgtagaggttggttataaagtttatgggcaagaacaagttatttcaggtagcgaatcccttgaaacataccgtataaatgatgataagtacgaacagcttaaatcatgtaccacaggtcctggagatatattaataagtctggtaggaactatagggaaagtattggttttatcttccaaggcagaacttgggattataaaccctcgacttgttaagattaccttacataatgctatcagccctcaatatattaaaacttacctcgatagccctgtttcccatagttttttcaaaggattcagccatggtggaacaatggagattctcaacttaagtatactcaaagagttacctatagcacttcccccattagaagaacaactcgaaatcgtccgccgcgtcgagcaactcttcgcctacgccgacaccatcgaaaaacaggttaacaacgccctgacccgcgtcaacagcctcacccagtcgatcctggcaaaggccttccgcggcgagcttaccgcccagtggcgtgctgaaaacccggacctgatcagcggtgaaaacagcgccgccgccctgctggaaaaaattaaggccgaacgcgccgccagaggcggtaaaaaatcctcgcgtaaaaaagcgtaa

SEQ ID NO: 246618 - DNA, 669 bp, Klebsiella pneumoniae
atgacacaaatagattttaaatcccttaacgatttatctccttttgagctaaagcaatatattgacgaacactatttcacctctgaacagaaagtacagatattcgaacattattacagcacacataaagatattaccaacatctattcaagaaaagaaaacatcaaatccatcaagaaagatgttgattatgttcatatgttcactaaaaacttccagcaactagcagagcttgatatttcaaagaatgagttaaaagtcatcgcaaggatcttaaatatcatggagtttggaaactgctttcatatctcacaggcaaagctatgtcgagatttagatattaaaaagtcaaatatgtctcttgtctttaaaaagctcaaaaagaaagggatcattattgataaagacggagatctctttatgaactccaacatattccttaaaggacaagctcattctatcaacgcaaaacaacgtcctaatgtcaaaaaggcgcagggatttgttgttgatgaaaaagaacgatttgaaaacgtttatacttttcgaacagagactgatgaaagtaatgagatggacaatgatagtgaacagtctaccgacaatgaggatttgaaactacagtcccctgaagagatacctgactgtctttttgaaaagacagaataa

SEQ ID NO: 246619 - DNA, 126 bp, Klebsiella pneumoniae
atgctggaaatggatgttctcctaatggtttacaagggcgggcagttgatggttctatattatcttgtactaatggaatgtggaaagaaggggggggagtgtaaacaggatgtttattgttgttga

SEQ ID NO: 246620 - DNA, 900 bp, Klebsiella pneumoniae
atgaaagaaacaaatgataagggattttcattactggagctgacattagttttgggtattgggacagtgatggagttcgtaaaatttcgggatatgaaaactaatcaggaaaacatgatggctaacactgttggtaatcagataaaacagttaggagaggctgtaaatcgctatattagtattcactatgacaaactatcaacactttcatcaagtagcagtcagtctagtgatccggggccaagggtatgttttggtaatgcttgtgaaattacatatcagactttggtgaatgaaggattgctacctgtgagttatacaggcgttaacatgcaaaagtcatcttacaaaatagtattaaaacgtgcagggactgctcccaattttgttatcaatggtcttattacaacaacatcgccttggctggaaggcagaaaatatcgttatgatttgttaggaaatgctatgcaggtcgctggcattgatagtggaatgacgcaatcagctactttagtatcaggtctacagggtgcatggacagaaacatcatcagcttttaataatatcactgcagcgggtctgctggcgtatcgtgttggatacgattcttctatgtattcagtgtatttgcgtcgtgatggcacattacctatgaccggtaatttaaacatgggtaatcaggacataaataatgccagaaatataacggtagctggaaccataactacgaaggtattacgaactggcggagcagcggcgataggcacaacattagacgttggcggtgtggcaacattaaactctgatttgaacgtagctggcaatggtcaagtcattggcaatttaaattctaataatagcgtatcaggaacaaccataacgtccagaggggagacctaa

SEQ ID NO: 246621 - DNA, 312 bp, Klebsiella pneumoniae
atgagtgatagtgataaaaacagaaaatcaagatcagaaaaaacagccaagcaaaaaatagcttcagcacagatgcgtcttaatcgtctaaagaccaaagaaaaattattaacaaagagtgccgagacacgttcgaagatcatccttggcgcagaagtggctaaagcagtaggttgcaaagtggaagatgtcgataaggagtttgtattagggctgatattacaatcattaaatattagcattgaagataaagcaagattaaagttacgagggaaaaggtttcttgcagatattattggggggcaaaaataa

SEQ ID NO: 246622 - DNA, 135 bp, Klebsiella pneumoniae
atgaactcccgattttatttcatgatgatgatatattatttgacttatatcaatcagattctaagcaaattacaaaacaaacacttcttgtatattactaagcgtcttagctcctatgccttttatgctttttaa

SEQ ID NO: 246623 - DNA, 573 bp, Klebsiella pneumoniae
atgttggcatttaaagctatttcttcagataaagaagaagaatggtctcaagctttaactacatgtcgtaggcttctagaagggttggctgatgaactttaccctgcatcgaaggaaaaatttaatggtcgggctgttgggcaaggtcaatacgtaaaccgcctttgggcatttatggatggtgctatacaatctgaaagtaataaagaccttgccaaagcacatatagattttcttggatcatggctggataaggttaataagttaacaaataaaggtgttcatgacgagttagatcggattgaagctgtaaaatcagtatttcacacgtatttagtagtggcggatttgcttgagtatatgtcaaatactaaaacctctgtatctaagcctgatatcaataaagctactttagatgaactggaagcattgttaaatataaatagaacaatcgctaaagaaattgttaaagcacgagttcgtgaaggcaagcttgatctagatattttaaaaagcataaaaggcataggagctaagacgcttagtaatatacaagaagtgtttgttttgtaa

SEQ ID NO: 246624 - DNA, 372 bp, Klebsiella pneumoniae
atgccgcataaaaaagtagcactacagcttattgaggaaacgcttaaagaacttgagtccccaaaaggctctttgttatcggccatacaaaagttccaaaggaccgcagatatcattgatgatgaagatacaaaaatatggtgtgcaattcagttgggtgaaactaaatatacaaagccaataacagaattgcttaagtttgttattgaggctgaaaatacaaaaaataaatttttccaagaaaatttagacaaacgaatacaagaacttgccaaattaggagttaaggctaatatacattattcagatgaagaactcacattaaaaaatattgaaagtggtggtggatataataacattgggtttatttaa

SEQ ID NO: 246625 - DNA, 270 bp, Klebsiella pneumoniae
atgaacaatattagaatgataacactctttcatccacatgacaaaataccactcatgatctgtattgtaaacaaagtagaagatacagaacacgggttaaaattatctcttgaaaacggaaataacattttcgtcaataattatagccattatctgttatcagaatctgtatgtcgttgcgataaagacaggttgataaatatttatattcgtttggtttctgaactcacccaaatgagtgaagaaacaataaaatcacagatgttataa

SEQ ID NO: 246626 - DNA, 717 bp, Klebsiella pneumoniae
atggctcgtaagtatgtttatggtgataaaccaatccgcacaacaaccgctgaaatcgtggaaaacgagtttgctggaaaggctacggctgctcaggtcgatgcaattttaaagaaaagatttccacattacaaagacaatacttatttgaatctgatagttaacgcagttaactgcaatcgtggtcactggagttttaacaggactgccagacgaacagatgataccactcatcgccaccatgaatatgatcgacttttcaagcgcggaaacgtttttgaggtctatgattccgcacttcatggtgtgtttgaaatctatcaagcttcagacggcaaatggctaacacgtccggttaaaagtgagtttgaaaaggccatagaaacagcgtctcaacttacctcagaacaacgtagagagaagctggctacagccaacaccacgccagaaagggtcattataaagagctataccttcaagcgtaatcccctcgttgtagcagaggtattagccttagctggaggtaagtgtcaaagctgcctacgtgacgcaccattcaagcgggaagatggtagaccgtatcttgaagtgcatcatgtggagtggcttgctaacggtggagaggactctgttgaaaatgctattgcactctgtccgaactgtcaccgcgaagcacactacggcacgcttgtgttgaagccgactaacattaagtag

SEQ ID NO: 246627 - DNA, 909 bp, Klebsiella pneumoniae
atgccgaactggaatgaagttctgaacgagatgaccattcttgagcagaagagtaacccgttggataccgtcaggaagaagtatatcaagagtctttctgactacacaggtagaaatgtcatttgttactactcaggatggcttcagaagaacacatccagtattggtcatttagtttctatgacagatgacgacaaaaacggttttatgacagccatcaatggtatggatccccaaaagggattagatatccttattcatacacctggtggtgagattgctgctttagagtctcttgggcaatatctaagggcaaaatttggcacagacattcgtgcatttgttcctatgatcgctatgtctgctggcacaatgttggcatgctgtgcaaaagagattgtgatgggtaagcaatcaaatattgggccatttgatcctcaaatggggggactacctgctcatggtatccttgaagaggttgaaaaggccaagcaagaaatgatgcaagaccaaagaacgattccattttggtctttcaatcttcagaaactgcatccaaccttcatcggtgagtgcgaaaaggccatcaaatgggcaagtgaaattgtttctgaatggttaatttccgggatgttcaatggcgaagctgatgctaggaataaagcagcgtcaatttgtggtcgactaaatgatcattcgacaacatatgcccacgctaggcacattcatatggataaggcccgcgagatagggttaaaaatcgtctccttagaggatgatcaagagcttcaagatctagtgcttactattcatcatagttatatgcatacctttgggagcagcactgcggttaaaattattgaaaaccataatgggtcgacaatgatttggcatgcgggaaaccagtag

SEQ ID NO: 246628 - DNA, 327 bp, Klebsiella pneumoniae
atgtcccagcagaaaaccgaaacattgagtttccgaccagcaagcgaaaagctaaccaaagaacttgatgggcgctgggtcattcttctgaacccctgtgatggctggcatgttgcccatgttattgcgcttgaggaagatggcgaggtctatcatgttggcgcatatcagtttgctggggatgagtttgaacctcacgaattctatgttgcatggaccttattaccggattctctgtccctagctaacaattttgaagatcagcgcctgagccctgagattagggaggcgcgctggcgagaatgggtggcgaaaatgaagcagtaa

SEQ ID NO: 246629 - DNA, 795 bp, Klebsiella pneumoniae
gtgaaaatatttgttagttggtcaggtaaccgtagtaaagccgtggcagagctgtttagtgattggttaaagtgtgtcatccaagtttcacaaccatggatctcaactagagatattgaccgtggggcaatctggttttctgaaataaatgataaattaagggacgtctctgttggtgttgtttttctaacacaagaaaataaagacaaaccctggattttatttgaaaccggagcattagctaaaggattaacctcaaatagagtatgtaccttccttattgatttacaaccagctgatttacaagatccgttagcacaatttaaccatacccttccagataaatctggattatgggaattaacaagaacaataaatactagtcttacagaaaactctcttgatgagaaaatactagaaaaagttttcaatacatattggcctcagtttgaaaatgatttctcacaagctcttgaacataatcctataggtgaagtcatccctcctcgttcagaacaagacattctttctgaaattttaaacaacactagagcactaacacaaaaaataaggaaacttgaagatgaagtttatataaaacctaacagcataaataaaacacttacaacaataactagtgagaccatacctcaagataatgaagacatagcaatcagtcgtgctgaatttgaacgtgatggatttgtttactttagaacagaaaatggaaatcttataagaagaagaaaaaagagcattgattctactgcaacccaaactaaaaacaaaccttga

SEQ ID NO: 246630 - DNA, 477 bp, Klebsiella pneumoniae
atgatgaagttaactatcaggcagcgggaagttcttaacctgctcattgagtaccagcgcgcccatggattcccgccaaccacctatgaactgaccggcatgttggggtgccggtcccccaatgctgcggcaagtcatctcaaagcgctggagaagaagggcgcgatcaaaatcacccgtggggtttcccgcggtataagcgtcgttaattttccccctcagagggaacttgtcataaattttaataccctcgttaaagtcaaacttagtgatgtcgcccttgtgtttttggagcgtcagcatgaagaaaaccgtattcgccacccctccatttttggtgagtttgaaccaccgtcaaaggatgaaaatgggtttacgaaaatgacgctatggagcctcatgtccgaactggggcagatatgttattgcggtggggaagtccctttcgtacttaaaattcccctggaggatgaatga

SEQ ID NO: 246631 - DNA, 273 bp, Klebsiella pneumoniae
atgaaagaaatgaaactcataattgaaattgatgaccgctccattgtttcagtaatcgaaaaagtgcgtctgctcaaagacgaactgagaagcctcagcttgccgatcggcatctctgacgcagtgccagcagtattaaagccggaagaggaaaggaacacgctgaatgcccgaagcgcattccttagaaaccttgatgccgaaattactcaggcttactcatcattgacagagcttttgaatatacgtcgtgacgcgacctcctccgactag

SEQ ID NO: 246632 - DNA, 219 bp, Klebsiella pneumoniae
atgcttgaccaagacgacaagggtcacgacaaggtcaacgagatttaccacaaggtcatcagtatgctggagcgcgttaaatcggtgaaggctctcagcgaagcgctgaagagcctgatcggacttgaacgccaggcctacgatatcgacgtgctgaataagcagaccaatcgcgacattctggcgcacaacaaagcggagcaggctaactgtccgtga

SEQ ID NO: 246633 - DNA, 876 bp, Klebsiella pneumoniae
atgcctacattggcgactacctcagcagtcgcttcaatcagtacgcgttcgttcaaagtgatttcactgcgtacttgtttgcgtacctctgctttgcgtaccagatcgtcagcgtgttctttcaccttggcattcaggtcacgtgaccagtcgtcacgctttgctcgcttccgaatagcgcgttcgctgataccgtgctgcgatgcgatttcacggagggacatcaccccgaccgggatgtcatctcgatggcctcccggtcgggttttgtcatataatccccaacttaataaccacatctatggtaatgaaatgaataatgaccgcggggcaaacgctctcaaaactgaatacaaaggcataacctttcgctctcagacagaagcaagatgggcggttttttttgatcgactaggagtggagtacttatacgaaccggaaaagatcgcgctttcaacagggcaaatttacatccccgatttttatatcaaggacttcaatgcgtacttcgaagttaagcctgcagatgaccgtgttgtttctgaagaatgtttcaaagcaagactcctagctcatgatcatcctaaacaaagagtttggctagccataggggcaccagcagcaagaactcctaacatactagttcttgaaaggtggaataaagaaacaccaatagaactgattctttcccaaccagagaatcgcttttggatccatgaagatagacgtgacgagcaggtatattggcttcatcatgaacaagtacaaggttttgtcatcggaggaccaggtaaagaaacagaccacatgcgtgaaccaatgaatcactggaatgttaaagaagcctatgatcttgcgaggcatgcgtttcgctga

SEQ ID NO: 246634 - DNA, 369 bp, Klebsiella pneumoniae
atgaatgtaacccaacttggccgctttctaagaaaagtacgtatcgatcgtgggcaaaggctcaacgatatggctgaagaaatggaaatgagcgttgctcagttatctgcaatcgaactaggcaagaggagcatatcggcaaaagttaaacagcgtttaataacattttattctgctttctgtagtggcgaagaggaagttggtcgactagtcgatgtttcccaaccatctttcaaagaagactttgaagatgtggacgacttacgtagagagctttttgtcagttttgcgcgctcatataaagcgttgccagaggatcaggcccggcagtggcttgatgagttgaatgaactagcttcgactaagtaa

SEQ ID NO: 246635 - DNA, 555 bp, Klebsiella pneumoniae
atgcggtctcgtcaaagaattctaggaaacaaagtcgctgccttaaccagcgaaagcataatgcgaaaagcattcgaggccaggtctctgatacagagagttctccaaaataaagaaccatatctggaccctttacatttcatggagcaactgcataacgcagaattgattcaacttgaggtagtcgagtttgaagagctcccaaatgaatatgcgatcactatcccttcgaaaagaattataaaactccgagctgatactcatgagtcagcttcaaaaggtgagtcgcgtgggcgttttacggttgctcatgagctggggcatttgattcttcattcaaacacaatgccccagtttgcgttttctcaggcaccatcaaatcatccataccaagaagatgtggaatggcaggccaatgagtttgctggttggttgctagtagaccctacgtacacgcacttactcaagacaccaagaacatgtagcattggttttggcgtaagtttggatactgcaaggtatatgttagaaaaaattaaacggcttcgaggctaa

SEQ ID NO: 246636 - DNA, 135 bp, Klebsiella pneumoniae
atgacccataatctgaacgatgaagtaccagaagggatggtggaagtattcacccgctacattaccattaaaggtaagcgcatctataaaaaagatggtggattataccacttctacgcgccacctcgaaagtaa

SEQ ID NO: 246637 - DNA, 315 bp, Klebsiella pneumoniae
atgaatatcgaagaatttttgagtgaagataaccatatgtgcaatttaggcgatgatcttttttacaagatcttcgaacccggagcaatttatgatttacccaatagcgaatttaataaagaaatcatttactggcttagtcagtaccttgtaggaaacttgagagagcccttagactcgatctctgaacttgatattttcgagcagttttatgtttacgagacatggttctcgctaattaaatgtcccgttgaaatgagaaatctttcaaagcgaataattcaataccagattgggctgaaaactcttttgtaa

SEQ ID NO: 246638 - DNA, 1770 bp, Klebsiella pneumoniae
atgacccattatgacaaggctacgcagacagcaggcttagtacgtataactggagaattagtatctatatacggaaattttatagatatgaaagatatcaacgcagtgggtatgcatagagatgaaactctaataactcgatgtgtagctgcacacgcaataagtttatatggtgacgaacctgaccctgagctggctgctagtgccgtatgtgatggacgagatgatgggggaatagatgcggtttatgttaataaaaattctaaaaaaatagtaatagttcagtcaaaatatattaaagatggagatggctcaataaccactagggagtttggtagatttaaagatgcttgctcaaaagtgatctctagtgacttctctacttttaatgagaggtttttaagaaataaagattcaataatggaagccatatctggttttacatataaatgcatatgtgtatttatatatacaggggttcatgctccgagcaaagaggtaaaagaagatatagcattttgggagaaggtacagaatcgctccttgttatttagagatattgagaatagagacgagtactcagtgcttttcgaacctgcgggaatacaaataattatggatggtctttctaaagatcgttcaggtgctattaacgtaagtaatgttcacctagagagttatggggaaatagctgagccttataaagcaatatatggtactatctcagctaggcatctatatggctggtgggagaaatacaaatactctctttttgagaaaaatataagaagtgttcttggaaactcatcaataaattcagggataaaaaagactctaaatgaaaatccggaaaatttttggtattacaataatggtataactgcagtatacagtgatgttgaagagagtatggcaaatctaagtacaagtaggaaatacggtttttttagttttaaaaaccttagtataattaacggtgcgcaaacagtaagtactattggagaggtgtttaattctctaccagaagataaaaaagatctcataaaggtaaacattagattcataaacgctgcaaaagaagaattcttaattgatgtaacaaagtacaataatacgcaaaacagagttactggtagagatttttcatcgcaaagaccggagcaacagagaatacaaagagaaattaatttcattggcggttatagctacaaactacttagacaggaagatgcgagccctacaagtagtaataccatcgatattgatgatgctttaaatgctctagtgtgtgcctcgaaagacgaaacattaatttcatcattaaaacttaatcgagggcgattttttgaaagctggggaggtctctatgaaaaagtatttccttcagagaatggccccacaggtttagaaataataaataaggtcaatgcttataggttatcaaacgatatattgcaggagagtataactaaactaatttcaatggaaatagataatcaaaagcaaattcatcaaatcatgatacatgggaattatgttttgatcgccattttaatggataagttggtagtggattccgtagaaaatcatattatatcctatagccggggtattacgttagagaaatgcataggttttgcttcagacacatatgattatatccaagaaagtttccctaatagttatatagcacgatttttccaaaatagagagaaagtttcaagtattataagccacctgcaaaataaaaaagaaagtggcgatgcatag

SEQ ID NO: 246639 - DNA, 516 bp, Klebsiella pneumoniae; identical to SEQ ID NO: 112172

SEQ ID NO: 246640 - DNA, 276 bp, Klebsiella pneumoniae; identical to SEQ ID NO: 143144

SEQ ID NO: 246641 - DNA, 990 bp, Klebsiella pneumoniae
atggccactgcctctcttcgctactatacttatgatgctaataatcaagcacgggagcgcttgcttggtatagagaacgttgaaaatattgacgaaatgctcatacctctcaatgagaagaatacacccatattcattacgaaggcttttactggcattgcctgcaagcgatggcgcgtagagtttgttctgggtatagaaaagaatatatggggagtatggttaagtgagaaagatataagtaatgatgtctatttatcccagacgatgaaaaaacgaagcatcgcacatgctggcggtatcgttaaaagggggtgcatcgttatagttgaatttgggcatatatatcttacgctcaattttagcaacgggctctccgatagctcccgctatccctgttatcaccagtctggagaaatgcacaaaaggcgccctgctatcgttgtaagcgcagataaaagaggcgttaaagttgttcccatcacctcccaggaacctgatggacacctttataacagagcgatttttgagctcgaaagctcatcgacaacctatatttctgaattcaaaagagataagtcttgttttgcattatgtgagatgattcagacggtttctcccacccgtatacttccccctgaagcaaaagacatgaaaagccgtgatcgcaggttccgtcgtgatgagtcctattatcgaaagcttagcaccaacgatcttcatgcccttgaggaagggttacttgctgcagttgggatggcttctctccgtaaaaagaatgatactttactgggggaaagagacagattaaaaaattcgctggatgaacaagatcagatgttagttagcacatctcatgcgctggaacagacccgcacattgcatgatgattttaagaaaagatatgaggtccttttgcaactttaccttgcttcttccgggcatacttccctacaaagcatagaagctgaaatctcagagtatttgtaa

SEQ ID NO: 246642 - DNA, 354 bp, Klebsiella pneumoniae; identical to SEQ ID NO: 222391

SEQ ID NO: 246643 - DNA, 294 bp, Klebsiella pneumoniae; identical to SEQ ID NO: 85067

SEQ ID NO: 246644 - DNA, 915 bp, Klebsiella pneumoniae
atgtgtataagagacagtggtatcattggcggccctccatgcccggatttctctaatgcaggtaaaaacttaggtaaagatggtgaaaatgggaaacttacaggtatctttgtagatatcataaatgattttcaccctaaatttttcacattggaaaatgttaaaggtttaattcagaaaagcacacacagaaaatatcttgctgacttgttatataaattatctaaagaatactgctttgatattaaggtactaaactcattagattatggcattcctcaagatcgagaaaggctatttgttgttggtttcaaaaaaagcttcatttttgacaaactgggttatgcaagcttgattgaaattgagaaaattaatttacaactaataattgagctaaaaaaagaaaaaagctcaagtttagaaaagtttaactggtttagctggcctgtaaatcctctttatacaaatgcaaggggaagatttacttggccccaaagaacaccttatggcggaaatccaaccaaacctgatgatttacctaatagcttgcttgtacaagatgtcgttttcacctcatctatagaaaaccttccaaatcaaaacgacgtttttaaagcgtatagcgataaattcaatataattgatgagggcgatataacaggcaaaagttttaaacggttacacagatggcgattcagccctactgcagcttatggtaacaatgaggttcatttacacccctataaaccaagacggttgtcagtacgtgaagtcatgcggatacaatctgtgccggataaatttgagttacctgataacatgactctttcaagcaaatttaagactatcagtaacggtgtgcctgttgttcttgcaaaagaaatagcacaaagtatatctaacttcattgagtaa

SEQ ID NO: 246645 - DNA, 294 bp, Klebsiella pneumoniae
atgatggtttcagtttttgcattactcgacgacgatattgttgctgaattaataagcactaaaaacgaatttatagccaaatttgatggtctaattaatggtgacatccccagctatgtcgattggatttctgaaagctataacgacagtgataaagactttgattatgcaattagccagtccactggtaaaaaagcgactatcttatatagatttgataactttatttctttaatccaagatattacaaataaagaagtgttaattgagggtgttattaaaaatgataattaa

SEQ ID NO: 246646 - DNA, 720 bp, Klebsiella pneumoniae
  misc_feature (700)..(709): n is a, c, g, or t
atgttttactttgctgaaagggaaaatggtacttggttaatcgttgacggtcttcaacgaacaaccacaattttcgactatatgcgcggtaaatttattttaacagatctaaaatattttaatgacccaaatgattctgtttacaaaaaatcatttcaagatctacctcgacaatatcaaagaaagatccgtgaatatcaaattaatggacatttgatatctgttgaaaagaacgattttgaaatggtcagagaattattccagagaataaacacctacggtcgagcattaagcccgcaagaaataagatgtgcattgaaccccggaagttcgataccattcatccgatatttagcagaaacaccagaatttatagattcaacttttggcaaagtcaatccaaaacgaatgaaagatatggaatatgttcttggaattatttcattcattctttttagctaccgagactataaatataacagggaagatgattttcttgttcatacaatgaaatatctaaataagtttaattttaaacttaacgggacattctctgatgaagaagggcatagtctgccacaatggaaaaatgatgagtgttcggaagttttttacactcttttcgagaaattcaagaaaggaatttcaatttccaacaatattttcggtacccatcgattcaagaaaaagaactctccannnnnnnnnngcaattgctaa

SEQ ID NO: 246647 - DNA, 258 bp, Klebsiella pneumoniae; identical to SEQ ID NO: 223380

SEQ ID NO: 246648 - DNA, 324 bp, Klebsiella pneumoniae
ttgaccacgatcggtttgtcggccaagaatgcgatcctgatcgtcgagttcgccaaggatctgatggagaaagaagggaaagggatcattgaggccacgctggaggcatcgcggatgcgcctgcggcctattctgatgacctctctggcctttattctcggggtcatgccgctggtgattagccatggtgccggcagcggggcgcagaatgcggttggcaccggcgtgatgggcgggatgctgaccgcgacgctgctggcaatcttctttgttccggtgttcttcgtggtcgttagacgacgctttacccggcacgctgaataa

SEQ ID NO: 246649 - DNA, 477 bp, Klebsiella pneumoniae; identical to SEQ ID NO: 203714

SEQ ID NO: 246650 - DNA, 837 bp, Klebsiella pneumoniae
atgcaaaaaaaatacactataaaacttgaacagttgcgttctgatttagataattacaaaaaaagcagctttgttcattcggacaaattaatgtatgatggtataaacgtcaacgatcgagacaggttaataaccgaaataaaaaattacatcaaggataatgatgtaataaacacagaaaccatcattaataaactattcccgacgaaaaccccgcacctttttatatcacacaaaagtgaggatgcgaaagaagcaataacacttgcaaacatattacactcaaaatttggcatagaatcatttattgattctcaagtatggcatcacataaacgacattcaaaaaatacttgatgacgagttttcaaaaaaaagggaaaacttatatgattataaaaaatgcaatatagtatccagcaatattttctcaatgctttcatcctcgctttacagaacgatagatgactcagatggatttatttatatagatagaaatgacgcacacgaagacattggcatatcgaaatcaaacatggttaatattaaaacagaatcaccatggatttatttggagaacatatacacgaactcattaagaataaaacaacacaatcgaaaaaaaatcatgttagaaaaagctgggctgaacaactacgcagcagattcacaagtatctacagaaagcaggaaagaaccaaaatttatttactcaacagacctagtaaatgcagtggaaatcaaaagcctcaataacgcatttaacgttcaatatgacaagacaaaaaagcaccccttagaaggccttgattatttttacagcatcatcttagtatag

SEQ ID NO: 246651 - DNA, 192 bp, Klebsiella pneumoniae
atgacgaaacaacagaaaacagcgctgaatatggctaaattcatccagaaccagtctctgctcctgttggagaagcttaacgagcttgatctcgatgtcgaagccgacctttgtgagaaactccacgatgatgcggagcatcttttccgtacactgtcctcgagactggatgcattacaggatggtaactga

SEQ ID NO: 246652 - DNA, 219 bp, Klebsiella pneumoniae
atgcgctacatggtggccagcggcgaacagagcggagaactcaacggcatgctcgaacgtgccgccgacaaccaggaccgcgaactgagcgcgcaaattcagatggcgctcagcctgtttgaacctttgctggtggtggcaatggctggaatggtgctgtttatcgttctggcgatcctgcaaccgatcctgcaactcaacacccttatgagtatgtaa

SEQ ID NO: 246653 - DNA, 255 bp, Klebsiella pneumoniae
atggcgcaaagcgaactgcagttttgtgctaatgcctttgccgacaagctggcatacagcgacatcgcccgggcggtgaataacgatacccgcccggatattatgcgtcatcagcaatcctgcccggagctgggggagctgacgatgctactgggagagtttacattcaccccggcgggcgcaacctatctcggcgagccggtgacatgtaaggtatccgagtatcgcaaaacgtttgaggtgaactgccgctaa

SEQ ID NO: 246654 - DNA, 348 bp, Klebsiella pneumoniae
atgaaaaaagaaaaccgccccggacagcaggcggctaacaacatagatattcgcggatctgatgttacgccaccagcgcccaccacacaagcgccacgccgcacaccgaagaagcaccgcgcccgcgagttagagcgcagacttgatattcagattgagcgtattgacgaaaagaatcccgacgggatcgggtcacatttacgctatcgctttaccgggcgcggtgacgttctaaaagttattcggcttgtgaaccacaacgccaccgctggtggctataacgggctttctaagcaggatatcgcggacattctcaatctatacccggacaatctcaccgccgcataa

SEQ ID NO: 246655 - DNA, 957 bp, Klebsiella pneumoniae
atggctgtggcagcaaaagatcaaagtttaaagtctataagagtgggattttatacaagttctgagaacattcgcacgaataacaaatggttaactgcagaagcctttaatgttctgtataccaagtgttcaaaagatctcaagatgactcaccacgctgactttggcgaaagagaacttaaaattcatttccttgccgtatcacccgaagatggctcctacttcggttttatgtcacggagaaggaaaagcgccacattagcatatattactgatactgagtgggttgaagagaagatccctctggcaggagcaaagtctctttccgagcgtacatacttcatctactacccccagatagacattttagtattgtccttaaaccacttaggtcctcgtcatagtgacctagctttcctgcttttcaattccagtactaacggtaccccggtttcttttgaagccatctggaaagaagaaagcattaaagaactacttgaaactggatctaacctaagaagctgtgagatctctatagcaatcccaagaaatttcaatgctgcacagtacaatctcgatggcatgttcgccaatcagatgattgagatgataaaaggtactagttcaagccaccttacgctttcgcttcgcgggcattccccgttaaaacgaaaagccaaaggatggcttgaagatgacgtcaaaaaaagcctaaaggaaatgcttgaaaagttccctggcggcgatggtcgcttgacatttgagaaagctgatgttgtcgcccaaggcgataaaaagaagaaaagccttgtagatgaagtacttacagtaaggaaaatggttcctattcaaactgatggatatccgatcgatatcgacgttaaaaatgctatgctacaagcgaaaaatgacaacctaaagtatctaactcagtactatttggttagtcaaccttaa

SEQ ID NO: 246656 - DNA, 2217 bp, Klebsiella pneumoniae
atggaacttaggctaaaaaacgtcacaagttataataaaaacattttcacaaacttagatctatcaaaaaaaataaatattctatatggtcaaaatggttgtgggaaatctacaatttcaaatttcttttataatacaacccacaaagattttgcagaatgcgaatgcacattactaaatgactaccgtccaatcgtttataactcaaaatttattgaagataacttctatcatgcaaaagaacaaaaaggcgtatttacactcagtaagaaaaacgcagatatagaaaaagacctagcaataaaagaaggtttaagacaagatctaaaagagcaatatcgaaataaaagagaagcagcaacaaagttaaaagaagaacaaaacaacaaagaaaatgactgcatcgaggccatttgggcaaaaacagaatcgataaggtcttctgatctaaaaaacgtcatgcgaggcccactagggagcaaaaaagctttttttgctcaattacaaaaaacacttacattaccagtttcaaacttggagcaactatctaaagactacagcgaactgataaaacacaaaaacaaagaaatacctctcataactattttattatcctttacacttccagaagacgataagaaactgttagccacaccgattatagactcaagtaatagttatttatcagaaacaataaaacgacttcaaaatcttgactgggtaaaaaaggggaaagaactttacctaaaagataacacatgcccattctgccaagaaagtacaatcaatgctaaattcatagaggcaattgagtcaatttttgatgaaagttactctaataaaacaaatcaaataagcgcaataaaatcatcttatgagttagctacaaaggcaatttatcaaaaactaactcaagaaatatctacttgtgaactgataagtgaagaggaaaaagaaatcaccacttctcacatcaaaattctagatgaaattgcaagcagaaacatagagctaataaccagcaaatttaataacccttcgtctatcatcacacttgagagtgatgattcaatcgaacaaaagataattaattgcgttactgattacaacacaaaaattaaagacattaatcttaaagttgcaaaattcaaggaaaccgaaaactcagttaaaaataaaatatggccagctcttagagacttttgcagcccagaacttaataccttagctgctcacgaaaaaaacttccaagataactacaaaaagacacttgatgaaatgaaagaaattgaaaatcaaggaaaggagaatgctaaaagtattaaagaactgagagaacagatttctaatatcgatgaaacaatcgaatctataaacttgagactccaaagtttaggtataaatggttttagtgtaaaaaaacatgaagaaaacaaggatatgtacatcatttcccgttcagacaaagacaaaaataatgatgtatacaaatctcttagtgagggagagaaaacgttaatcacattcctctatttcttggaatgttgcaaaggaaaaacggataaagacgacgaagataatagagataatttaataatcatcgacgatccaatatctagcctttcacaaaattacgtttatgatatagcatcaattattcatcatgaactaatcaaaaatgagactacaaaaaaaatattaatacttacacacaatctatattttttccatgagttaataaaactgtctcctaaaagtaaagacgacagaaattttaaacgcgactatcgcctttttagaatcacaaaaaatgaatttagcaccatcaccgaaatacaaaaaaatagtatacaaaatgaataccaatccctttggcaaatattaaaagatgctaaagaagaaaaggtcaataaaattatcataccaaatataatgagaaacattttagagtactattttggctttgttcatagaacagattctttacaaaatgaattaactaaactcgcaaaagatgagaaaaatagcgatttcagggcgttttatcgatacataaatcgaggttctcattctgactctgtgaatatcacagatatgggtgacattgacccagacaagtacctaaaacagttaaaaaatatattctcagcaacaggagatgaaaaacattatgctaaaatgatggatgagatcgatgaggaaatcgctaccgcttag

SEQ ID NO: 246657 - DNA, 615 bp, Klebsiella pneumoniae
atgactccatacttattaaatgaagaagactcaaggataataactaccttgctaagcaaggggctgtcttcgaaagaaatgtgggacgatgatagcgtgactgatattaaatcacgccttaaaaagcactatatatatgaacaaagtcagaagtgtgcctactgcaaaatagaactccacaccagtcatggcatggtatgggataccgaacatattattgataaagactcgtttccacagtggatattcgagcctctaaatttatgtgtttcatgtaaagattgtaatcaggctaaaggaactacagctgttactaaatcaccaaactataagtcattcccaaaaaaaaccgctagttattgtatagttcatgctcattttgataactacgcagatcatatcgaggtagctgtaccaggtgtaacttatagatataaaactgaaaaaggtagaaggacgatagagatttgtggccttcttcgatatcatgaaataggagggagaaaggatatagatccaatattgcaggccgtattaagttatgcagctgacaaacaaacaccagaaactttgcaagctgcccttacctatctttctagctatctaggtaaatga

SEQ ID NO: 246658 - DNA, 1653 bp, Klebsiella pneumoniae
atgttgttgaacaatgttacgttactaggaaaatcgatcgatctagccgataagcaagctcatgaggattcgaatgttgtaactataatgatgggcagcaatggctctgggaaaagtaggatcttccaagcaatatgttcagcatttatatacgcatcccacaatgacattatgccgaaccactacacagatgtaactaatctctctgatctggagggatttgatagtttgtcttatatacaagatggcgacctgaatttattcagtcgtaataaattgccgttccatagacgatatgatttacctaatgatgcatttataattctaatttctggatacccatacgaagatgttattaagtatcgtgtgcataatgtacatgatgacagtttagttgaaaatattgtatccatgtttcttcacgaagtaaaacagtatggtaaaaaattccagttgaaaaaaaatggagaaatctgtgatacgtttaagatgcctaataaagtcctagcagttacaggtagtccatacgataaatttccatttaaaaattctcactcagggttgcatagtttttcttcatacgtttatttggggacaagggaaaagcgacaagctggatatagacgaaatcgtggttatcttagctataagtttgatcagctgggtgcatcttttatcaaattgcttttaaaaccaaagcaagaatattttgatttttcaaagatgcttgattttttgaatatatctagctcttttacgcttaaattatattttagtgatcgaataaggtcgagagaattgaatcaagaaagtattattgatttagttcgcagtgttaagttttttaaagataaagatcatgagatgatcagtgaagatattgacaaagaggaattgtcaaaaagattactagaagcgataaagtatgtgggcggtgaagagttagaaaaagaagactatcgatttgatccaattgaaattttatgccaaattgatttggctaaaggggataatgacaagctgcgcctaagttcattagagcttttatctgagtatgatctagtggagctagatgatgtcgttttctccaaaacagaatcaaatcaagagtttttactttctcaagccagctctggggagcttagcttactatttacaatgtcttcaattgcaggtgaaatacaaaatggttctttgattttgattgatgaaccagaaataagtttgcatccgaaatggcagttaaattttttgtctttactcactgatattttctctaattataaagcgtgtcatttcataatagccactcactctcccaatataatatcctctatcccaagtgataatgcatatattgtcaatgtagatactgatgaagcacaattaatgccttcaaaaatgtaccacaatagatctgctgattttcaattagctagtgtgttcaatgcgcctggtaacaacaatgaatatctacttagccaagtgatcgaggtgctagataatttatgtaagtcaaaagaatttgataatgactcacttcatagagcaaaatggcttttgactttcgaaaataaagttccggacggagataaagtcaaagtattgttgcgaattttaaaacagacaatggaggcattaaatatcaaatga

SEQ ID NO: 246659 - DNA, 321 bp, Klebsiella pneumoniae
atgaacatcaataacgacagcttttttagctatgaaagtatcctgtcccgcttcaagcgtgctaagtgcgaacagaccctcgacactatgtacctaggtgccgttagaaaagccaatgaaaatctacagggtcggaagttgctccaagcacagattgcaattgagcgggctctgaatcagtgccaacaggatttcgacacttcactgcacggcatgactcggaaaaccaactatgccttgaagctagcgcaagagccctgcaagcagtacagcccagaagacgaattgaggcgattgctctccggcttgaactcacattga

SEQ ID NO: 246660 - DNA, 207 bp, Klebsiella pneumoniae
atggggagcggtgcggagaaagccaaggaaaccgtcagggcattcgaactatggacggcaacacaaactgacgagagctaccggcagataattcacagaggcaatctcagccgaggtgaaatcgctaaggccattggctgtggccgctctgccttggcccagaatcctgtgacctgctccccgttgattagtacaccccgatgttag

SEQ ID NO: 246661 - DNA, 1878 bp, Klebsiella pneumoniae
gtggacagtaacattttccattttaagcctgcgatagaactgaattcagaagcaaatctagaaaaattcattcaaagtagcaaaaacaaattaactgttttcggtgaagattgctgggatcataatttatggcacacttttcacaatactcgccgtgttgttgcccgtttctccacaaatttagaaccatccacttcctatagtttctcgcccctaggtgcaccatttattgattttgcaaaagcatacattcgctacatttacgcattaaaacccataacaaatcttcacagacatttcgaagctattcgaatacttgaagaagcattgattcaatcaaaacataaagcagatattctgatgctcgatggcctagttttagaaaggctaggcgatatctttaatagacgcatatcaaatctggcaggtcgaaataaagcgggctatcaaatggagcttcttcttaatttctgtcgtgacaattttataacaccgagtcttcctgggtggtcaaatccatatcaaaaagtaaaggatttaactattcaacttgacgagaatggaaaagaacatcgtaaaaataaattgccctcagaagaggatatgatgttatttgctaagttatttcatgacgctccttcattaggtattgaagccgaatattttacttctgtaatagcattgctcatgcaagcaccatcccgatgctctgagttattctcattgcctatagattgtactgtatgggaggagaatcgcagcggagaacttaaacttggaatacgttgggtgcctgccaaaaatggcaacgaagggattaaatgggttcctactgtcatgcaagatgtagctttggaagctatcgaacgattgaaaaaaattagcatgcctgcacgtaaggccgcgatgtatgcagaaatgcatcctgataacaatgtgagtatggtgtatatcagtaaattggttaactggccttttgttgataacgcaaaaaaagttaaggcctcagaggctttgttgctatatagagaccgtgagttacattcggaacatgatgttattcaacattcgtttgttttacctacggtgaacataattaatgcaaggatttctaggtctgatgccagaaaaggagtcctcctttgggagaaacataacatactacgagaggatggctcacaatccgatataacatcccatcaagccaggcattggctaagtaccaaagctgaacggggtgggatggatgagttgacgcttgcaaactgggcagggagagcaagagttgctgataatgccagctatgatcatcgcacagaagaagaaaagtccaatgcaattgcagttattactatccctgaaaatgcaaacacgttggacaaaataaaatgtaaccttccaattagtttcgaggaaatcggaaagaaccttactggtgcagcgatagtaacagagctaggcgtgtgtgagcatgattttgccatgattccatgtcagcgaaacggtgactgtgaaacctgcaaagaattggtctgtatcaaaggcttcagtagctcattggagctgttgaaagttcgagaagttcaagtggcagctcaactcgaaaaagcacagcaaagccataaaatgggggcctttggtgctgaccgctgggttagctcacacggttggcgacttgctcatattagaacaaagatccggttattagaggatgaaaatgttcttgatggcacccccattcgtattcctgatgtgtatgatccatcgccagccaaggttgttcttttagagaaggggcttaatattgaagttcaatcgcctgactctatcgattctatagcttttaatattatgggtgatttgttatgcctaaaatag

SEQ ID NO: 246662 - DNA, 1569 bp, Klebsiella pneumoniae
atgaataaatatgattacattgaggaagaaaatgacgatctcccatcaacattcagctcaaaaaaattagtatcaaaagatggatacagctttgactttcactcagaacactggatgttgaataaagatgtcagcattgcattcatgccggatgttttatctatggaaccaaaactgctggatggatttaaaaaaacactagcaacctatgctgaagaacaatcagcacaccatacatcaaatatgtatctacgctttcaacgactattgcgagacactaaattcaaaaatctagatgaggatgtattgctcaattggcgagcgatgcttgataaaaacaatgaatggtacttaggtgcactccgtggttttcttattagctggaatgaatatggatattatggtgtaacaacagagatggtgaaaacactcgaaatactaactctatcaggaaacaagaaaggagtgtctgtcgctaatcgttgccctgaaacaggtgcctttactagcaatgaggtacttgcattaaatcatgaacttattcgcttattcaggaataactatatctcatttcaatgctatgcatatgtgagtttattgcaggctactgctagacgccccacacagttacgacaaataaaggctgctgatttatttaaagaacatgatcatagtaagaatgtgacaaatttttacctcaatatacctagagcaaagcagcgaggtggtgggtttcgtttctcttttaaaaaattccccattacggaagagctctatctaacgttgcgtaatttaattagagatgaaacagagaagtttgaatcaaaactctcaataaaactgactgcttctcaagcaacaaaaatcccattatttattgattgggcaatggtttttgagttagcggttaaaaaaacatctttgactgatgatttattagatactgacattttaaatatgtcatcaacagatctaagagaacacctgctaaaaaatttccaaagaaaacaaaaagctatttctgaaagaactggggactatattcatataacggctaggcggtttcgtcatacaagaggaacaaaccttggtcgaaaaggtttggggccgttgatcatagcggaggcattggatcacaacgatacacaaaacgttaaggtctatacggaaaataccgcagataccgtgacctatattgacaaggccattggcaaacaactggccccctttgctaatgcattcctaggtcgcattatcgttgacttagagcagggtgagcgaggacatgaccttgctgctcgcataccaaacaaggataacgatatcgtaggagcatgcggcaccaatgacttttgcgttaaggggtatgaaagttgttacacttgtgaaaaatttagaccattattagatgctcctcacgagaaattcttatcccatctatatgcagagaaagaggtaaggttgaaaacgacaaaaagtgaagagtacgcggcaacaaaagataggctaattttagcagttgaatgggttgtgcagaaatgctttgaactgaaacaacaacgagcatga

SEQ ID NO: 246663 - DNA, 1326 bp, Klebsiella pneumoniae
gtgtacaagctagatagattgatttttgcaaatggtgaacgttatccagtcttaatgggcaatgatggtatgcctcattttcttgcaaccctctgggtgacaacaaaacttcgtagcagcttgtcggtgaataccatttcaaatcgcctaggtgcattaaagtggtttcttcaatgggaagaaaataaacacagagacctgttctctgagtttcagaaaggtaagtttcttagcgacactgacattgacaacatcagagaacatctcagtcatgatatttctcatttcaaaggcttagctaaaagcaaaaaaaccagagataaggtcattgatttatttaacaccccaagactaatcagtgtcacccccacagtgggacgtaataacatttacaatcgtgtgacagctattgcaagttatttagatttcattgctagagtagctgtacagaattgtaatagcactaaactgctcacagaaattaacagtatgaataagcgcatacttgctgttcgccctaaaggcaaaggtaagaatgttttagataaactagatggtaaagacttgccagatggattaattgaggaatttatggctgtggcacaatttgaccacccaaaaaatccgttcaaacacgcttcgacaaaaaagcgaaatcatcttatgtttttacttttaaaagaactaggcatacgaagaggtgagttactctcactatctattgaatcgaactttctaatgcttcacggcccccaaaaattcatatgggtaaaacgccaccatgatgacatatatgatcctcgcaaaaatcagcctgtagcaaagacgaaagaaagaatgttgcgaattagagatgaaactgcggcactcattgatgactacatcataaacatacgggcaaagactccgaacgcgaacaagcatccatacttgtttgttacacataggaaggggaaaactcaaggacagccaatatcgaccagcacatttgacagtatcatcgtgccaacaatgaaatctgtggatgagcggttcaaatcgatccacccacattattttaggcataactggaaccagtggttctccgaaataattgacaaaaacaatgatctatctaaagacccaaacagtaaccgtaattttatttcatctagtgaagaagcaaaaagccgaatgtatcaaatggggcacacatcagagagctctgccaaaccatatgttgaacgccatattcgcaataagacaaacaagctagtgcttgaagagcaagaagaattacagagactaattactgaatctcaaaaaatagaggatatgaatgaataa

SEQ ID NO: 246664 - DNA, 729 bp, Klebsiella pneumoniae
ttgttcaaaaaatctgaacataggattcgatatattgcgctatctctgtggcgcgattgtgaatacagtgtcaacaagcaccagggcattgacccgtcaatcacattaaaaaaaggaaacaccctgagcaaagtattagttctgaaatccagtattctggcagggtactcacaatctggtcagctttccgactattttgttgaacaatggcaggaaaaacaccctggcgatgagatcaccgtgcgtgacctggccgccaatccgatcccggttctggatggcgaactggttggcgccctgcgtccgagcgacgcgccgctgactccgcgtcagcaggaagcgctggccctttccgacgagctgatcgccgaactgaaaggcaacgatgtgattgttatcgctgcgccgatgtacaacttcaacatcccgacgcagctgaaaaactatttcgacctggtggctcgcgccggcgtcaccttccgctacaccgagaaagggccggaaggtctggtaaccggtaaacgcgcggtcgtcgttaccagccgcggcggtatccataaagatactccgaccgacctggtcaccccatacctgtccaccttcctcggcttcatcggcatcaccgacgtgaactttgtgttcgccgaaggtatcgcttacggcccggaagtcgcggccaaagcgcagtctgacgcgaaagcggccatcgacagcgtggttgcagcctaa

SEQ ID NO: 246665 - DNA, 408 bp, Klebsiella pneumoniae
atggcagagaaattatccgctcactgtcactgcggtgcggtggcgtttaccgtggaactcagcgacggcttcaacaccgttcggcgctgtaactgctcatattgtcgcatgcgtggggcggtcgcggtctcttcgccgcgttcaggaatagaggtggtacgcggaggggataagctcacagagtatcgctttaatacaggggaagccgtgcactttttctgctcggtatgcgggatctacacctttcatcaacggcgatcaaacccagagcagtatggggtgaatgtggcctgcattgacggcgtttcgcctttcgatttcccttgcgtggaggtcaacgacggcgtgaatcatccaaaggatggcggcggaggcgtggtggggtatttacgctacgagaaaaagtaa

SEQ ID NO: 246666 - DNA, 288 bp, Klebsiella pneumoniae
atggatatctttgttaagctcttttcgggcattggcactttttttattgaagacccgaaaatagccattgcacgttttctgttaattgttctcggctttatattggcctggatgggattccgccggaagcttgaaccgttaattatggtgccgatgggccttggtatgattgcagttaacgccggggtactgtttctggcaggcggacaaaccgggaccttaattctcgacccgatggtcagcgaacctaacgagctggtaggtgatggtgccaacttactgatttag

SEQ ID NO: 246667 - DNA, 1074 bp, Klebsiella pneumoniae
atgttgatgcagcatatcggtgtcggctattttgggtattaccgagcaactgcttatgcgatgaaacactctcttatgcccgagattgcgaagttaagaatgaaggctctgaacttctgggataagcacgggatccgtgccgcagctgatgcttttgacgtatcaacgcgaacactctactggtggcgccggttactgcgcaccggtggtccagaagcactaattccaagaagcaaagcccctctggttcgccgttcaaggcactggcatcctgatgtactcaaggagatcaggcgtctgagaactgagttacccaatctcggcaaagagcagatttttgtcaggctgaaaccatggtgtgaagcgcggcattttacctgtcccagcacgtcaaccattggaagaatcattgctggtgctcacgataaaatgcggatgatccccgtacgcctcagcgccaggggcaaagcccggttgataaaaaaacgctcagtgaagcccagaagaccaaaacaataccgcccggtaaaaacaggcgaactcatagggatggacgcgattgaactcaggatgggggacctacgccgctatatcattaccatgatcgacgagcacagcgactatgcgctggccctggcggtcccttcactcaacagcgatattaccagccatttcttcagcaaggccacaaagctctttcctgtcgctatcagacaagttgtcactgacaacggtaaggagttcctcggtaactttgataaaacgctacaggaagcctcgattaaacacatctggacctatccgtacacaccgaaaatgaatgcgacctgtgagcgatttaaccggacacttagagaacaatttattgaattcaatgaattgttgctttttgaggacctgaatttgtttaatcaaagaatggctgaatatctggtgctgtataacagcaaaaggccacataaatcactcgaactgatgacgccagtggactatattttacgtgagagtaaaaattgcaatatgtggtggacccatacaactccttgccttgcggcatctaagaggctatcctga

SEQ ID NO: 246668 - DNA, 303 bp, Klebsiella pneumoniae; identical to SEQ ID NO: 96991

SEQ ID NO: 246669 - DNA, 2217 bp, Klebsiella pneumoniae
atgcagaacatgcagcagaaagctcaggacttgctgggtaccgtgccggatggcgaggcccgtcagcagttatcttttcaattgcagcagtcgatgcagtcatttcacaaccaggcccgccggtatgaggttggccagttccagcaatttcaggatcagcagttctccgctattaagcaaaacgtggtaacccagtctcaggggctctatggcgatgatgcagcgtttgttaatacggtaaaaatggggtttgatgcgatcgagcagtacgccgctgcccatggatggagccaggaacaggttgtagcggaaaaagaaaagctgaaagagcaggcggcagatagcgcgctgagtactgcagcatcgcaacagtatattcagttcatgcagcagaatggtgagcctggagacaatgagggtgcgccacgtgttacggcgcatggtaattcgtcagccgccagagggctgcgaaataataatccggggaatatcgaagccggttccaattcgtgggatggccaggcgggtagtgatgggcgttttgcgaaattcgtgacccctgagcatggtattcgtgcgctgggtaaaaacctgctttcgtaccagcggcagggttacgacacagttagcgagatcgttaatcgttgggcgccggccagcgatggcaataacacagaagcgtacattgccgcattatgcaaaaagctgaatgtcacgccaaatgaccagcttaatatgagcgacattaataccctgcgtcagctctgcgctggcatcatccagcacgagaacgggaaacagccatatagcgaggatcaactgaacactggcgtttctgccgcgcttggtcttactactctggaatcgccgaagcgatattcagggaatcaagctttcgacgccgcaagcccgcaacagcaggcggcatatttacgccagtctatggagctgcggaaccaggctcgtacgcagttcaaggcccaacttgttgatcaggtacaggatgcaaccgccgcttatcttaaggggatccagttcgataatccgccttcacagggcgacttcattaacgctttcggttaccgggaggggacacagcgttttaacgatttcgaaaatctgcgcgttgccgggcagtatatcggatctttccgcacaatgccgacggcatccattcaacaatatgtcagtgatctaaagaatcaggttggtaatggagaagggctggcagggcgcgcagcagcattcgaccatgttcaggctgctgctgatgaagttattaagcagcgtaaggcggatccaattcagttctcactttcctctggacaaaccaaaccaattgatatgtcgaaccaaaataatttcggtcagagcattgggctgcgtgcttctcaggtttctgagttggctagagcatacggaacaccgttgactttcttttccaaagaagaggagagccagatcggtaaattcttccgagacgccccggtttcgcaacaatctgcgtatctcgacacgatccacaaaagcaccggcggcggtaagccgtacatggcagcacttcagcaaatcagcgcgaatgcgccgtctgctgctgttgccggaattcttatggacaagcctggcggcgtggttgctgagaaaaactggttcaatcctgacgtgtctgtgtcgccctctaccgcatcgcaaaccattctggctggtgccgcagcacgcaaaggatcgaaagaagccaaaggcattaccatgccgaaagaaaacgatatgcggctcgagttcagcaataccgttaaagatgcatttgccggtgacgcacagggcgcatctatggcgtatgacgttgcgaaagactactacgccggagtaatggcgcagaagggcgatctctctggcgagctggattctgacgtctgggagcaggcgataaacgtcgctactggcggcgtgcatgactataacggcatgggtaatgtcctgctgccgtggggcatgtcttctgagcagttcgataaagaggttaatcaggcatgggaaacgcaggttaccggtgctggcgttaaggctccgcctgggcagtacggcctgcaaagctacggcgacagccagtatctcgtgaaacttggtaccggataccttctgaaacaggacggaacaccggtagttatcgatctcacgcagcagcgtcagcgcttctctggagatatccctcaatga

SEQ ID NO: 246670 - DNA, 501 bp, Klebsiella pneumoniae
atgaaggaattcacttgggtttttggccttgtaggtaatttattggtttttgttgggtggattgtagtttttcttaatgctaagaatatttctactcgctctgaaataaaatctatagtagatacaatagttaaaacattaaatgaagtttccgagaaaggaatgaaattctggtttaatcagggatctgattatactaatcatgagcattatacgtctatgattatgtctaacataaccttgatttctcaactgattatatttattcaggcaaggggggttgaagctgacgccaaccttaataaattaattaataccttaactttagattgtgattcagtattagatatggagcctcagcagagaacattacgagcaaatgaaataaatgctgaggctatggagcttatcactggattaatgacttcatttcatgataaatatcctccaacacactatgtggatttggataattggtatagaaaactcagttcttattaa

SEQ ID NO: 246671 - DNA, 327 bp, Klebsiella pneumoniae
atgattattcatgtggcgagagacttttctaaaacaccttttggtcgttacgaaggcgacagcccgtttagtgctcaaaaatttcgtgatgaagtactgatacctgcattcatcaataaccccaatgagcaaattgttgtcgatttctctggtgtgatggtcggtctaggttcctctttcttagaagaggtgtttggtggacttgtaaggagccaatcagttcctctgaaagatattcgtgaacgtttggtaatcaaaagtaaattacctatttatgaaggtagagttaaggcttttattgaacaagctgcgtcagtaaagggttga

SEQ ID NO: 246672 - DNA, 936 bp, Klebsiella pneumoniae
atgagaaaaaatcctgaggtaaaaatcactttcgaacaacctctctgtttgtacagagataggtatttttctcaaacaatgtctacactgaggaaactcaacgacgccatttaccgctttggtaatagcgtagaagttgatctttctaacacacctttcgtcagtgcagctgcctctttacttttgtttgcgatagtaaatcgtgctcagttgtgcattagagaatctcaaacgattaaggtaacccttcctactagaaaggggaatcctgaagggtaccgttggatagtttcaaccggcctggcaaaggcactgcttgcttcaaatatttctaagcttgatgagctcacccaaagtaagcgtttttaccaatcctcggtagatccttatagtcatcacgctaccacggcgcagatgcttaacaatagagcattatctgttttctcggaggagcagtttgctctgctagaatcgggtataagtgaagcaatgctcaatgtttctcatcatgcctatgatgctccacaatacaacgagttaaccacaatgctaggtggtaaacggtggtggcagtgtgcctggtttgatccagatagaaataaagtaacattcataatctatgatttgggaatggggatacctagatcctaccatggtgatgatttgcaaccctttttacaggcagcagtattgtctgatgcatggacattaggggcaactcgtacaggggcatcaggtcgcggaaatgggtcggaagacatcaaaagcccagtgggggcaggctgtactgaaaacgagacacttctgattttttctggtcatgctaagtacgtcaagagttcacgcgataaccaagtaacttgtgactatactgtagatgaagtaccgggtacattagtccaatggagtttggtacctaaacggggggagttatga

SEQ ID NO: 246673 - DNA, 198 bp, Klebsiella pneumoniae; identical to SEQ ID NO: 37011

SEQ ID NO: 246674 - DNA, 201 bp, Klebsiella pneumoniae; identical to SEQ ID NO: 37010

SEQ ID NO: 246675 - DNA, 183 bp, Klebsiella pneumoniae; identical to SEQ ID NO: 37009

SEQ ID NO: 246676 - DNA, 312 bp, Klebsiella pneumoniae
gtgacagagacacgttacacaacgtctaaaagcaaaaaagccctgaataatcagagctttattactggattggaaatgacggccatcaaatccaattcaaaacacaccaaaggcatgtcctcaagtgatgaagataatagaaaactattcaatctacgtcaaccgaatgcctgcggtaacaatcccaaagccgttatcggaggtacgattatgttgccattgctcgacacgttcatgaatgcccctcttctgagtcagggggctactatcctgtttcttgggcttcttatccttgcgctcaagaaccagtga

SEQ ID NO: 246677 - DNA, 891 bp, Klebsiella pneumoniae
atgatggaaagaattgcaataacagatgaagaattaaatagcccagaaatgattgaattggtaacctccatccctgccagcctactggatattaactcccctggaatatctcccgaagttagaaaaaaaatacttaaagacaaatacaaacagagagtaatatcagatggtttagaaaccgggcaaataacattaacagaaaggggatatgtattcagctcatatcaaacaccaagctcttttgctgggcttgtgttcgaggcttaccttgtagagcaatttaacagtaatgaaaaggctgggctgcgagcatttcagtggtgcacagaaaggtcagaagggtggtcaaataaacctttcctagattgcaaagctgtcggaacaggactgttatctacaaaaagacagctgattggtcatttttcgccacacagtaatgccgatattatattcattcgtaaaaaccccaatgtagatgttatggagccagtgttaattcataaccaaaataacgcagcatccatacaggttaaaagcataaaattcaatttcaaagaagaaatagtcgataaggtcctgtcagggaaatacagacgagtcataactatgttgagcgatcatgataaaagacggtcatgggtcatttgccataatattttactaaaaaagttgcgctccggatatatcactaaagcagaatatgctgatgcgattagtagaattcaggggcctgaatattttgagctaagtcagcaagacgcagatgactaccatgaatatattatggagtggcaccgtgggcaggtaaaccctacatcccatattactgaagccgcttctcaggagataattggttataaatacgagaacggcctcctggttcctgtttaa

SEQ ID NO: 246678 - DNA, 777 bp, Klebsiella pneumoniae
atgggaagtatgaaagaactgctgtttgaaatgcaggaggaacagcgtgacgaatggattgcggaaaattatccggatgctgaggaaggaactcctgaatgggatgcggcagcgcaggaatacagctggtttcaggattggatggatgaggcagccgaacagcagtgttttgaagcttcactgaccagtattcctgaccgcctgcaggatgcaaaagctgaactggatgagttagagagcctgatgcagttcaaccaacccgggattgtagagcggatggcttatgttcattgcgtgagtgtactggacagctttctgatgtacagcgccagggcacttcttagtcatcccccgcatttgcatcgatttctgcaacatgcgagttcttttgttcgtaaggatgagaaaagggatctacttaatcgtaaatggattgagcaggaacccgaagtggatacccctgaacaggcctacgtctggcgcgcccaggctcttgtggcgaagatgacgtttcagaaccacaaaacaatttccagatatttttcaaccatgctgacaacaccgcatgaatggccgttgcaggaaattgagggattaatcaagatccgaaacgcactggtacaccgtaatggcgttaacgaatctcttgaacctatatatatcagccaggggagtgtgcaaattgctatcagcacagtacgtaattttattagcgtggcggctgaaacccttctacaggaggatgcactatacaggatgaatgatggcatattctga

SEQ ID NO: 246679 - DNA, 288 bp, Klebsiella pneumoniae
atgaaaatttttaagcacgcgttatgtgacctgattgatgagcttgaagatgaaaatggaacaggccgtgtctggattaacaccggattctatgacgacctagatccatcgacctggtccaaagcaactatcaactcaccggtaagatatgtagtggccaagccatacgacgcgcaaaacaaattttggttgaaatgtataccagaggaagttcctgctattgatctcgttcgtgcttttcctgctgacaaacgtagacgtgcagcctggggtcttgcagggtattag

SEQ ID NO: 246680 - DNA, 318 bp, Klebsiella pneumoniae
atggggcttaccggtgtgctccgcggtaaaaaagtgcgcaccaccgtcagccgtaaggccggtgccgcacataaccgtgtcaaccgccagttcgtagccaaacgtcccactcagctttgggtggctaattttacctacgcgagcacctggcagggctcagcgtatgtggcgttcatcatcgatgtgttcgccggcattatcgttggctggcgggtctcagcgtcgatggagacgacgttcgtactggatgcgctggaacaagcactgtggggccatcgccagttcggcaccatccaccactcggataaaggcttgtag

SEQ ID NO: 246681 - DNA, 201 bp, Klebsiella pneumoniae
atggcaactgcgtgggtggatgtggctgataatgccgtaaaaataggtttggggtcactgttgactattttagggggggatcttaagctaacacaaaagcacgaattaaaaaaagaagcggcagtacagggattaaaagataaagaaataaaaaccaaacgatatgttgagtttctggtcttatctcaatccctcatgtaa

SEQ ID NO: 246682 - DNA, 255 bp, Klebsiella pneumoniae; identical to SEQ ID NO: 239479

SEQ ID NO: 246683 - DNA, 318 bp, Klebsiella pneumoniae; identical to SEQ ID NO: 185382

SEQ ID NO: 246684 - DNA, 648 bp, Klebsiella pneumoniae
atgaccctgaccgggacgctgatttttggtgagaacagtgagatcaccccgctgccggcacgcaccactgaccaggatctgattaaagccatgatggagggcggcacggctaaaatctatcactgcaatgattcggataagtgtcttaaggtcgttgctgatgccaccgtgaccatcacctccagtaaggcgctgaaaagccagatttccgctttgttaagcagtatccagaataaagcggtggctgatgaaaagctgacggatcaggagaaagggtttatctccagcaccaccattccggtgttcaaatacctggtcgatccgcagatgctcggggtatctaactcacttatttaccagctgacggactatatcggctacgacatcctgctgcagtacattcaggaacttatccagcaggcccgggcgatgatctcaaccggtaattatccccagtcgacaatggatatgatcatggaaaacctcaaccaggcgagtgtgcagattgccgctttccagtcccgcgttcaggttcagcaggacgccttgctcgtggtggacagacaaatgagttacatgcgccagcaggtctctgcccgcatgatgacccgctaccagaataactatcattttggggggaatcagtaa

SEQ ID NO: 246685 - DNA, 219 bp, Klebsiella pneumoniae
atgcatgcctttatttttctggtgctgatgacgccgagtagtggtggtggaatttgggatattactcccatgcctaatacagatgtctgcataaaaatgctacgggtactcgaagcacgtggtggcagaggttacggaagtaatacaggagagtgcattgaaattaaaacccgcgagcctttgagcagcgtgatagaaacattgagtgagggtgggtaa

SEQ ID NO: 246686 - DNA, 291 bp, Klebsiella pneumoniae
atgaaagtaaacgtcgcgagcgcggttaaaaacattgttaactgggcctttccactcttttttttgggtggtctgctgtatcttgtttacgatgattacagagataacggtacagcgactgaagaacagttattaatgatttctcatgaaataccctgtgccggtgaggattttagagcggcactccgtaatagaccgggaccattaacccttcgcgatgcgaagaaaattgccgctaaatgtaacgagaaatataaacaacttaacgcactgaacgctatgagcaaataa

SEQ ID NO: 246687 - DNA, 405 bp, Klebsiella pneumoniae
gtgaaagcgtactatatactcggacataacgttgcatggcttaacggtatatgcctgattctttttgttattggtgtggtcggtgcgctggcaatggttgccatccctgaaaaattcaatcttcgagttaacagaggcgatacattcatatactgtgcgcttatagcggtggttgggttttccgggatgttcgttatctccattcactcattttcgatggatgaacttgaagcaggtagacactggaaagacgactgcaagacacttgaggtaaacatgccgacaggcgcttttaccagccctgttaataaactggactgtgatggcatcatcattaatgtgccaggtgagcggtattatgcgtatatccatcagtgggaattataccaggcgaataaaaaatga

SEQ ID NO: 246688 - DNA, 312 bp, Klebsiella pneumoniae
atggctgaataccagttaagttttgatgggtttgtacgacttttttttgcaatggcaatcattatctgtggttacggctatgtaattattggtgtttttataagagatgcgcttgcctgtattttaatgttgtttgggcttgcaggtctcagtgttttattttctttcatagtattcatggataaaaacatgtgggccggttctcctgatttgacgctgtcagtaataacgggattttttacagctacagtcatcttttatatgttttatgtcttgatttattcctttgaacggatgggggcaggtgaatag

SEQ ID NO: 246689 - DNA, 219 bp, Klebsiella pneumoniae
atgcatgcatttatttttctggtgctgatgacgccgagtagtggcggtgggatttggaatgtttctcccatgcctaatacagatgtttgcataaaaatgctacgggcactcgaagcacgtggaggaaggggttacggaggtaatacaggagagtgcattgaaattaaaacccgcgagcctttgaacagcgtgatggaaacattgaatgagggtgggtaa

SEQ ID NO: 246690 - DNA, 1392 bp, Klebsiella pneumoniae
atgctgtccattaagatcgacaagctgcgcgcctatctgcagaacacgccggcagcgaacctggttgaagagaaaattgagaaaaccgccatctccattcgagctgtgctgaccaactacgttaaggctattcgttacctgcagggcattgagaagaacggcgaaccattcactatccgggactggatgcgcggcgtccgtgaggaccgacccaatggctggctgtttatctcctccaacgctgacacccatgcttccctgaagccggttatctcgatgtggctgtcgattgccatccgcggcctcctggcgatgggcgagaaccgtaaccggcgtgtgtggatcttcgctgacgaacttcccacgctgcacaagctgccggacctggtcgaaatcctcccggaggcgcgtaaatttggtggttgttatgtgttcggtattcagtcttatgcccagctggaagacatctatggcgttaagcctgccgccacgctctttgacgtgatgaacacccgggccttcttccgctccccgagtaaagagattgcggagtttgctgccggtgaaattggtgagaaggaaatcctcaaagccagcgagcagtactcctacggtgctgacccggtgcgtgatggggtatcgaccgggaaagaaaaagagcgggaaacgctggtcagttactccgatattcagacgctgccggacctgtcctgctatgtcacgctgcccgggccgtatccggccgtgaagctggccctcaaatacaagccgcgtccgaaaattgccgagggatttattccgcgcactctcgatgcgcgggtggatgcacggctcagtgcgctgcttgaggcccgggaagctgaaggcagccttgcccgggcgcttttcacgccggatacgccggaacccgggccagctgatacagacagtcacgccagtgaacaacctgagccggtcagcccgcctgcgccagcagtaatgacggtaactcctgcaccggtaaaatcgccgccgacaacaaagcgtccggcagcggagccttccgtcagagcaacggagcctcccgtcctgcggggcacgaccgtaccgttgatcaaaccaaaagcagccgcagcggccactgctgcctcaacagcatcctctgccggtgcccctgcggcagctgcaggcgggacagaacaggaactggcgcagcagtcagcggaacagggacaggacatgctgccggccggcatgaacgaggacggcgtcatcgaggacatgcaggcgtatgacgcctggctggcagatgagcagacacagcgggatatgcagcggcgtgaagaggtcaatatcaaccacagccaccgccacgatgaacaggatgatgtcgagattggggggaacttctga

SEQ ID NO: 246691 - DNA, 207 bp, Klebsiella pneumoniae; identical to SEQ ID NO: 223153

SEQ ID NO: 246692 - DNA, 282 bp, Klebsiella pneumoniae; identical to SEQ ID NO: 215489

SEQ ID NO: 246693 - DNA, 390 bp, Klebsiella pneumoniae; identical to SEQ ID NO: 219905

SEQ ID NO: 246694 - DNA, 822 bp, Klebsiella pneumoniae
atgtcatatacagaaattcaacctgttacattcaatgagttagtgggtgaagagatcgtagatctaattttcaccaaagcccctacaaaagttttatcacgcgtcgtaaacgctatcatgcacgtagagaaggcaaaaaaacttaaagatattgacgccgaaatggcctcaatcaggcttattgcagccgaagaagaactagtagttgcaatatttgaatggctgaaacttaacaaagagaaaatgccacagcatactgaactagtcaaaagctataaaaatcatcaagtaaaattgatgtttgttccagtgcttctccttatgaaaaatattctttggcattgtgtcttacctatacctaacctaaatgaggaaaatctaaagatttatcctaagtatgacgatgggaaaattgttattatgtttgggttaccattctcggacgtagaatttccattgaacccgttatctgtgtttatcacaatgggcgaagatgtagaagaaaatcaggtggttgattcattgtattcagagttggaagaaacagtaaaaataaaatatggcatgacattaaaacaatttataaagcaacgtgccgaatttagaaatattcttctttatgctggggatgcgctacctgttaattacatggttgattatgacgagatgacatctacctgttatagcgcctacgaggcactgttatggtctttagctgcactcctaaccaacgatccattatcaccacatcttggtgcagttagtcaatttattgctatttataaaaaagttttattagattctaaagttatcaggctttaa

SEQ ID NO: 246695 - DNA, 357 bp, Klebsiella pneumoniae
atgagaatttacggcgtgatggccattgccgttctgctggtggcctgcggagtcattcaccccttcggcgacaaaaccgtctatcagtcctattcagtatccgatcggccggggctgcagtggcgctatgactgcatacgcagcgccctgaagccgcaaggctatgaggttgagcccatcttccctgagcagaatgcgccaaacttctttgatatttcgcagtacggcacacgagtcgcccagatcgatatgtaccaggtggctggggcgaggacgataagtatcaccctgatatccggtgcaaaacaggtgaatgctgctgttgatagcattattcagccgtgccttgagcgctaa

SEQ ID NO: 246696 - DNA, 429 bp, Klebsiella pneumoniae
atgaaaaagttttttatcgacatgatcgataaggatatctattacgcgttgtttgcggggctggcctttggatcggtcacaagtcaaagcaacattcttaacatagccgctgctgcgttttgggtggttattttgcttggctgcgtaattggagtgtttacaacatctctcgcttacgctgttgaaaaagtaaccgatgaaaaatcccggcaatcagcgcttgagtccttgaggaaaattgtccggcgcaagaacgtcattgctcggtggtgggggtggttatgcacggtggcgatcatcgctcttcttgcctatagcggctggatatttaccgcagtgtgttatgcactttcatctctttttgtgcggctatgcatttctttagcccgagacaaggtagagaagcagactgctgaagttttagcttga

SEQ ID NO: 246697 - DNA, 186 bp, Klebsiella pneumoniae
atggaaagcatgatcaattccggtgattcagtgacctgttacaatagtgagtcggtaagcgacctgctaacgactggaaatatttacaccgtggagtcgataaccagcgaaggaatgataaaacttgaagggattacggatttattctgtgactggcggtttactaatcaacacgttaaaaattga

SEQ ID NO: 246698 - DNA, 1038 bp, Klebsiella pneumoniae
atgaatacgaaaaataattttgatatcgtacgactgaccttggcttttatcgtaatgctcgtacattccgcccaactgacaaaaagtccggacctcggctttcttcctgtttatcttgatagcacattcgctgtaaaaggtttttttgcaataagtggcttcctaatagcaaagagttatttaaggagcaaaacgcttaaatcatattttataaaacgtgcacaacgtattttacctgcgtacatttttgtaattttcttttgctttttaattggcgtttcctttacatcactccctataaccgacttccttgaaaacaaggaaaccattaaatatcttatcgcgaacctttcctttctcaattttattcagccctcattacctggtgtatttacagacaacccaaatcatggcatgaatggctcactgtggactattaaagcagagctcactctttatgttcttctgccattaatcctacctttaatgagaaaaaaaccattcaaagtatggattgttatatttacaatttcatgtgcttggttctattatttcacctcgatttatgatggccccaaagctgacaccctagcgaagcaatttgtttccttatcatcttattttttctttggtagcttactggctgtacatgaacccaccttcaagcgcctcaaagaaataaccatcttctcactcgttatatttcttgtttttaaaaaaacaaattacacattcataattgagcctatagcattttcatcagtcgttattttgttttgcacaaatttattcaagacaattaaaatagatcagtatggggatttatcctatggtttgtatatttatcactttcctgtcattcaatccttaacatatttaggtctttttgagtttaatgcatttttcggcctcttggttgcaatatttattactcttattatggcctacctttcatggcatctattggaaagccgcttccttaaaagagcacgccgtttagaaccatcagttatcccgccaaacactgctcataactaa

SEQ ID NO: 246699 - DNA, 420 bp, Klebsiella pneumoniae
atgaaaaaagtcgtcacggtttgcccgtattgcgcatcaggttgcaaaatcaacctggtggtcgataacggcaaaatcgttcggactgaagcggcgcaggggaaaaccaaccagggaaccctgtgcctgaagggctattatggctgggacttcattaacgatacccagatcctaacgccgcgcctgaaaacccccatgatccgccgtcaacgcggcggcaagctggaatccgtctcctgggacgaggcgctggattacgtcgccacccgcctcagcgccattaaagccaaatatggcccggatgcgatccaaaccaccggctcctcccgcggcaccggtaatgaaaccaactatgtgatgcaaaaattcgcgcgcgccgttattggcaccaataacgtcgactgctgcgctcgcgtctga

SEQ ID NO: 246700 - DNA, 246 bp, Klebsiella pneumoniae
atggatcaggaaatgacgttttcactcagctatgagcagctgacccgggaagcagaagaagagattaagaaatgcaatctggacaaggatagttacttttacggccgggaactggataaagccgcagccttactgcttttctggcaccggctggcaattgttggatatacgggggtgaccggaaatgaacaagttgaggccgacctgttgcgcctgaaagcccttatagtcggaaaagaggtctga

SEQ ID NO: 246701 - DNA, 252 bp, Klebsiella pneumoniae
atgaccagcaaattaaccaaaaaagagcaagcctgggtcgatgaggtaaacgcagtcctggcacgttgcccatcaccgcagaaaattgggttttatactatcggcgatccagtgatcggcctgtacgaccttcgccacgataaagaaatatcggataccgatgatgatcttatccgcgtagcacagcgcaacggctggctgtttgatgagcgtttagaatttccgtcagcggttaacggggtgtgcggataa

SEQ ID NO: 246702 - DNA, 216 bp, Klebsiella pneumoniae
atggctatagaaaacccgagttcatgcccgcattgcggcggcgataacggattccacacgaaagaaatagtggacttcaaacagatttatgaatgggacggaacgcacgcagaaggccaacacaaccgccgtattcgtggcgggaaggcgttttactgctgcgactgtggacgaaacattactgcgcatatcaataagccaggagccaaccaatga

SEQ ID NO: 246703 - DNA, 1077 bp, Klebsiella pneumoniae
atgactaataatccaatgaactttatgacgaaccaatttacaaaatggtttaacttaaactcagggggtgaaacagtcgaaagagtgatagttgtaccatgtcgtcctgaggatagggatgtttatcaagagcaagttgataaaggcacgttttttttcagaaattgcaagtggggtgttgcgatacacaaggatgactattatatattacagttagaatctgacgaaaaagagtttttcctctactggaataaagggtttgagtataaaaatacaattgaagagaatatagggttaatagaggatgattgtcattttttgtcaaatttggttttttacactgaatttaacatacaaccaaccggacctctgaatttattagaagataaaggcttggtatacgaagaggaattaattcagattctccctggtttacttacgcttagtcttgagcgggagtatgtcgctgaaaaatttgaaattaaattaattagagttttgctatatgtggaactacttgataggaaacatgcaactatatatgaaagagtcatagagttggcattatcgttgccagaaaaagagcatgattggctttattttgagctaataagggctatacgttctaaaaagcaagatagcatgtacttatgtctttataaaatgcttgaatttttctttccattgaaaaatgtattcaatttttccagtcgcatttcctataccggttcaactttgcagttattagaacactgcaggagtgagttaaattggaatgtcaatcataattatggattgagagcagctaaggattatgcaagccatgcattttgtttccatcttgatatagatatgtccatgctagatggaatgcccgacggtgcaaataagaacaataaaattgaccaatttaaatctgatggattggaaaaactatcagctttacgacatgcgttaacgcatcaaaattttaaagagcttgaagtggccgaagaagaaatatcaaaatgtattgtttctattgtgatatttttgactgaagcattcacagagtattgtcgtcgcattaataagtaa

SEQ ID NO: 246704 - DNA, 1188 bp, Klebsiella pneumoniae
atgcaggatattccagttattaagttgcgtgacgttagaagttcatgttggtccattatggttacagtttcggctaaagattatttagagttggtagaagcatcttatgccaatgatggcggtctggatgggcagcgtcctgccattaaatccaaaacaggtctcaaaatcagaagtaggttggtgagagacatcaaagatggggcggtgattcctcctgttgttattggggtggtatgctctaaaagcgattgtgatcgtttgagcgaagtcgagaactcgaatgaacttatagctgagatacaaaacaaaatgcttcaagttagcataattgacggtatgcaaaggacgactgcactcaaagaagctaacgcccaagatagtttggtgagagtagaaatatggctttcagaaaaagttgatacactcatttatagaatgcttgtactaaatactgggcaggtgccttgggatcttaaaagacaattagacgtattatacaaacagcttatatcaaaagttagtgatagtgtgagtaatattagaataattaccgttggtgataattctaggcgaacgcaagctggaacatataaaagctcacgaatagttgaattatttcttgcctttacatctcgttctatagatgtagatattaaagataaaatggccgaggagttttcaaaaattgatataactgacgctgcttctgatgttgaatattttcctcttttcttggatgctgtgagattattggttgacctagacgaaagatttgaaaaagtcataaggacggatattgatgcagaagaagaacctagaataaaatctgggaaagatatatttacatcagcacctggatcaataggtttcattgtggctgtagcagagtataccttagggtactccggttttgattataacttagtcgatgctaaaagtaaaatggaggatttaaaaaataagattggtacgcttattaaattcatggacactttaagtgttgatgcacttaatgaatttgtagacctccaaaccctgaatgaagttctttccactagaggtcgtacgagtcgaattggggaattagaaagaaattattaccttaaagcttttacgaatctatttagacatgtggaagcagttataggcaataatagcatgtacccatgctggcgagtgatttaa

SEQ ID NO: 246705 - DNA, 4041 bp, Klebsiella pneumoniae
atgaattcaactttctatcttgaacgtaattttacacacggtgacaggacgtacacagagacagagttgctggctgcatcaacgcacattgttgtgttagcagaacccggcggcgggaaaaccgagctgatgaagagccttgctcagaaactaaacacttctgtctttaatgccagtgtatttgcctacgtgggagcagataaagaaaatagcccgctgataattgacgccgttgatgaagtcgccaggatcgatcaatcaggtattcataaactccttgctctcgccagaacatcaaccccgactcgcgtaattatgtcgagcagatcaagcgaatggggacaggcttctaccagtatttttgaaaaatttcttggtttctccccgatggttgtgaggttgagagagttcgatcaaaacgaacaacacgccatttttaagcaccatgcgccagaagaagacttctttgcattccagactgaagtaacacggtttagtttagacatgttgttaccaaaccctcagtttctgaaaatgttcaccgatgcctatttagaaagtggcaggcgatttgctgacaaacgttcaatctttgctttagcggtagaacgactggctaaggaagccaacccaaatatcccgaaagcctctgtatcgctttcagttgcgcagaagatttcattttctgccgaggtttatgccaaacttctgttgtcgggcgcagagggcgtcagtaccaccgatgcgacttctagccggatgtatcccatgctgtcagcgttgtttagcggcagtacagcctgttacgacatattgtcaacgcagcttttcaagcccggcgataaggaagaccagcaccgcccggtccacaagatcgtggctgaatactgcgcagcggattatctcattaaacgaatagccgatcctgtcgatgtcctcactttaccaaagtgcttacctgttattgcaccgaacggcactgccagagatgagttgagaggtctgctcggatggatggcggcattaggcaataagtcggtacaaggatcaattattgagcttgacgcctatgcggtgctcgcaaacggcgatccatcgcagcttgaacgttcatcgaaacgacagcttcttcatcggcttaaagagattgaagccgaagatccttactttcgtcggagcgacttctggcgccggttcagcgcggctggttttttcacacaagacgttgttgaagaaataaagccacttttaacaatgagcaatgaaggtcatttacgtagtttgattttagaacttctggcagactcgccggttaattgtcatttggcatctgagttaagcctgcttactttaaatcccgacgagtctgaacagattcgtacattagcaagcaaatgcttacttgatgtcaaagaatacgatttcattggcgctttagccgttttgatttttgaagccagtaatatttcactcaatatagcagccaaagtcatcgaagtcatagggccagaaaaatttaatcacacatatctctctggattcttacgagtctgtgcgaatctctatcccgatcacaaagcacaatttgaaagagtgataggtactcgttattttattaagaagctaatctcccatttttcacaacatacgcttgaacttcttctggacgaattaacccataatcttcattgccattgtgggaaaaaatcctatgagtgtgattgtcgcaatggaataagcaagattattggttcaatggtcgatcgctattttgaactagctcaagcaccgtttgatcctgtgaggatctggcaatggataggtaatctcaattttcatcgtcattgccagcccgaccaaagtaaatcggtacagatgcttcaggaaaatgacacacttcgtcaggagatcattgcctatgtgtttgggccattaacggatcgtaaagagatattaaacttaagagtagagaaatttgccggacacctgcactcacattcaggccttcatttatggaggaaagactataaatttctcatcgatctggcgtttaaaatagataacgttgacctgtgggcgagtttcctagtcaaccatcaacgttacaaaaacaaggaagagcaaggcccggatgatttgcgggcacaaatgcgtcagcatgccctttccaaacctgtatttatgcgtgaatgggcccgattcaataatggcatgaaattatccgaacaggaacatctcctcttgagattcagacataacagaagcatgaaacgccatgaccgaaagcaacgggatatccacgccagaaacataaaatttgttagtgaaaacaaagaaattatagagcgtggccgtcactggggttgtctggtgcgttttgcagaactcgttctcatggatccggcaaaaattgaattggaatttggtgacgagaaactagttcgggctgcgttaagaaattgtctggattttattactcccgaggttcccacactccccgaactagcggctctgcaatgcaaatccaaatgcagactttctgtgatgattttatatgcagcttgtctggagattctacgtgcagaaggcaatcttgaatgcgtcaatattgagttacttacagccttaagaactaacattcacatgggatacaactcagtttctacggaagaacgtgatgcgctacaagcggaggttgatcggcttatttttcctgacagcgaaagtgcggaaaaatatctccgacagtatgttgaaccccaactcgctcaaccatgccctcatcctgaaatctggatgttaagtggagaagaggtctttcgtcattcacgcgctcaactttccatcgagtggcttcgtcgttttactggtttatcccttgactcagcagacacactttttgaaattgctgctcaatacggcgatcgtgaggatttaaaagaggttattgcagagcgttgctcagatatgatgtcaggttggcctaatctgacagaaaatgaggatattgaacgcaagcgaatattctggctggtacgtgaattctactttctggagaatattacggctacttattgggcatggctaaaatctgacagagagaatttactgcatttttatgaacggtccgggcgcatgagccggagtgagcaccgtgcctggccggaacttacctcaatgaaggttgaagccattttagacgcttttattgaacactggccgcatgttgatctgcctgatagctggggcagtgatagccctaaagaggagaaagcctaccgctttttgaatgatttgatttggtcaattaactcggacactcccgatgatgcaataccggtattggaccgtcttcttaatgatcctcgtttcaccaatctacataaggagttacaaagcatacatgccgctcaaatcagaaaaaaagcgctcagagattttgaaccaccgacgccagatgagataattcaacgcttggattgtgattcagttgttaccgttgaaggcctgcgtcagttagttcttcaggagcttcatgatttccagaaagcgattgatggcggggagtttaactcggcagatcgcttctatgagaaaaacgaacgccttgatgaagtaaaatccacggaaattattgctgaacgcctgaatttaagacttcaacctcagggtattgctataactccagagcatcagttgaaagggcaaaacaggagtgatttcacggcatctaagttgattggcggaaaaagacgactgctcgttacggaagtcaaaggccagtggcacagagagttatattctgccgcttcagcccaactctatgaccgttattccattcatcctgatgccgagcagcaaggtatctttcttgtcatatggtttggagaaagcgaaaccgtagctggccgcaaaaaccacggaattaaaaccgctcaggatcttaaagttagtattgaagcagtactaccgactgatctccgtagtttaattgatgttttcgttttagatgtttcacgacactgtgatcgccaacgctag

SEQ ID NO: 246706 - DNA, 486 bp, Klebsiella pneumoniae
atgatctcggcaccagaaccgcttcatgccgggcatattattaccccgttttgctgcggtatagattccatggatcactggctgaaacagcgggcgatgaaaaatcaggttactggcgcatcccgcacctttgtctgctgcgacgacgcgaaggtgttggcttactactcactggcttccagcgctgtgacgacaaatactgcgccgggtcgttttcgccgcaatatgcctgacccgatcccggttgtggtactgggtcgtctggcggtggataaatcactacatgggaatggtgtcgggcgggcgctggtacgtgatgccgggctgcgtgtgattcaggtggcggagactatcggcattcgcgggatgctggttcacgccctgtcggatgaagcacgggatttttacctgcgggtggggtttgagccgtcgccgatggatccgatgatgttgatggtgacgttgggggatttggttcatgcctga

SEQ ID NO: 246707 - DNA, 294 bp, Klebsiella pneumoniae; identical to SEQ ID NO: 210056

SEQ ID NO: 246708 - DNA, 840 bp, Klebsiella pneumoniae
atgatcgtggtgcttattttccttctcacctggcttaccattcgcctggtgaaggtggttctcgaccaggtcgccgccggccgcattcaggttcccggcattcatccggagaccgttagcgccacccgtcggcttatctcggtggtcatctggttgtttgccctctccgccgcctacccgttccttcccggcgccaactctctcgccttcaaaggcattagcgtgttcttcggcctgatgctgaccctcgggtcaaccggagtgatgacccatgcgatgagcggcctggtgctgttctactctcgggcgctgcgcaaaggcgactggatccgcctcgccgataatgagggtcaggtcagcgagattggcgtactggcgaccaaaattctcacccgcgaaaattacatcgttaccgtcccgaacgcggtggtggtgagcgggaaaattattaatctcagcgccgaaagcgccgacggtggagtcaacctcaccaccagcgtcaccatcggctacgatacgccgtggcgtcaggtccatgagctgctggagctggcggcgagacgcaccccggggatcgatcagcaaattgcgccggtggtgcgtaagctgggattgcttgactggtacacctcgtatgagctgcaggtgcgcttactccccacaaccaagctgccggatggccgcaacgcattgcatagcagcattattgatgtgtttaacgaattcggcgtgcagattatgtcgccgaactttgtgatgcagccaaaggcggcggtagttgtgccgcaggaagcctggtacgccgcgccggccgtcgcgccgcagaagcctgagaaataa

SEQ ID NO: 246709 - DNA, 1059 bp, Klebsiella pneumoniae
atgagtaatttaggttttggatttgacaatgactactatcaaaatatgaaatattttgatgaggacgaaatagaaactgttttagtttttttagaagacatggcagacttgcttgtttggggagtttgcttcccaaacaataaacctattaacttcgaattcagaagcactgaacaattcgtatttacagataaaatagtgtccagtggatgtgatcgaatactcagccttgtaaaaaaaggagatattgtacttggtcataatgttattgcctgccttgacagtgatcatcacgaaatgactaatttccgcaatactccttatggggagtactataaaaaccctaatatttatttaacaagactgcattcattagaaaacatacaatatcacttcaataatattgatgcacttcttgctgattcggtttgcaaacatgtttcagcactaacactgaaaccttcagatatagctaaagaactgtccaatcaaatataccctgccttttcaaaatacctttttttattatcttttgaaaacaataaaaaagcattagcaatatctgggtacggaaaactaaaaaaaacaattaagtacatgtcatccgttgaaaaaacatcatgtactaataactcatcacttttgaattctagtcactggcgacaaggagtatcaaggttatctgatattaacactagcttgacacaagcgatatctgatttaaataaaagcaatgaatatactgcatattgtagtaattggaatcataaaggctttacaatggataacgcctacctcttcatgagaggacataatattaatgatttctttgtttctattcttgataagacatatgatttatatacgcaacaagaatgtcaaaggttagtacaaatatgcactcaaaacaataaatcgcctgaagttattcagcaaaaagtagagcattataagcaaactacacaactttttagttcattaaaaaagaaattacttgtcccagttaattctatacatttattctcccaaacagcacaaagcatcgcacaagtatattaa

SEQ ID NO: 246710 - DNA, 1140 bp, Klebsiella pneumoniae
atgtcaaaaatatcaaaaattgacacttacaacattattaacaagggaactgtaagtgaacttgatttaaacaaacgcataactatattaaccgggtataatggatctgggaaaaccacacttttaaaagctattcacgaaaccatagccatttataacgacaccatatacccacacaaaagaaaaggccttgctgtcgatatatattttgaaaactcttacaaaattagaaactttactcttccggaagatgcaaggcagcttgacctaaatgatcaatcatttgttgctaaacatgtaaaaattactgataaacttgatttagcttataaaaaactattaaattccttaaccagaaataattctgccgaaaaaatcaaatcaaaagacaacattaaaataggcgaggatagtaaaaaaaacagcagttacaatggattggtaatttttccaaaagataacagcaaaaaattatcatccatattatattgcgatgaactattttacttcagcgacgatgaggactcaacaagtaaagaaaaacttgaagaactcgatgtctattcaagaagtaataatctagctaaaacattgtatattttgcttcaggaattctctaaagaatcaattttaaacgagaaggaaagagaaaaaattgatgcaatgaatgaaattaaatccatgttggattatgttccagaggatagaaaactctccttggagaaaactattcgggagcttgaagagaaatccgattataaaagagagttgaatgattttattgcaatcgttaattctttttttgagttaacaaatagaaaaatatttattgataatgaaggactcatatctcttgagtacaaagaaaattattacaaatggtttgatttttcaaaaggagaaatgacattattatccttactcttaatcgtatacttacacagaaacgaaaatgttatatttttatttgatgagcctgatttatcattgcacataaaatggcaaaagaatctaatttctaagctcgctgctatagcaccttcttcacaatttatcatcagcactcattccccagccttgattggaaattataacgatcaaagtattatcaacataagtagcttatctaggggggaatga

SEQ ID NO: 246711 - DNA, 1473 bp, Klebsiella pneumoniae
atgccaaaactcaagcttaaaatttacttttctgatttctataatgttgatcccgatgaaatcattaattatggtgcttttaatatttcattaattaatgatttacctttgttcattgacccgttccttttattcaatagtgagaatgataaatataaatcactacatgcagaaataattaaatatgtgtcttttctcaaggatatggccgaaggtggaaaattaaccagcggtttaataaaaagttggtttttgttcccagaggttaaacaaaactggtttggttttagtctagttggtaacggaggacgaggtttaggcccagactttgcgaatgcactgatccagaatttcagtaccacatttaaaaatttcggtaatgaaaagttaacacgaggtagtcatctcgaaaaactatgccttataaaagataaagttgggaaagatagcattagtgatttcactactaatcttatcaaaaaattcctccttgaatatacacaagaatttgctatctaccatattgataaatccctcttgtctaagttcatggtagataaagtagaatttaattataatactcaaacttgggtatcgagagaatatactctcccattttataataatgaatatgtattgcttactccaagagacatcctcacaaaagatgaagcatggattaaccagaatgaaatgattgaagatttcagtttcttttgcaattccattccaaatgatcaacttagggatcagcttggtgattattttgctagaatgatccccgataaacctaagaagaaagattatgaagaggctgccagacaagcaatcaagaaacaccctgaatttattgattattttataaaatacaaggaagatcatagccctgaagcacataagcaaagtgacttaaaagtctccgaggtcgaagatctttttattgaattagttcaagcgttagcggaaaaaatcaatgatgaaactgacttttatcgccataacttcaatacattagatgagagttatgaaagagtaaaatatcttaagcaagtaattgaaaataatgatggatacaagattttctatgttaagggttcaccaatcaaacgtgaagcggacctacaattgttatttagattaacatggtttgcaacaccttcagacgttaacagtgaagttaataatggtagagggcctgtagactataaagtatccagaggaaacaaagataagaccttaattgaatttaaacttgctagcaactctcaattaaaaagaaatcttgccaatcaagttgaaatatatgaaaaagcaaatgaaacacataattcaatcaaggttattctttattttaccgacaacgagcttacttctttattcaagacaatgaaagacttaaaaataagagagggtaagaatcttgtgctaattgatgcaagaccgaacaaaccgtccgcatccaaagccggataa

SEQ ID NO: 246712 - DNA, 264 bp, Klebsiella pneumoniae
gtgcgccagttctgcacgtctgtgggtgtaaatcaagttctatgccgggggaatttctctcggttatcctcccacgaggccgcatcaagcctgaaccatatggtcaatcactattttctgctgaccttggcccaaaatcagtgcagtgctaaatcagagatcttcgtctttctgaccctggcccaaattcagtgcagtgctaaatcagtgatctttgtctttccggagacttcggatgaattcagccggagtcatgtcatttaa

SEQ ID NO: 246713 - DNA, 894 bp, Klebsiella pneumoniae
atgtactactcaatgtttcttgataaacacaaatcccccctcagccacgcacaatggttacgcttgcgctatattgagcgccagctactgtgggaacgaaaagtcacttcgcgcatgattgctgaagagtttggcgtctcggcgcaacaagctcgtactgatgtaagaacctatatggaggtcgctccaggcaatgctattgagaagggggccggccgaaaagggtatttccccagtacgacgtttacgcctgttttgctgggagacaacgatctggtctggcgcgcgacggtagaatttcaaccgccgcaagcggcccacgcgcaggaaatcccgctcatccatcgcgcagtgcatagccgcacgctggcaatttttttgtcagcaatcgaacagaaggggcaagtaaaagtgatttatgcgtcaatggaaaacccggaaggcatatcccgtacactaagccctacggtaattatcaccgttaacgggcgccagcatgtgcgagcctatgactggggtagttcggcgtttaaggactttgttttggcgcgatttctggactcgccggaactgattattcctgccgccccccctccgcgcaaagataccgcatgggaggtcgtaatccccgtgcgttttatagccaatccaacactaaacaaagcgcaacaagaggtaattaagcgggactacatacttgaaccatctgaattcagcattcgtgcaccaatgattttttatttatgccctgaaaacaatctgcctaaaacagatgatgaatatgcgcaagctactgacgccagcagccacggcccatttgtctatcctgttctagctgtgcacacccaaacaggtgagcctattcataagtaccgccatgcaggtgagagatag

SEQ ID NO: 246714 - DNA, 1467 bp, Klebsiella pneumoniae
atgtcactagggtttttggagcaggctcgtaatgaatctatggcacgccgcgagctgacgattcaatctcacgcgttgctggtagtgcggacgctggattcaatatacagcgccctacagcgcaatccgtttgatggcttcgagcttgatgcactggcggcgattatgtatctctttgacgccatgctttattatgctgaccacgagcgccagccaggtatgacgcgtaaagaagcagagctatgtctagttgggcacctcaatgaagcctatccgggacaagaagcgtccgactacgcgcaagttgccagcaagatttttgcggcgatcaaagaccctttccgtctcagttattacgacttctcgcaacgaacgcattccgaagagcagatagtccgtctggtacgctatgaccagctatccggctcagatgatattctctggtcgctgactgatgaaggaatgctgttctataccctccgtttggatgaaacgccgatagaacgcgctgcgattctggcctggcgcacgcttaaaaccatccgtcgcggtgagatcgacaaggcagtacaccagatccaatcaacgcagcggcaactggagcaatatctgattgggatgcggatgaaagtgcgtgctgcccagtctggtgatttgagtgcatcttatgcacacgatatccgtcccgtactcaatgattcctttgataaaacccgagaggttttggaacatatccaaaactcaatgtcggccattaccgaaatgctggttgaaggaagttcgaaattaaatcccgacaaattaaataagctacgtagggcacaggagatttttgctgaggtctgcgcttttacgcagcgctatcaagactgcttacttgaggttaacaaagattttgagcgagctcgtctgaaactcattattcccagagataatacccttttccgggaaacgcttgaaaaaggtgcactcaagcccttgctgtctcattcccccgacactgtcgaaaaggaaatcgatggtctcaccgcacgcctgttggctccccgaagacaggatgatgatcggcacattctgtttgaccttgaggcgctgctgaacctttatcttgatagatttgaacaggcgcttccacatgagatacaggacctcaccgatcagcctgtagctattgaaaccaacctgcgaggtatccctgaatctgtcattaaaaaatgcagcgattgggttagtgaccgattgaagaattgggggtatgtgagctttagagatgtttttgacgcctatgagtgcgaagaattatccgaacaagaacaacaggtttgtttacttcatattggcagcctggcagctaacagcgatcccgcaatagaagtggagatagatgacgctatcgaaacaacgctttggcgggctaacaatatcaaactgttaacggttgctcccttatacccctttgaggagtag

SEQ ID NO: 246715 - DNA, 897 bp, Klebsiella pneumoniae
atgtacgacaacgcacatcaacaagctaaacgctacgccgagattgccacgcaggcaattatgaattcactgggatataaaatgggggatgagctgattcaacgtgcgcttgatctgcaaggtgatgccctgttcgcagagattatccgtggcgtcgcggcaggtatgaaattgcggtatctcgggattcatgagacctacggggtattactggctgcagatggccgaggtccgttttccccatctttgggttggctgaacaaacgcttgctacctgaaactatggctgagcaacagggtaaggaacggaaagaacagcgcctgtttgcaggcttaactctgattgcgttgctggctgatttgtttccaactccagacaccgttcgtgtcgagttcggtcagagtaacgccattaatgccgcctcggtggtagccaggctcaataatgttgccgaccaggtgattgcccagcgcaaggccgagggtgacgataccgtagatggcctacttatggcggccaggtttgtgcaggaagaacgtattccccgtattcacgacgaaaaggtagggcgtgtctcaagtattcgctcgcaaacagaaatggcaacgcgctggatacaactgctgcaggaggaaggctttctggccgaagacagcagtctgtcgggagagtccgactggtatccgacccaaaaactcaaacattatctgcgccattcgggcattgaagagacggtgcgctttgtcatgagcatcagtccagccgtagaagaacggtcgtccgatttagctgaaagcgatcttgcagcattggcagataccctggagtttccttcgctcaatgaacgtccagttacaactggaaccacagaaacgcaacgcttgaaggagatttaa

SEQ ID NO: 246716 - DNA, 4437 bp, Klebsiella pneumoniae
atgtggctgattaaacgggtttatatggatggcgcaggccatgaagaagctttctacaaggacctcacactggactatattggcctgtctcaagcggtcggtagccctgttgttgaaggcctgcgctcgcccgtcagaaatgcgaaggtggtgaccagtacttatcagcagcttgtaaatgggggcggtaagtcaacctacatcgcgctgctgttatcgatttttgagccgtccgttagtgacttcacccaatatctggcaaatcaccgccagagtgaataccactaccgcaattacttctataaagaactctctgttgttttggttgagatggtcaatgaatcaggacaaacgttattactgggacatgctcatcagcgtaatggagataatgttgaccgcacactgtttatttgtgatgcgcccgactccctgatgggcgcgccgtttgatgaagtcccttcttattcccgcgcggaacgcaattctgagctgcgcccctatgccaatagcctgcgcagttttgatagctggcttaatctcaaggccggtagtgaaggcggcatgcattggcgtaaaaccaccagacagaacgagtggcgcgcatttttactggaacaacaaattaacgttgatcttatcaaaacaatggtgacctttaactccgaagaaggtggcctgacccgttttatcgaatacaaaactgaacatgatttccttggcgcgttcttcgcctgcaccatgtctaaagatgcggctgagcggctgcgggaactggtagcgcatgaagttgaacgtcagggagagttagaggggattcgtcgtaacgagtccttcctgaaggatgtgctggctaactggctggcgtttcttgatccggctaaacagctggaaagcatccaggcacagcagcaactgctggatgatggcttccgagaagcaatgcgcgatctcgcagcctttgtcggggatgctcaggttgaacagacgcagcttgaagataacatggatagtttgcaaacgcatattggccaggcgatgtctctgcgtgagcagttaggtaagcgcagagcactgcttgaatatgatctcgtgcagcatcaattcaacaaacaaaaagcgatagtcgatgcgcttcaagacgaagccgataccaatcagcgccagattgagattactcacgctgctatagactacaaagcctatgctaaggccctgaatgagtaccgccaggcagatgaagatctgaaggtattccaaagtgaaacggaaaggccgctacaggtgattttcgagcgtactgctggcgaagccttgggcacattagagtgggcaatcgacagacatcgccagcaggaggctacgcttgaggaagaattagggcagatggacagggaaagccatgtcctcagacagtcatacgataaagtacaaaagacgttgggtggtctggaaacggagcgtgacggatataaaagagacaaatttcagggtgaatcgcaacggaatgaattatgtgaagcagggttgatccaaaagggtgaaacaccagtagcagcccaataccgactggaattaaccttacgcgatgcacagcagaatgaagaactggctaatacaattcatcatcagaaagagcaggcgctggaagcacagctgaatgttgtgcgggtggcatcaattgagaaaagtgaggcccagcaaaaacttattctggctgaacaaaaacaccagtcagctgtggatagtgccttacttttagcaaaaacctatcaaaaactgccaacgtcaacgcgacatgatctagatattgaagacacgagttggcacagcgagcagtgtggattgcagctcgacaaggtattgaatgcgaacgctcaaacgctgaatggaatgaaagagcgtttactgcaagcccggcacgaactagaagagttaaggatgacgggacatgaactggtcgctaagctggtcaatcaggcacttgaagcgttttatgcggcgggcattgcacgggataagctctggacatttccacactatttggcctctgtttacaacgatgatgcacaaaagattgcagcggtgattgatcaaaaccctggccgctacctgagtctggtcgcactcgacaatgtaacgtttgaacaggtccataaaattagtgagatcctgccctggaagaaggcacctattgctatttacctactggatgaagcacaagatctccgccgagaaacgtctgaattagtacaggtcgtcctctcaaaccccgataagcatggatatagccaggccgcgtacgaagcccggctgcaagacctggagaatatcgtagcgtcgcaggaagtcagtgtggaggctgcgaagagcacccttgatgtactggaatctttcaggaatgactggcgtctgcattacgaacagtatggtaagtattgggtgggattgcttgaccaacgagagcaggctctcttaatactggaaaatgctgatgcagcacttaagcaagctgagcatgatgagcaaacactgcgtgacgagaagacagatgcccaggtgaggttaaacaacgcccaacagcagaaaattcgggcagaaaaagcacatgataaactgagtctttttgtagaaacagaatgggcgaagcgtgaaacggcgataatgaaactggagcagttagctgcacagattcaacgaagcaaggacactatttgcacccagagagagagactggaacggctgaacgaaatcgagaagaacaagctctccgagaaaacccttttaaatatccagatgggcaactggagtaatctgtgtaacgagccgttctattcagagattacggcgactgaaggtatggtaggacgaagccccgaagatgcccatgagatggcagctcaggcgcacaaaaaattgctcgaagcagccaacggtgatcaagtgaccgctctcaagcaacaactgaaagatgctgaacaggcacaacgttctgcctctgagcgtttgaccgctcaccccacctacaatacatatccggacgaggtaaaagcgacggccatcaatgagctaacagtcattaataaccgcatcgtacgcctcaacgaacagcagaagcaattcacgcaaaatctaattaattctcaggtaactctgcaaaatttttcccaaagctgtgagaaggcaagtaaagcaattgacgaggattttgtctgggaagagaagcccattgagatagagacaatccaaacgtctctggctgaaatcgtcaacagcctccatgaaattgaataccagctaaaacttcacctggagcaaaagaagctgcagttgcaaaagattgaaaatgtgaaagaacggctacagaacgccaaaacagctcaagcgatgatccagcacattacgccgagctctgccgcgggtttacctggtaggatcctgagcattacagaatatgctcaggatctggctacacaatgccaaatgtatgcaggtctaaatgaaacgctaaaacagcaaaatatacgcgtctctacggtctggggaaaattccgcaaacggatcgaagaagagttggccaaggatccagacgcccaagccagtcaggaatacttacggcagttggactcaatcgcaacttatcatgaagtgctgggcgatttggacagggtcggtacagggatcacgcaggtattcgaagctgtgcaggatagcctggaacaattccagcgttcgattgatctgacagtcacccatctgactgctcatctggagggggctattaaacttctcaagcgcgcgatgtcggtcaaaattcctgaggattgccccgtactgcctggccggcccattatcaaaatgacggaccggctgaatgatgttgccgctgatctcaggggttttgccagcagccgcttgcagcagtggatagccaagggacagataccccgagcgcccaatcgggacgccttgacagctgatttggttcagtcggtatttggcgaaggggagctagaggtgcgtttgctgaagacgaatgccagccgtccacaatggactcctgtcacccgacttgaaggttcgggtggacagcgccttacatctgcctttttactgtttgtgacggttggtaaagtacgagagtacgatacgggtatttcaagtgcaggattcttgttagccgataaccctctgggtaaatcgaatgccgatgatctaatgcgaattcaaacccaaatggccaaagcctataaaatccagctcatctacctgactggtatttcggatgaaaacgcccaatcaatgtttgataaccatctcttcctgaataaagttcaaaaactgaggcggcgcgatttggtcaccgttgataaagaacgccatgccctgtgggcagcttctctggctgctaagccacagttcgatcccgtcatttaa

SEQ ID NO: 246717 - DNA, 1044 bp, Klebsiella pneumoniae
atgatctggctatcccgactggagtcgacagccaataaacatcgtcttgccgctggtaaggccgcccgtacagtgaaagctaatgcggtgctggatgaggtattacgcgcacacaatcaagaggccttgagtcaggaggcgcctgatttgctgagccaggctgttaggctactgcttgagagggactggcgggctcagcctaagcacaaagcgagttggcagcgctactggcggggtatgagcctgccaagtacttttgtttacgaaggtgccatcgttcctacgaagacaacatcagaaatagcctggcacccttggttggcccgacgtattacaggacaactgacccagccaatcaaggcacgcttacaacagctgaatacatatctttttcgccaaaccgagggcgacaagtcactattcccgggcttgcttgggcatcgtgagcggtctctgcttatatttggtgacgaaaaagcgctggactccttgccacctgatggctggaagcatgtcgctctgactttggctgatatgggcgcgtttcgacgtgcaccgcctttaccgtatgagtcatcatgttgccatgatcttccggctatcattgttgaaaactctgatgtgtattatcgactatgtcaacttaatcgagttcagactcgctggtcactggtcatttacggcgcaggtaacaaagtgtccggccaggcggagtgcgtgtcacaactccttgaggtagaacaggtaaaacagttactttattttggcgatctggatgtagcgggcttaaaaatcgcccatcagttgcagtgtaagctgcttagtgattacggtatcaacttacatttggatgaatggctttataatgaactgatcttaaatggtctaatgacgccagaagggaacgccaacaacgaacggtttgattttgaattgcagtgtaggtggatgccacagtttgttttacgagaaatgaagactcttctggcgatccatcagcgtcttcctcaagaaggcgtggcttctttaggtttagtcatatag

SEQ ID NO: 246718 - DNA, 282 bp, Klebsiella pneumoniae
ttggagattgctcctaaaacagacgatatttggataagcaagatcatagagctctcacaatcgaaagtgattacttgtcctgaatctttgtcttatgttcaggagatattacattccaattttacgcttagctcagaaaacacccttataagtaagaactttttcttccttcgtttttttcataagtttcgcgttaaattgcttgcttactgtgggtaccttaatactaataacgatttatcaattaagaaagttgagcagcatttcaaaaaggttatttaa

SEQ ID NO: 246719 - DNA, 1419 bp, Klebsiella pneumoniae
atgagtctaataaataatgtaaaatgggtgagcatatcacaaattgttaagatattgtgccaaattttaggtatgtttattttttctaggttattaagcccagcagaaataggcattatggctatggccttagtcgttgttaattttactaatatatttagagatctgggtacttcagctgcggttattcaacaaccaacagtcactgaaatcttaaagaaaacggtttttaccctgaatgtttcatttggtgtagttgttttctttttggttttttttggtgcgccattaatagcatctttttttaatgagccactactcattaatgttctaaggctcgtcgcatttagttttcctataaatagtgctacggcaatacatttatccctacttgaaagggactcaaacttttcaaaaattgctatagttgaagttgcttcgtcagtttttgctttattcattgctattcttttttcaatgaatggtgcaggtgtttatagcctagtcgcgcagactttactttattcaatcttttccgcattcggttttatctttaactcttcttggaaaattggctttgcgtttaattaccaagaaattaagaggattttttcttttacagcaaatttgttaggctttaattttttaaatttcttttcgaggaatttggatcaggttatcatcggtaagaatttctctgcagttattttaggacattactcattggcttataggctaatgttatttcctatacagaatataaccttcgttttaacaagatcgctttaccctattttaagccgtttacaggataatccaaaagattcttttaaaacgtatttgcattcactaaaggcaatcgcaattattattccacctttgatggccggtattgctttagtaagtaaagattttatatatgttttttttggggagaaatggttacctgttgcttctattttattatggctagcaccagttgctgtaatgcaatcatttgtaagtactacaggatcggtgttcatgtctaaaggtaagacaaatatccttcttattatttcaatttataatgcattccttcaaataggtgcttttataattggcggtttttttgatattttaattttaatcaagctctatttaatagctaatttattgatgtttattccgaatatgtatttggccattagagtattatctggaaagttaatggattttttcagtgtcttaataaaaccatgttttgcaacaggattgatggttttggtggtgtcattttcagaactatatttacctttcaaaatagaaagtcatcttgttaattttatactacatgtggttttaggcggtatagtatatacatgcatgatttttatattggaaaaagatttctttcttaaaaggaaacaatgcttgtaa

SEQ ID NO: 246720 - DNA, 1011 bp, Klebsiella pneumoniae
atgaccgagacagcagaaactaagccaaattttgaccaagccgccgaaccgttaaaaggtatcaagaatctcattacaccttccggcactgtgatgcgtgtaactgataccgatctcaagtggttcaatcacttttacaccttcgaggcgcagggtaagaagtgttaccagagcattaaaacaattgctaagtcgatgcgccgcgccgactcagtggcacaggagaggatcgacaaactgcaagcgctgggccttctggaagtaggtaaagagacctttaaggatgggtggcgtaatacatacacctgtacgcctattgatgtcatcgtgtcccgcatgactgacgcgccagtgacaccgcaagataagccgttgaaaaaatcgcagctcaattccttgctgaagaagtctggaaaacttgattcccatgcagttaaccgtgggatcaaggcgatggcaaaaaccatcgcaaatcgtgatctctctgatgaagaagtgatgcaatttgcctttcagatcgcgactgagaaattagccgcgctcgggtggcctatcgaatcaatcattgaggagagtaatgatgaagatgacctgcaacccgctactgatgggactgagactgcctcgactgctgctggagaaccagacggcgtatctatcattcatagcgatcagcatgatgatattccctctgatgatgatgcggtgaatcaggatgaaattgcgatcttcgatgaaaataatgttgtgactgaggcgtttatcaatggtgctgataatccgaggatcgggcggaacgatgatggtacggtgcagaattatcggtacacctacgccagggcaaaaactgcacaggcattccaagatggcaaagcctcaccgcaggctatttccgacagttggtcaatttggttcaatgctgcacgccctgaatacatccccgtgcatctgctaccagtacatgaaaggccagtgctagcaggttattttgatgatgacgaagaattttaa

SEQ ID NO: 246721 - DNA, 177 bp, Klebsiella pneumoniae; identical to SEQ ID NO: 103156

SEQ ID NO: 246722 - DNA, 360 bp, Klebsiella pneumoniae
atggaaatcgtccaaggtaaagacagctttaacgagatggcgaccggaattctggtgaaacttttcgcggcttaccctttccattcagaatttgattattcggactggggctggaacgacaagcgtagcgagctactgcggaacactttactagctctaaaggatatgggttacattgatataatctcatcaaccgacatggactacgccgctaagttaactccaataggcttaaagttgcttcaacagcaagcgccaggcgcaggcgataccgtgatcaacattctgaaaggtgcagcaggtgaaacccggacagcgctcatcggtgccatcatcggttggattttcggcgggaaataa

SEQ ID NO: 246723 - DNA, 567 bp, Klebsiella pneumoniae
atgagccgaacttttgcatattgccgtgtttccacaggcgaacagaccacagagaatcaggctatagctattcgccaggctggttatgagatagcagatagtcggatcatctctgagactatctctggtggcgtacaggcgatgcagcgacctggattcgctaatctggtcaccaacaaattagagaaaggcgatcaactggtcgtactcaaacttgaccgtttgggccgtgacaacatcgacgtgcaacagactgtcactatgttaaccgggcttggagtcagtgtcgttagtctggatctgccagtgcgtgatctgactagttcagatggtaaactcatgcttcagatgtttgccgcctttgcagagttcgaacgttcccgtattgcagagcgcaccagggagggcttagagcgagccaagcagcaaggacggcgcttaggtcgcccggtggcaacagatacccgtaaacaggtacaggatgcaaaacaacagggtttgagtcagtccaaggctgctaaggcgctggggttgagcctccccacaattaaacgtcactggaactga

SEQ ID NO: 246724 - DNA, 144 bp, Klebsiella pneumoniae
atgagcgaccccgacgaacaagtattaaaaggcgggaagcggctttgtacttacgaaaacagcatttacttgttcacgctggtgacgcattcgcagtcctgcccgtattcgaagactttcgatagcctggacaacgaaaaataa

SEQ ID NO: 246725 - DNA, 420 bp, Klebsiella pneumoniae
atgtcgggagtgttggcaagtacagccgctgctgttgggatcattgataaagctgttggtatcgcgaagaagctcgctgatgagagtgacgagcttgataacgcaaccctaaagcttgagcttgcaaatctcatgacggagcttgctagtgtcaagatggaagttgtcacaacacaggttttgcttttcgaagccgaacagaagaataaacaacttgaagaacaactaaaggataaagaagcgtttacctttaccgatggagtttatttcaaagaaggggatgatactgctttttgtgcaacttgctttgagaaggataaattgaaaattcatatgctacgttatgaaaaatactatgatgcagtttggcacagatggcactgtaaagtatgcaaaagcgatgtatcaatcaattattaa

SEQ ID NO: 246726 - DNA, 474 bp, Klebsiella pneumoniae
atgcattttatgaaaatacatcatccagcctattatgaaaaaatagaaataaccctcacgttcgataacggggttagcctttatggtgataatatgatacagaaagcgaaagagttggagttaaataatattcattttagcggatttgtcagccgtgataaagtttatgaaatgtataaaacagaagctgatgcgctaatatttccatcaaagctagaaacatgggggttgccaatatcagaagctaagatgtacaatctaccaataattgttgctaactttgattatgctcaggaaacagttggagattatccatatgccatcttttttgagaatgaaaaaatagagctggcagatgtcctgattagttttattgatggtaaagataatttctcgaaaactaaaaagatctattcaaagtggcatcaatgtgattcatatgatgagttagttagccatatgctgaaggcttaa

SEQ ID NO: 246727 - DNA, 204 bp, Klebsiella pneumoniae
atggtaatggtggttggggttgggtttggaataattgtggttttgatcagtgtcaatacctattatatttacagaatgcttctgattcatatgaacgcttttcattttatggttgtgtatggcaaaatgggggaacggcattttatgtcgataatccaaatggaaagatatattgggattctggtagttttgactactgtgtag

SEQ ID NO: 246728 - DNA, 201 bp, Klebsiella pneumoniae; identical to SEQ ID NO: 121321

SEQ ID NO: 246729 - DNA, 285 bp, Klebsiella pneumoniae
gtgcagctggaaaataaccgccttgagcaagagctggtgctgatggcgcagcgtatcgacgttgccgaagaactggaccgtctcgaagcgcacgttaaagagacctataacattctgaagaagaaagaagctgtgggtcgccgtctcgactttatgatgcaggagttcaaccgtgaatcgaacaccctggcgtcaaaatcgattaacgccgaggtgaccaactccgcgattgagctgaaggtactcatcgagcaaatgcgcgagcaaatccagaatatcgagtaa

SEQ ID NO: 246730 - DNA, 504 bp, Klebsiella pneumoniae
atgtctgcacatgttacaatcttaagaaatacagtacttccagtgaaattcaataccatgaatcgtccacgcttatattcatatatccgttactccagcgaacgacaaggtaaaggtagttcgattgagcgtcagaagagctacattgctgaaatggcaaaacagattgctactgagtacgatctggagattttcgaggaataccaagatttaggggtatccgcgtacaagggtaaaaacgttcaggaaggagctttatcggatttcatagaccaagttgaatccggtttgatcccaaaggggtctttcctcttgattgaatcccttgatcgcttctcacgccagaacgccatgcaagcggttaaccttttcaccagcttattacttaatggcatcacggtaattaccgggattgataaacaggtttacagacagactgaagtaaacaccgagacattgcagcaactgatgtttagggaaggtgcgaacaagttcctgatatga

SEQ ID NO: 246731 - DNA, 174 bp, Klebsiella pneumoniae; identical to SEQ ID NO: 39930

SEQ ID NO: 246732 - DNA, 141 bp, Klebsiella pneumoniae; identical to SEQ ID NO: 225643

SEQ ID NO: 246733 - DNA, 147 bp, Klebsiella pneumoniae; identical to SEQ ID NO: 233881

SEQ ID NO: 246734 - DNA, 474 bp, Klebsiella pneumoniae; identical to SEQ ID NO: 99300

SEQ ID NO: 246735 - DNA, 2673 bp, Klebsiella pneumoniae; identical to SEQ ID NO: 233988

SEQ ID NO: 246736 - DNA, 1179 bp, Klebsiella pneumoniae
atgttgatggcaatggagcctatatgggaaaacgatttccactcgttgtcctacggcttcagaccagagcgcagtgtacatcacgctattcgaacggtgcaattacaactgacaggctctagtaccagaggccgctgggtaattgaaggtgacttatctagctactttgacacggttcatcataaattgctaatgaagtgcgtacgcaagcgcattagttgcgtaagattcaacgatctgctttggcgctttatcaaagcgggtcatattgaacgcaatctattctgtgcaacaagcgaaggggtaccacaaggtggtgtgatttccccattgctgtcaaatatcatgctgaatgaatttgaccaatatttagatgaacactttctatcaaagaaagccagaaaagaccgttggtattggaatagaaccattcaggacaaacgcaaaattgcgatagaggaaaaccgacaatggctgccagccattgcctactgccgctatgctgatgactttattgttatcgttaaaggcactaaagcacaagctatggccattcgtaacttatgtcggtctttcttggaagacaagctgaagttgacgttaaatatggagaaaacacatattacccatgttaacgacgggtttgtcttccttggccatcgtattattagaaaacgaggtccaaacggcaatatgcgcgttgtgtcgggtatcccacatagcaaagctaaagcgttttcatccacgctcagtaaagctttatcgggtgattactcttgtagcaaagtcgataaacttgagcacattagtcgtaaattgaaaggttgggcacagttctaccgccatacccactttacagctaaagtgtacaacaaaatcgataggatcgtattctggaaatttgcaaaatggctggctaggaaatatcgctgttccattaaatcattaatgatgacatggatacgacgaccaacgcctagcaaagctaagacttgggtggtttatggtaagtcaaataacggtattgtatgcggggcaacactatttcgtttagtgagcagccctaaaatgccattcagatggcgactacctgaaactaacccttacattaggcgagaagaaagaaacacgatcacctcgcgctacaacgatgttgctatggctgtcagccaacattaa

SEQ ID NO: 246737 - DNA, 270 bp, Klebsiella pneumoniae
gtgtgtgcagactggcacatcgcagaacaacccgggaagctgaagtccctgaaaaagcaccctcgtatcaataaggtcaaaatccgcaccgagtatctgaaggccagcctccgcgccaaagtcgagcatccgttccggatcatcaagtgccagttcggctttgtgaaagcccgctaccgtggtctgaagaaaaatgacggcaaactggcgatgctgcttgctctgtcaaacctcgtgcgcgtggatcagatgttgcgagcacggggttaa

SEQ ID NO: 246738 - DNA, 552 bp, Klebsiella pneumoniae; identical to SEQ ID NO: 234024

SEQ ID NO: 246739 - DNA, 168 bp, Klebsiella pneumoniae
gtgctgaagttaatggtactggaacaacaggccgaccagttaccggatctgctgactcatcgcttggtaaggagttgcgtgaaaataacggggcaagcgaacatcccatggataaggcgtccgctgcgtttcaaaagacaggagacgctattcctggccatgaagtag

SEQ ID NO: 246740 - DNA, 1197 bp, Klebsiella pneumoniae
atgacctgcttattcgcaccttccttaacatggtatccacctcactttccaaaacaagggcgtttaccaacagatacagcggcaacgaagcgaaactgtaaacagcaggatagccatgagctggcataccggaatgagctttgtcacgctgcgggtaaagccgtagagccgccttgctgtaaaactctgcatatcagtttattttttgacggcacaggaaataaccttaataacgatctgtatatttccagccctaaacatccaacaaatattgctcgtttgtttcgtgcaacgatcggtcagggttatgccggtggtgttcaggggcatactgaagagctggttgatttagcgggaacgtcaggcaacaaatattataaatattatatccctggggttggcacaccttttccagaagttaatgaccttgattacagtacgccaggtctggcttttgcgacctatggtgaagagcgcgtcaactgggggctgctacggattattgacgcactcagaagaacatcgggtttaaccgagatttctgatgccgagtgttatgccgccgtcaacaggatgacatcaaatctgggatcggacgggccagacaggcgttataccgtttttaatgaatttttaaaggccgcggatcttgcacctaaactgacacaggcagttacacaaccagaaccagggaaacctaagctattaggcattaagttatatgtctatggtttctcccgcggtgcagcaagtgcgcgagcatttgtgaactggctatctgagttgctgcccgggggcaggagaaagggaagtaaacctgagctttgtctgaagtcgggtgacgtaaaaatccgcttaattattgaatttcttggcctactcgacactgtggcatccgttggcattgcaaatattgcgccattcgcagaagggcatatgggctgggctgatgacaccatggaattaccggataatgggctgatcaaaaaatgcactcacctcgtttcatcccacgaacaaagactttgtttcccgctggattcaatttgccgcagcgacggaacttacccaagttatgctacggaagtggtttatcctggaatgcactccgatattggtgggggatatcccccgggagatcaaggaaaagggaaggtgcgaataagcagatcatttcttcccaagctgactcgctga

SEQ ID NO: 246741 - DNA, 423 bp, Klebsiella pneumoniae; identical to SEQ ID NO: 183975

SEQ ID NO: 246742 - DNA, 615 bp, Klebsiella pneumoniae; identical to SEQ ID NO: 128200

SEQ ID NO: 246743 - DNA, 303 bp, Klebsiella pneumoniae; identical to SEQ ID NO: 96991

SEQ ID NO: 246744 - DNA, 225 bp, Klebsiella pneumoniae
atgaataaggttttttcactgtccgttctgtctgccgctattctggccccggccgcgagttttgccgccgagggggatgttgacctctccagtctcactgactctttttctgtcgcacctgtgactactggcgtattggcgattgctggagccctgctgggcctgtacgccatgatgcgaggtgcgaaaatcattttggccctcgttcgtggtggtagcaactaa

SEQ ID NO: 246745 - DNA, 207 bp, Klebsiella pneumoniae
atgcgcaagcgctgcctgcccggaaagatgcagcagcgccgagcgcagcgagacctcgaacatctgaccgtgcgtcaggccggggtagcgccagaaggctacggtcaaccctttactggcaagctgctgttgggtttgacgcaacacctcaagcgaggcctcgtgcccggacggctctccacgggctttaccgtcaccctcgagtag

SEQ ID NO: 246746 - DNA, 456 bp, Klebsiella pneumoniae
atgaacatcgaaacagtaaacgagctcattcggtcgctggagtcggctggcgagctgtcaatcagagagcagaagttcatgaatcttgctaaagagtttcgcatttgcagcgcttcactggatgccgccataaaaaccgggaatatgctggcagaccaaaattctcagctggctgcggagaatgtggcgctgaagaatttctgcaaaaacgctgcatttgatgccgactatgaagccgaacttggcatggaaaggggcgggtttactgacgctctcaacaatatcgaaacccccgccaccgatcgcatcgtagccgggattaaggctgatggggtggaggagttcgtatccaacaccgtgcataagatttttgatgaaagcgaagcagtatcagctttggcttacctttccttggctaattcacacgtgaagcaactgcgcgagggggccaaatga

SEQ ID NO: 246747 - DNA, 843 bp, Klebsiella pneumoniae
atgtcgaacggattagctatcaacattcccacgtcattcagtcgtgttttaaccgatttaagttttatccatgaagtacaatctgactctctggcttacacaggactctatgggcctgataaagcgagcagcattattaatgctactaccggagggttatcttctaaaatcttactggtagaagtcagaaatggtgaccgcgtggcctacgggaagggatttttttccataacaggtacgggtgctgacacgtccggcggaacgggcgtacgctctcgagtaaacttaacagacctcgatagaattggctttccgtgttcttttgttactgcatttcgtaacattaagaaagtacgagaaaccgttactccaacccggcgactgtacccaattgcatctttttattacgactcgacagtgacgaaaggatctcctttcctcaccattgctgccggaatagccgatgacggcacgcattttatcgctgcgtattcaggttctatagagtcagtctctgacgcagacgctcgcctctgttatgttgacgtcgactggaccgctaccgataagctcatcacagctggtatttcacgcgcagcgaatgggactgttaatcttgcggtgataatcgacggcgtggtgaaaactgcatcttatggtttcccggtccagaccgatgtggcagtaagtgacgcatatgttcttgtcggctcacaaaacaaacatactctagactctggcgagttcatggctggccaattctggtacaacaaaacattgacactgtctgagcttcaacagcaaatcaacgtcacgcatctgaaagcctccgcacgactttaa

SEQ ID NO: 246748 - DNA, 1707 bp, Klebsiella pneumoniae
atggctggatttgacccggcgctggggagcacttcccccgcggtgttgctcgataatgtcacgcgtcttgacgaactggtgaacgggccgccggccgatgtccccgatcgcgctggcgatccactttattcgtggcgccagattatggcgatggtcgccgcggcaattgtcgaagcgcaaaacagcatcaccgcaattggcctgccgtttaccaccctgcccgaagcacagaccgcagcagatgaagggaaaattcccgaaggagctgtgacctgggtgcgcaatattgaagacatcgagctggccgacgagtacaaaaatattgccgggacgctaacggcaaccgggagaaagttgccgtctcagcagtccatagataaatattttcaggttctcccggacggtacatttgcgttgatggccgataacgggatgatcctggccattgataaaaacgcggtaacgcgcgctgtttctcttgctgtacaggacctgatctctgtcggtggtgcttcatttcagatttatcaaaatgccaatggtttatttgtagttggagataacggcattccgctggctcttgggcctgatggtattctgcgcatggttgctgcgaatattgggggtgttggttttgaaacagatacaatgggcgtccccgtgttgtttcgggcaccgaatggtattgcgggggctgttgatctggacggtaactggcgtttcccaggggtggttacagatacactaattgtcggcgggaaaaaaattactggtgatgggggtggttccatgggcacggaatttacacgcagcgatcgatacgttgacgctgacggtaatattatgcccgtgataaccgatacacttaaaatgagtgcctggggatcctcatcattacttcgttacggcgctgacgccgctttctctgcgatggctagcagtctgggcgtaactaactggaataaccaggggcagggcggagaaacgtcatttcagattgctgcacgattcggtagtgtccctttctcgttgattttccccgataatacaatcccagccagcggcgctgtcggtgttacgtgtacgcaactgccgagcaattttagaaactcctacctcaaagcgtattccggtactgttggcggggtctcggggactctgtcctggtcatcatctttatcttcattgctgttcacaagggctacctccgggtcacctgtggtattaactggcgccactgacttcataccgacgctgcctgaatcttaccgtgatggagtggtcctgctgtggatgtataaaaacgatataaccaatcctgaatttagcgcggaggttacattcagtaatgttgtaaaaacgtttgcgcatctatcaacgctggcgaaacgttgtctcgtaattggtatttttaacgattcatcatactcaaatacagattatttgaaccgggtggcaacgctcaattcaatgatgagagctaaattcggatatttgtactgtgatacgcaggattatttgtgcagcgcgcaggtgtgggttgatacaggtataacgcccacagaacaggacctggctatgcaggctgctggatataaggcgacatctctctcgggagacacactgcatttaaatacggcagctagcaaagcaataaccgaccacgtcattaaaccaaaattaatcagcctgggctggtacaaatag

SEQ ID NO: 246749 - DNA, 138 bp, Klebsiella pneumoniae
atgcggcagcacttttcgattacctctcttcaccacgtgctccttgctttaaggatgaaaagttacattcactcgctgaggcagaggtcgacgttgctaaacgagcctctgacccaaaacagtttgccgtttgtctaa

SEQ ID NO: 246750 - DNA, 246 bp, Klebsiella pneumoniae; identical to SEQ ID NO: 237128

SEQ ID NO: 246751 - DNA, 471 bp, Klebsiella pneumoniae
atgggaacagacgccacattaaatgaatattttttcagattttacaaatcatttcttttttgcacttcaatagttaacaaaaaaacaggagaggaaatcagggctactgatacaatgtgcaacatctacatttatatgttagatcaatacctctcctataaaaagctcggaaaaactttttacgaaaatcagttagatatttgtaaaaaactccgcaaaatggatcccaaaacttttagatccaactatgaaaaactccgcgcgcttgacctcgtgactcacgtagaacaccaatcgtgtggcagatataaatcctacgaatacacagtaacaacaccagaagaagcggaaggctggctacagttcaaatatgcatttgataccagcaaagaacaaaaaccggaatcacctacgatacagcactctgttgtatcagatgatgatggtgatatcccatcattttcaaaataa

SEQ ID NO: 246752 - DNA, 162 bp, Klebsiella pneumoniae
gtgacgttcgctgatggcatgcgcaaggtgggattcggcgagctgccagcctatccctgcggaggcacccacgtcgcccgtctggcggagctgggcgacattgtcattagtcagattaagatgaagaaggggcagctggtggtcagctacaccctggcgtaa

SEQ ID NO: 246753 - DNA, 2085 bp, Klebsiella pneumoniae
gtgagtgatttcccggaggaggcacccgaaaaggtagctattgctgaaggttacggtacggctgtttccgtttctctgctcagtgatgcctggacgctggcggcgctgtctaaaactaacctcaaagcagcggcagaagcggtgcgggataggtggcctgaagcgcagattattattgccggtgataatgattttatggacggtaagcctaatgaagggcgggaagtggcaatcaaggcggcgcttgctgttaaaggttgggtcagtatccctccgggcagagcaaaagcagactgggatgattatcgccgtgattttggtgtacagcgggcgcgggagtcctttgctgaagaaatgtttaatccgggtgatacggaaacccgtctgcctcctggcttcaggctgacgaaagaatttctgtggtgtgagcgtacccgtaatgacggaagcgaaagcggccaggtacagcagataaagatttgcagcccgctgaaagtgacagcgattacctgcgacgctgatgggggcaacttcgggcgtcttcttgagtgggatgattcaaacggctctcgtcacgaatgggccatgcccatgacggtactggctggtgcgggtcaggatctgcgcgaggtactgcttgaaaatggccttcattttatcagcgttaatggttctgcccgagggttattgatggagtatatcgccacctgtcgaccggtgcgtaaagtcacctgtgtggagaaaacgggctggtacggtggctcttacgtgctcaacggcgaggtgattggcggtgagactggatcggtcatttttcaggcggcccggtcatcaaaaaatgatttcagggtcagtggcgacactcgcgagtggattaagcatgttggccgttactgtgcaggtaactcccgcctggttttttgcgtgagtctggcgtttgccgctcccctgctgacgttgctggggatgggcgggggtgggtatcacctcaaaggtgaatccaccgatggtaaaaccaccacaatgaaggttgctgcttccgtctgtggtgggcccgattattggaaaacgtggcgtgcgacggggaacgcgctggagggaatagcgctacgccgtaatgacgccgtgctgatgctcgacgagatcagcgaggttgacggtaaagaggccagccgtattgcttacatgctgggtaacggccagggtaaggcaagggcgagggtggatggaagcccgcgtgaacaggcgcagtggacgcttttatttctctccactggcgaggtctccattgccgagcatgcagccgaggcgggcgaacgtcgcaccggtgccggggttggggtcaggatggtgcagatccccagcaataccggccagttcggtgcctttgaggaactacacggattcggcgggggtaaagcctttgctgagcaccttgaacaggcgagcaggcaatatcatggcgcggtattccgcgactggctgcgctggctgacagctaacctcaacgcggtaacggagcgggccaggggcttgcgcaaaaaatatgagaaaacacttctgcctgaaaatgctggtaatcaggtggggcgtgtagttgaccgttttgctctgctggctgttgcgggtgagctggcaactgaagctggtataaccggctgggaagccggcgaggctgagtacgcagccagaaaatgtcttgatgcgtggatacaggatcgcggacacaccgccaaccaggaagatgccgatgcgctagaaaaagtgcgacgatttatcaccggtaatcagtacacccgctttgctgaatggacggaagatgaaaagaaccggcccgctaatatggtggggtttcgccgtgtcactaaaggcaataacaatacggaaacggacaccaaatattacatcctacccagtggctggaaagagatctgcggtacgtctgatacggttaaaactgcccgcttatgtagcgaggcgggatggctggatacggatgatggaaagcggctccagtgcaaggtaaggttgccggagatcggttccaaatgggtatatgtgtttaaaagtgatgttgtcggttaa

SEQ ID NO: 246754 - DNA, 180 bp, Klebsiella pneumoniae
atgtcggttaaaaaaataagtaatgaacgatacaaggtagatatcaggcctcacggcgtagccgggcgtcgtatacagagaattttcaataagaaatcagatgccgtcgcttttgaacggtatgttatcagccacatgaatgacaaacattggctcgaaaaaccaacagatcacaggtga

SEQ ID NO: 246755 - DNA, 285 bp, Klebsiella pneumoniae
atgagttatgtcaaaaccaagcatgctggaaggctctttgatgttgattactccgaataccgcaaaatactcaaagcgataaaaccagatttaccgaaaggacaggcggtacatgtgttgcgtcatacatttagcgctcattttatgatgaatggcggtaacattttgaccctgaacaaaatacttggtcactctaagattcagcaaactatgacctatgcgcatttttcaccagattacttaattgatgccgtaagatttaacccagtcgcaaccctggtttga

SEQ ID NO: 246756 - DNA, 693 bp, Klebsiella pneumoniae
atgttgcatgtttatatttttcatgggtttaaaagtgactcgtcagcaatgaaaagattttttttgtttgaggaggagataagggagggtatagctaaaatcaccgggataaagccaaggtcaatagagaattgtgctttttataatcgcacatggggcgttatgaaaaaaagcagtaaattatcctatttatacaatgtgctatttaatagtgaaacttacccgcttgaggtgcatgaagagtgggataaagcaattgaaacaatagaagatgattacagcagcattatagccaatagaattaactccatgagtgagaacgaccacgtattgtttgttggtcactcgatgggtacatatttaattgccgaggttattcctaaaataaaaaatgatatcacgctgaatttgttttttatgggagggattgtgagtaagaatttatgtgagttattatttgatgatgaaaggataaggtgcgtggtgaatttattctcaaggtctgatgttcctcttgagcgatttttagaagaaatgtctggtttttttgatgagccagttggaatcaattctattgagcataaaaaagcaataaataaaggcttatccatctcacattcaggttatttagaggacactgaagtaattgatatgtacaggatgtttgtggcacaacttgttcgttatcaataa

SEQ ID NO: 246757 - DNA, 267 bp, Klebsiella pneumoniae
atgtttacctgtcctcattgcgggcataccgcccacacgcgtaccagccgccgcctcagtgatttcactgtgcgacagtaccatcagtgccagaaccttgaatgcagtgcagcatttaccacgctgaacgcttacgaagggctcatcccccaacgaaggcgcagagacattgccggacatgaagcggcacaaaaaacaccgacgcctgacagagaagggggcgggagagccttcaagcccggtgccgaccctgaggcgatcccttaa

SEQ ID NO: 246758 - DNA, 252 bp, Klebsiella pneumoniae
atgaaaagcccagccagaaataaaaaatccacactgcgcgccctgcgtattccgcatgagatcgatcaggaaatctgccacgcgtcagcagtgggtgctgttagttattccgcctgcctggttgaactgattcgcatggggctgaagaacgctcacgcagcgacaccttacggggtatctgaacgtgagcgggtcgctgaagatttgctgtcgaggattaagggatcgcctcagggtcggcaccgggcttga

SEQ ID NO: 246759 - DNA, 735 bp, Klebsiella pneumoniae
atgggcattgacaaaaaaaccaccgtactggcggaaaatatcgaagaaaaacataaggatttcgaagagaagcgcgccattctcattgaaaagcaaaccacgctgaaaaacctgctggctacccgtgagagtctgaaagaagaagctcatcaccagtcgggtgagtgggagcgtaacctcctagcgtctggtggagttgaaacggaggcatccgataccaccacgctcctttccgggatggcgatgcaaaaactggagcgcattaacccactgattgagaaagctcaggctgaggtgattaccgcccggtttgatgcagggaaagccgcgcttgaatatatcaaccagcataaggagctgcgttctctggttattgatcctgagtgccgggcgttactcggtagtctgcggcccgtgctggaaattgcctgggggcttcattgcatgacgcagggtatggagtatgaatttgataacatgctgaaagacgtgctcaatgacgtcaaaaagaacgacaattcacaccctgccgagcagcatcttcagtccgcctccggggatgccgaaacgccactttcgttgttccctggcccggtaccctccgtgatgaaagagattattcgccggtcgccttccgccgcgcaaatggctatggcgcgtaccagtccgcagaaaatgcaggcgctggccgatggccgcgagcggtgtaaaggcctgagccaagggggggcttaa

SEQ ID NO: 246760 - DNA, 1287 bp, Klebsiella pneumoniae
atgaatccactcgatcgcgcccgtgcgctcttttacaaaaatatcgaggcgatgaaaaccgcctccccgaccattcgggccgaactggaacgggagaacaagaagctgggggaggagatttccagactggccaacgacgcagagtttcaggcccgcaatgagggtaacagcaacaatgcctctccgcattttttctccgccagcgagcccgggcgactgactccgccggccgctgtcatcccgggcgatcaggatcagcgctcaatgttgacggtgattggtaatattctgacggcggtgagccgggatgatgccgtacagcttggctccgttccgggtaaagaggctattgccatctacagcgaggtcacgcccaccccggcgctgacgggtgagctggcggccagccacagcacggattttctgacaaaaattaatgtcctccccgttaccgatctggaaggggagcgggttcttgtcggcaccggcggccctctggctcatatcaataattcagggcgccgcaatccgcagaatgcggcatcactcgcgccgcatcgctaccagtgcagaaaggtgaatctcgacgtcagtattccttatgccgaccttgagtcatgggcgacggttgaaaattatcctgaactggtaaaggaggccattgaccgccagagagcactagatcgccttctggttggttttaatggcacccattacgccgatccttccgacgccagcgcttatccaaagcgccaggattgcggggtcggctggctggagaaataccgacaggaagcgcctcaacgagttatcagcggcctttcggttgctggccgtgatgagagcaacaaaatcattgcgtcaggggattacggcaccgttgacgcccttgtgctggatggctggcagtcagcgatagcggagcagtacaggaacggtctggtgtcaatttgtagtgctgagacgctgtttcgcaaggagtggccttttgtacgtcatctctcgccagaccggccaaactacgagcggctgattaatgacattatgctcaagaaccccactattggcgggcttccggccgttgtggtgccgttctttcccgacgatgctgtatgggtgacgcccctaagtaatatatcgctgtactggcaaaagaacggtgtcaggaagcaggcgaaagacgagccggaatataaccgcctggcgatgtatgaatcgcgcaatgatgcctacatggtggaaaactacgaggcaggatgcctgattgacggtatcgactggcgctaa

SEQ ID NO: 246761 - DNA, 450 bp, Klebsiella pneumoniae
atgattgatgtgaatctggatttttccgggctgcaggatatcgcccgcgatctgcaaacgctcagcaaggccgaaaataataaagttctccgggattcgacccgtgctggcgccgaattgcttcgccaggaggttattgatcgtgctcctgagaaaaccggaaaactgaagaaaaacgttgttgtcgtcacccagaaaagccgccgtcgtggtgaaatctcatcgggggtgcatattcgtggcgttaacccgcgaacggggaacagcgacaacaccatgaaggccagcaacaagcggaatgcgttttactggcgcttcgtggagctgggaacatctacggcgccagcacatccgtttgttcgtcctgcctttgatacccgcatggaagaggctgcgcaggtggcgatgcagcggatgaatcaggctatcgatgaggtgctggctaaatga

SEQ ID NO: 246762 - DNA, 189 bp, Klebsiella pneumoniae
atgccggtatgcacgatttcaatagaagtaaaaagccgctggtggctgccgctctacctcaaaacgctgatgctattctgccagatgattcagcgagagcctgattacggaaagacagccgcactcatcactaaacacggtatcagccagaaagcgaaggccgaaccagtgcgaaagaatacggagtaa

SEQ ID NO: 246763 - DNA, 741 bp, Klebsiella pneumoniae
atgattgagttgttaacatgcggcttgttctcacattccaaagatactcgacgtgagaatcaagacaccattttgccgccggtgtttataaacgatggtttattaatggctgtcgcggatggagttggttcttatgatggcgcacagtatgcgtcgcagtcagcaatcaaagaactcccagatcttgtaacaaaaggcaacctccagaacatgacagatttgtttatgtcgttgaaggaaggcatttcatccctttcatccgaaaacataaagttttcccatgctgctacaaccctaacattttgctttatcgatgataacggcctacacataggacatgtcggagattgcagattgtacgtcaaggatggatcaaggctgaaacaggttactaaagaccacacccagcaccagaaattactcgacgaaaaaatttatagcaaaaatgagcttaaatttttgccgggtaaaaatactctgacaacggctatagcaaacgccattccgttagattttcaacagacattcatacctcatgaagaactgttggacgagtatgatgaatgctgtgtttacttaatgtccgatggcgctcatgctttttgggataagcggccaagattttcagtgaatacaatttccaatcctgcaagctttgcagcaagcctgtacaagcgtattgagcgcaatgggccaattgatgaccactccttgattgctatccgatatagagttttgtga

SEQ ID NO: 246764 - DNA, 756 bp, Klebsiella pneumoniae
atggacgaaacgcatgggaactatgtaataaaaccattaaaaagaatcgggcagggcggctttggatatgtcgaaaaagtcgagttacaaaactctgatggtgggatttgtggtatctatgcacgaaaggtttttgctccgcaggacccctcttatcgtgatgaatttattcgtagatttgaacgtgaggttacctatcaagccgattgctcacatacaaacattgtaccgatttatatccatcatcttgaaggcgagaccccttggttcgttatggatcttgccgaaagcgaccttgtagcagagctaggttctggccagtttacgatcagggataagctgagcgctatcaagatgattctacaaggggtggcatatcttcatgaccacgattactggcaccgggatctgaaaccacaaaacgtcttaaggtttgctgatggcacctataaaatttcagatttcggattggtgaagaacgctgataagaaggcagaatctgaagttataactaaggttgcctcgataatgggaactgaacgatacatggcacctgaggtctttgctgggatttattctgagaaaacagatatttatgctctaggtgttttgattgaagatatggagttgagtgcggttcctgggattgatgatctgattacaaaaagcactgcgagaaaaccaaccaagcgacatgctaccgttcatgaaatgctctatgacttggacaaaatagttaaagggaatggattatga

SEQ ID NO: 246765 - DNA, 675 bp, Klebsiella pneumoniae
atgaataactcgctgatggcgaccgggtcgtcggtgcttgaacaaagagccgccgaagcgtgtgccgtcatcagtgatttatctgtgccgctgcgtgatttgtggaacccctggcgatgtcccgtaaagtttctgccgtatctggcgtgggcgttttctgtcgaccgctgggaagaaacctggtcagaagcagagaaacgccaggcggtcagtgatgctttctggatccaccaacgcaaaggcaccgtcgccgccgtccggcgtgtgattgaaacgctgggctacagcatgacgctccaggaatggtgggaggtggccgaccctgccgggacattccggctggcgattgagctcaatgatatcggcatcactgagcagatgataaaagagcttgaacgaattatcggcgacgcaaaaccagtaagccgccatatttcacaattaactctttccgtcggtacgacaggggcggcattcattggcgcggcgattgtggatggtgaggtgataacagtatatccggcgggatatataccggatgacagtctttattacgacggttccgcactttatgacggaaatcattatttcaaccagccagaaaataaaccggccgaaaccattcattacgacggccgggcgcattatgacggcagccattattacggggagtaa

SEQ ID NO: 246766 - DNA, 267 bp, Klebsiella pneumoniae
atgctggagataatcaaccacggcgcgactgacatcgttaaacgccacctccatcggcatatccatggcctggtagatcttctcgccaatcaggcggttggcaacgccggcaatgctgctggcggtcgaataaccgtgggcgattatcagcgctttcacttttccgccgctggtcgcatcgatagcattactgacaatggcggtaatcgccagacggtcaatcgtatcgatgagcagatcgtatttattattgacgacatccagtag

SEQ ID NO: 246767 - DNA, 1077 bp, Klebsiella pneumoniae
gtgagcggaaaatatatcgccattttaaccgcatacggcgcatccagattcgcccaggcggcgcagtccggtgaccgggtcgattttgctgaaatggctgtgggcgatggtggcggtacagtgccggagcctgacgcgttaagcaccggactggttaatgaggtttatcgcgcgtcgctgaatcgcgttgttatcgctgaccaggccgcaaatgtgatccgcacggaaatgattatgctaccgcaggtgggcggattctggttgcgtgaagcggcgttgtatgacggatccgggcagtgcctggcggttgccagcctgccaccatcgtataaacccatgctggcagagggatcggggaggctccaggccgttaatatatggcttgcggtcagcagtaccgtcagtgtggagctgaaagccgatccatcagtcatactggcgtcagtcgctgaggtcaataaagccaaagatgaggctaaggactataccgaccaggtggccggagacctggacgaaagtattcagcgggctatcgctgccgccatcaccgacgcaaagcgtgacttttgggaagatgacaacccgatcggcacggtcagattttacagccagaatgtcaatcctaatgacctgtatccgtggtcagagtgggtctacaccggcgaaaacaaaacgatccgcgtggcgaaagcagatggctcgaacgtcgggacgaccggcggtagcgataccgtcacgctccagcgggataacttgcccgctgtacagattgacgtgagcggcgaaaccagcgagcaggggcagcaggagctgacgacatcgggcaacggaaggcaccggcacagggcaggtgacggggcgccgggggatacctggaaagaagccacacacggaacggataaccagaaatatacggggtggaactataccgactatgcagaagaccatcagcatggcgtcacgatcccgccgcacaaacactcgaccagcggcaaaacagccagccttggcgagggcaaatcgttcagcgtggttgaagctcacacactgctgatgtgctggagccgcgttgcctga

SEQ ID NO: 246768 - DNA, 246 bp, Klebsiella pneumoniae; identical to SEQ ID NO: 246430

SEQ ID NO: 246769 - DNA, 792 bp, Klebsiella pneumoniae
atgaccaatgcggagtggtctgcggttcagatgcagtgttacgcgctgggtttcaaccccagggggaataactattacgggcgggacgcaacagacagcacgcaatacggccgccgggtggatggcgtcagcgcgacaggtggcgtaacgaccggtacgccggtgatttacaccggctcgggcccggtgtcgttccggcacaataacgcatacaacggcatcagcgatgtgaacggaaactacaacatgctgacgcccgacgtgcgcctgtgcggggccaccggtgagctgcatatttttgtcaacaacaatgctgcaatgagttctgccgatttgtcagccacttcggcgggctggaaggcaatcaatgcggtcaccggtgagttaatggacctttcatacaccggcaccccggccgtggattttgtttcgaatctggcgaacagcgtgaaggtactcaatgcatcagcggtgggtaataactacacgctcaccgccactgacggcgctgcgttttcatccatggccaacgctggcgcgatcccggtttcggcaacggcactggcggtactgaaaaagtacggcctttatccgctggtagccaatgccgccacgctgggcggcgacaaaattgtgatttccgccacccccgcaacggctgcgaccgaacgcatgttgcgtcgccagggatcctatacggatggcgcactcgccggtgtctggatggctggttttaacggtgttcgtgctgcgagcggagtatcggcgtttcgtgtggcgtattacgcataa

SEQ ID NO: 246770 - DNA, 2970 bp, Klebsiella pneumoniae
atgccccgccgttcaatcctctccgccgcagagcgcgacagtctcttggcgttgcccgatacccaagacgaactcatccggctctacacgttcagcgaacccgacctgtcactaatccgccagcggcgcggtgacgccaaccgcctgggtgtcgcggtgcaattatgcttattgcgctttcccggtcagggcctgctgcccgacgctgcggtgccgatgcccctgctgcaatggatcggacggcaactgcgcatcgatccatcgtgctggccacagtatgcagagagggaagaaacccggcgcgagcatctgcttgagctgcgtgcatatttgggcatggagccgttcggcctggcgcactatcggcaggctgtccatgccgcgaccgagttggccttgcaaaccgacaagggcatcatgctggccaacagtgttctcgacgacctgcggcaccgacacgtcatcttgccgacgctggatgttgtcgagcgcgtctgtgccgaggcgatcacccgcgccaaccggcaaatctacgaaaccttgtccgaaccgctatcggacgcgcatcgtcgccgccttgacgatctgctcaaacgccgggacaacggcaaaacgacctggctggcctggctgcgccagtcacccgtcaagcccaattcgcggcacatgctcgaacacatcgaacgcctcaaggcatggcaggcgctcgacctgccttccggcgtcgagcggtcggtgcaccagaatcgcctgctcaagatcgcccgcgagggtggccagatgacacccgccgacctggccaagttcgaggcgcagcggcgctacgccaccctggtcgcgctcgccatcgagggcatggccacggtcaccgacgaaatcatcgacttgcacgaccgcatcctgggcaagctgttcaacgccgccaagaacaagcatcagcagcagtttcaggcatccggcaaggcgatcaacgccaaggtgcggctgttcgggcgcatcggccaggcgctgatcgaggccaagcaagcgggccgcgatccgttcgccgccatcgagggcgtactatcctgggatgctttcgccgaaaatgtcaccgaagcgcagaagctcgcgcagcccgaggacttcgatttcctgcaccgcatcggcgagagctacgccacgttacgccggtacgcgccggaattcctcgccgtgctcaagctgcgggctgcgcccgctgccaaggatgtgctggacgccatcgaggtgctgcgcggcatgaacagcgacaacgcacgcaaggtgcctgccgatgcgccgaccgacttcatcaagccgcgctggcagaagctggtgatgaccgatgccggcatcgaccggcgctactacgagttgtgcgcactgtcggaactgaagaacgcgctgcgctccggcgacatctgggtgcaaggctcacgccagttcaaggatttcgaggactacctggtaccgcctgtgaaattcgccagcctcaagctggccagcgaactgccgctggctgtggtcaccaactgcgaccagtacctgcatgaccggctgacgctgctagaaacacagcttgcgaccgtcaaccgcatggcggcggccaacgacctgccggacgccatcatcaccgagtctggcctgaagatcacgcctctggatgcggcggtgcctgacaccgcgcaggcgctgatcgaccagaccgcgatgatcctgccgcacatcaagatcaccgaactgcttatggaagtggatgaatggacgggcttcacccgccactttacgcacctgaaatcgggcgacctggccaaggacaagaacctgctgctgaccaccatactggccgacgcgatcaatctcggcctgaccaagatggccgagtcctgtcccggcacaacgtatgccaagctcgcctggctacaagcctggcatacccgcgatgaaacctattcgacggcgctggccgaattggtgaacgcgcagttccggcatcccttcgccgagcattggggtgacggcaccacgtcatcgtcggacggccagaacttccgcaccggcagcaaggccgagagcaccgggcacatcaacccgaaatatggcagcagcccagggcggacgttttacacgcacatctccgaccagtacgcgccgttccacaccaaggtcgtgaacgtcggcgtgcgcgactcgacctacgtgctcgacggcctgctgtaccacgagtccgacctgcgcatcgaggagcactacaccgacacggcgggcttcaccgatcatgtctttgccctcatgcatctgctgggcttccgcttcgcgccgcgcatccgcgccctgggcgacaccaagctgttcatccctaagggtgaagccagttacgacgcactcagaccgacgattagcagcgacaagttgaacatcaaggctattcgtgcccattgggatgaaatcctgcgcctggctacctcgatcaaacagggcacggtgacggcctcgctgatgttgcgcaagctcggcagctacccgcgccagaacggcctggccgttgcgctgcgcgagctggggcgcatcgagcgcacgctgttcatcttggactggctgcaaagcgtggaactacgccgtcgtgtgcatgccggattgaacaagggcgaagcccgcaatgcgctggccagggcggtgttcttcaaccggctgggcgaaatccgcgaccgcagtttcgagcagcagcgctaccgggccagtggcctcaacctggtgacggcggccatcgtgctgtggaacacggtctacctggagcgcgccgcgaatgctttgcgcggccacggccatggtgtcgatgaagggctgttgcagtacctgtcgccgctgggttgggagcatatcaacctgaccggcgattacctctggcgcagtagctccaaagtaggcgtggggaaattccgaccgctacgtccgctctctgggtcttag

SEQ ID NO: 246771 - DNA, 1005 bp, Klebsiella pneumoniae
atggaaaacattgcgctcattggtatcgatctgggtaaaaactctttccatattcattgccaggatcgtcgcgggaaggctgtttacagtaaaaaatttacccggccaaagttgatcgaatttttggcgacatgccccgctacaaccatcgcaatggaagcctgtggcggttctcactttatggcacgcaagttggaagagttggggcattccccaaagctgatatcaccacaatttgtccgcccgttcgttaaaagcaataaaaacgactttgtcgacgccgaagctatttgtgaagctgcatcgcgtccgtctatgcgttttgtgcagcccagaacggaatctcagcaggcaatgcgggctctgcatcgtgtccgtgaatccctggttcaggataaggtaaaaacaaccaatcaaatgcatgcttttctgctggaatttggcattagcgttccccgaggagctgccgttattagccgactgagtaccattcttgaggataatagtttgcctctttacctcagccagttattgctgaaattacaacagcattatcactatcttgttgagcagattaaagatttggaatcccagttgaaacgaaagttggacgaagatgaggttggacagcgcttgctgagcattccctgcgtcggaacactgacagcgagtactatttcaactgagattggcgacgggaagcagtacgccagcagccgtgactttgcggcggcaacagggcttgtacctcggcagtacagcacgggaggtaggacgacattgctgggaattagtaagcgaggtaataaaaagatccgaactttgttggttcaatgtgccagggtattcatacaaaaactggaacaccagtctggcaaattggccgattgggtcagggatttactgtgccggaaaagcaactttgtcgtcacttgtgctctggcaaacaagctggccagaatagcctgggccctaacggcacgacagcaaacttatgtagcataa

SEQ ID NO: 246772 - DNA, 213 bp, Klebsiella pneumoniae
atgaacgcaaacgccccgaacactgccagttgcaccacctgctgcgtatgctgcaaagaaattccgctcgatgccgccttcaccccggaaggcgcggaatacgtcgaacatttctgcgggctggattgctatgaggggtcacctcagaaaacggaatctatggtcactcccgtttttgcaacaccgattttgacgacaagttggcttgcttga

SEQ ID NO: 246773 - DNA, 249 bp, Klebsiella pneumoniae
atgattggactcatgcccttgcatggcgctggtgagatccggagcggggttatactcagcacggccggtgactattgcgtaacggaaaacttccccgcagcgctgcctaacttttttggccttttctgtagcgccgcgcccctcaatgcgccgcagcacattcaacagttcaagcggtttgatatcggctattggttttttgccaatgtaagggaacacatctttgttgaaagcctcaaggatatctga

SEQ ID NO: 246774 - DNA, 513 bp, Klebsiella pneumoniae
atggtaagcaaagatagttttcttaagaaattaaaccggaattccgaagcgcggctttcagatgaacaaaaaatagaagccgcaaagagagaaatgatagataaagccacgcatgactcaagtttttacgcatcggaagtaaagagtctagtttctaatgtggaaaaatggatctctgagtcatcaatacaaatagtaaaacaagagatagttgtaagtgagtttttgaaggataacatcacgccggtaagttatagagttttacaatttgctcttgtttatgaaggtttaaatttaatctttactccccaaggttgtctcagatttcaaaatagtggattaattgatatttgtgttgactccccgaacctaaccaaagtatatgaaaatatagctttgttagttgattcggaatttaagtatcagtggttcttttctgatgataaaaatacttttattgtgaatggagatacatttagggattttgtgctcaaaacaattgggattgagtga

SEQ ID NO: 246775 - DNA, 297 bp, Klebsiella pneumoniae
atgcagttcctgatggcgctggcgctccggatgggccgcacgctgggcgaactgcgacaaaccatgacggtcggcgaattcaggatgtgggctgaatatgatcgtatcagcccgatcggtgatatccgtggcgatattctcaatgctcagctggtatcagcggtttacggggcgcagggcggtaaagtcaccattgaagaggctcagcttcagtggagtacagaagaagatgaggcaagcgacagcggcgatccatttgccgggttagaagccgctttgctcgccgcttcggaataa

SEQ ID NO: 246776 - DNA, 306 bp, Klebsiella pneumoniae
atgcctggcatgcagttcctgatggcgctggcgctccggatgggccgcacgctgggcgaactgcgacaaacaatgacggttggcgaattcaggatgtgggctgagtacgaccgtatcagcccaatcggcgatattcgcggcgatatcctcaatgctcagctggtatctgcggtttacggagcgcagggcggtaaagtcaccattgaagatgctcagcttcagtggagcacagaagagattgaggtaaacgacggcggcgatccctttgcaggcttggaggccgctttgctcgcagcatcagtttga

SEQ ID NO: 246777 - DNA, 414 bp, Klebsiella pneumoniae
atggcagatatcgtttctggtttagcagcactaaaaacagcctttgatttagccaaagatcttaaaaatgcgactagcgcatataatgatgctgagatgaggcttaagtttagcgagctttattcagcgttgtctaatgctaagatcgacctagctgatgctcagattgaaatgttcgagatgaaacagaaaattgaagagttgcaagagaaactcaacgcttctgatgaacttgagtttcgcgattctgtatattggcgagcaaatcctattgaaggtaagccaaatggacctttttgccccaaatgctatgaagggccagggaaaaaactttcttccatgagtagtgttagcggccattttagtttcgccggcaaatacaaatgtaatacctgtgctgcatacgttaaatag

SEQ ID NO: 246778 - DNA, 897 bp, Klebsiella pneumoniae
atgaaaatacacttggcgttcgttgtttttagtggctttttaatatctggttgtgatggtgacaaggatataaacaaagtaaaatcttatgttttttctgatatagataactctagggacttgggtacggtaatgtctcatagagatgcttgtaagagtggggagtggcatagtgaggttgatagatcaggcagaaagatagttacatactcatgtgttcttgatcatgaaatgataaataacatgttatccgcagaactagaaagaacaaggaatgatcagatattaaaatactcaaaagagattgaacaactggataggtatgacagtattgtcaaggatgcatatggcgccgcattatctaatctagcggctattcaatccgagtatgatgagcttaagaaccctgacggatcgatctccccagagctgaggtcgaagattgatctaatgaaaagtgctgattctgaatcattaatggagcggcgagcagggttgccatatgatgctgatgacgcagttgcgtcgttatcatctgtttttgagtatgttgatctttattcagggcaagatatagaaaaggcaaaaggaattttatcaaattcatataatgattatattaaaaaatcatcatccgagcgtgatagaaatattgggattataaacaaggctaaaggttctggggtgtcttttggtttgaaatcagctggtagtgatatttatttctcatccaacccatcatcagagcaacctgtttcttttgttgggatgaaatacacgttcaataataacggaagggaaacttcgacgactaatgggtctttggtttatgtttataatggccgtgagatgagttatatcaaggcatttgcaactgcctatttaattaataggtag

SEQ ID NO: 246779 - DNA, 552 bp, Klebsiella pneumoniae
gtgctggacttccaccaggacgccgataacccacactggggaatgcacaaagcagtttatgactgtcctttctctgatgactggaaagcatgggtggggtctgatggtaacaagatgaatcagatcgacttcgctgagtttctggaaaacaacatccagaacatcgcgccgattagcgataactataaaggcccgtccggtaccgatctcctggaaatggtactcgccttccaagagacaaggaaagttgagttcaagtcggttaagcgcctacaggacggaacctgtcagttccagtacagcgatgataaatccggctcaggcaataccaaaatcccagaaaaaatcagcctggcaatcgcgcctttccataatggcgcaccgtaccagattgatgcgcgaattcgctaccgcctgcgcgacggtcagctggtcctctggtatgagctgatcgagccgaaaaaaatcattgagcatgccttccaggagatcgtagccgatatggaaaaccagctcggcgatgaactgcctatctacgaaggctccatctaa

SEQ ID NO: 246780 - DNA, 267 bp, Klebsiella pneumoniae
ttgcgagctagtcaccataaacgcgatcttatcggcttcagtaccaacaaaatctttgcactcaaggcgcacgatatcgtgtcccatagcaatagcagcgagcgcaccgtgatagcggtggtggccgtcgatcacctttacaccacgctcagtaacttcgacggccagcggaggaatatattcaccggcaataaacgcatcgcggaattcatcgacatgcgcctgattcagttcgcgaacgttgtagccttcttccgcataaattga

SEQ ID NO: 246781 - DNA, 552 bp, Klebsiella pneumoniae
gtgctggacttccaccaggacgccgatagccctcactggggtatgcacaaagctgtgtatgactgcccattctctgatgactggaaagcatggatagggtttgacggtcgcaagatgaaccagatcgactttgctgagtttctggaaaacaacatccagaatgtcgcgccgattagcgataactataaaggcccgtctggtaccgatctactggaaatggtactcgcctttcaggagaccaggaaggttgagttcaagtcggttaagcgcctgcaagatggaacctgtcagttccagtacagcgatgataagtccggctccggtaatacccaaatcccggaaaaaatcagcctggcaatagcgcctttccataatggcgcaccgtaccagatcgatgcgcgcattcgctaccgcctgcgcgacggtcagttggtcctctggtatgagctgatcgagccgaaaaaaatcattgagcacgccttccaggagatcgtagccgatatggaaaaccagctcggcgatgaactgcctatctacgaaggctccatctaa

SEQ ID NO: 246782 - DNA, 477 bp, Klebsiella pneumoniae
atgacaattcttgagcggctatatgccagcagcggatcggaggttattcacgatacgctgcagatatcggcaggagatgataactactggctaaccagtggctgggatgacgtttcagtgactctggaaaatggtcagccggtgacgtttgaggccagcgcgatagatatcgccttaccagccaggaacgccgacgggacacaggatttaaagtttgctatcagcaatattgacggacgggtttcagaggcgatcgataaaatcctggatgaaatgaaatcagccacgctgacattccggcggtacatttcatctgatctgtctgctccggcatcatcaccatatacgctcgatatcaaatccggctcatggacgccgacagcagttcaggtcacggcaggctatatgaatgtcctcaaaacagcctggccccgtaaacgttacaacctcgccgagcatccgggcttacgttactaa

SEQ ID NO: 246783 - DNA, 474 bp, Klebsiella pneumoniae
atggcagatattttctacccggatgaatacctgcccatgccgcttatggacgggtacgggtttaagcccatatcacctttactgcgaacggagatgacgtccggtcgtgctcaacaacgaaggcgatatacctcaacacccacccaggcatcagttaaatggatctttaaaactgatgctctggcgcaggtatttgaggcgtttttcagggatgtgcttaaagatggccagtcctggttctatctgaaactccagactccagtcggggtaaaaccctataaagccaggttcgtggatatttacgaagggccgacgctggtcgcgccaaaatactggcagtacagcgcaacgctggaattatgggagcgcccgttaccgccttctggttggggaaattacccagaatggctggcgggccagtcgttactggatattgcgctaaacagagagtggccgaagcatgacaattcttga

SEQ ID NO: 246784 - DNA, 381 bp, Klebsiella pneumoniae
atgtttaatcctgataaataccgttctgttaaatggcagaagggcggtagagcctacccgctactcgactgcttcggcattgtgaatgaaatacgcagcgacctggggctacctgaatggccggattttgcaggtgtgaccaaagacggcgggggcctcgaccgggaggcgagaaagctgatgctttcgctgaagcgttgtgacccctgtgaaggtgccggagtggcctgctattcgggctcaacagtttcccatgtcgggatcgttgtgatgctcgataaccagctacaggtcgcggaatgtaatccaggctcgggggttacgtttctgccactggcacgatttatccgccgctttaaccgcgtggagttctggcaatga

SEQ ID NO: 246785 - DNA, 306 bp, Klebsiella pneumoniae; identical to SEQ ID NO: 190402

SEQ ID NO: 246786 - DNA, 342 bp, Klebsiella pneumoniae
atgaactatgccattgcgattggcatttctcgtgaacatggcgtttatgcagaccgggaagccgccaggctgatgaaaaaagcagaagcagccgggaaaacgaaagtcacaaagagcatcgccaagccacaattcaatgcaggaaaggcgcggaagtttctggagatcatctcatcatgcaaagagaccaccagcggcggactgatcattgaagtaccaccagcaatgcaggccgaggtgctgtcgattcttcaggaattccgctacgaaacatcggcacctggggaaggcgagcaaaacaatgaacagacctcatcatctgaagaaagtgatgccgcatga

SEQ ID NO: 246787 - DNA, 246 bp, Klebsiella pneumoniae
gtgaccaaagacggcgggggcctcgaccgggaagcgagaaagctgatgctttcgctgaaacgttgtgaaccctgtgaaggtgccggagtggcttgctattcgggctcaacagtttcccatgtcgggatcgttgtaatgctcgataaccagctgcaggtcgcggaatgcaatccaggctcgggggttacgtttctgccactgtcgcgatttatccgtcgctttaaccgcgtggagttctggcaatga

SEQ ID NO: 246788 - DNA, 333 bp, Klebsiella pneumoniae
atgagcataaaagaattatccataactcatgacaggggatttaattctgactctaaaataagtgaagatcttacactaaggagaaccctgttatttgtgatttactcaatcattcctgttattgctctctattacttttctccgtacctggctgaagccacgataaattctctattatctgtagggattgagattaaatatgggttattcctacattttcttgcgacctggtttattttctggggggcggtaactatacaacatgacttctttcgtcttttaaagaaaatatataagaacgtgagtttttcaataaacaaaaagggccaatag

SEQ ID NO: 246789 - DNA, 486 bp, Klebsiella pneumoniae
atgttaagcgtaaaagtattcgcacctaaatttttctacttttgtgtctggtccggcatcttgatgtacatcttttttttatcattaacaaatattatgttgagaagtatagatcatgaagtggctacgactttcaaggatagtgaaggatttgtttcaagtgaaccaatagcggtaaagaaaattgatttttctgatacaaggcaaacaatgactcttgatagactaactggcgtcaagtggaattattataatatcggtgcaaacgaaacgatcggggtttttagttacaatcaaattaaagaaggtgacattttaacgataaccttacccactgaaaaggtacaagaagaattaagaaacggacgttttaaaaagttccaagagttttcttttttcaaaggcctagttaaggatagtaaaaatgtgcattttgctaaagtgtgcattaccaatggaaattgtttttcagcaatacggctatag

SEQ ID NO: 246790 - DNA, 717 bp, Klebsiella pneumoniae
atgcgggggttattggccggttcggattttgcgaaacaggtgcagggcgtattccccccgtctgcgggggttatcgggctggatttccgtcagttggtcagctgctgctgtattccccccgtgtgcgggggttatcggaatcgacatctcgtccgtggatgcgaaaaacagtattccccccgtgtgcgggggttatcggtgacttttgcgcagcctcagggctccggtttggtattcccccgcatgcgggggttatcggaacaatttgaagtttctgcgccaggtcgtttcgtattccccccgcatgcgggggttatcgggcaccctcacggataccttttgcacagtgttagtattctccccgcatgcgggggttatcgccttagagaagcaaaaaccccaccgaggcaggggtattccccccgtgtgcgggggttatcggttactttttggcagttggtaaaacacttttgcgtattccccccgcatgcgggggttatcggtgtgtgttggcgttcgttaaatattgttagtagtattccccccgcatgcgggggttatcgggaaagtaggggctacgccggaattccgaagaggtattccccccgtgtgcgggggttatcgggctggatttccgtcagttggtcagctgctgctgtattccacccgtgtgcgggggttatcggttccggactcctgtttccggcagtggattaa

SEQ ID NO: 246791 - DNA, 162 bp, Klebsiella pneumoniae; identical to SEQ ID NO: 201012

SEQ ID NO: 246792 - DNA, 522 bp, Klebsiella pneumoniae
atggcgataaaaaacagaatacgtgacgctgaaatattccgtgcccgtacgggtgaatacccaatcgatatgtacattcagtggattaaaagcggagcgctgaattttggtgctgaatatcagcgagactatgtctggggccatcaagaacaacaaaattttttgcgggtactcatttcagggtttccagttggtagtgtagcgctggcaaaagcgccagactggggtgttagcgagagcccttacatagaggtggtcgacggaaaacagcggctcacaacgttaaaaatgttcataaagaacgaaatccccatcattattgatggaaaagaaatattctggtttgagttgagcaggagtgagcaactgtcttttggtcgagcaacactaagcgctgtaattcttgacgacgcgactgaaaaagaccggcttgcgtatttcgttgcggtcaactttaccggtgtacctcaaagcgaagaacaccgccaaaaagtcctgaaattgcaggagcgtgcagcatga

SEQ ID NO: 246793 - DNA, 1017 bp, Klebsiella pneumoniae
atgtaccaactcggaatcgatgtaagtaaaaaaacgctggatatttgtctgatgctggaaggtatccgtgggcggctaaaaacaaaaaggataaaaaacgactttagggcagtgcacaccattaatgcctggctacagaaacatgattgcgcgctatgtgatgttcacatcattatggaggcaactggtgtttatcacgaattactcgccactgggctgcatctggcaggcggaaaagtctctttggccaatcctcaccgtacccgtgaatttgcgcgtggtatggatattttgaccaaaactgacaaggtcgacgcctggatgctggcttgctatggcgccttaaaaaaacctgatgcctggacacctccagcagaagaaattcgccatctcagcgccctcctcaaacgaagagacctcttggtaactgatgctacacgtgaaaagaatcggctggagaaataccgggccacacatacaccacacgtagttatcgtgtcagctgaaaatatgctgagacgtttaaatgatgagctctctgaaattgagctgatgctcaaacaacatgttgaaagacatgtatttcttaaagaggactatgcgcttctgacttcgattaaatcagtagggccacagttagggctcaatatgcttgtcatattacgctcacatgacttcaggacggcagagcaagtagcggctttcttaggtgttgcacctgttgagaaacgctctggtacttctgttagagggcgttcgcggatgtccaaaattgggcctccggaaataagggctaagttgtatcttgctgcactctgcggcctgagattcaacaaagcgatgaaatccatgtatgaacgtctgtgcctgaatggtaaggcaaaaatggtagctataggagccttgatgaggaaattgattcactggtgtttcggcgtcctaaagtccagacaaccatttgatattgattttattaatgtgggaagaatgcaagccagcattgctgcattaggctga

SEQ ID NO: 246794 - DNA, 282 bp, Klebsiella pneumoniae
atggaaaccggtggtggcgcccatcactgggctcggcagttgagcagactcggccatccggtgaaactgatgccggtcgaattcgtcaaggccttcaatatccgcaacaagaatgatacatccgatgcacaggccatctggcgcgcggttcagcaaccggtaaagcctgccgctgtaaaaaacgggcagcagcaggctatgctggcactgcaccgggtatgcttacaactgattaaattccggctaatgcagaccaataccctacacggattgctggcataa

SEQ ID NO: 246795 - DNA, 966 bp, Klebsiella pneumoniae
atgagccagagaatagggtttctaatatttcctgattttaatctgttggatttgagcggcccgctttgcgtttttgagacggcgaacaatcagctggagcctgagcaacgttatatactggatatttgcggttcgcatgaaggcgaaataagtagctcaacaggcgcgataatgcgcgtaagttcattgaaaagaaaaacgttcgacacgctaatcgtggtgggcggaaaaggcgttgatacggccagtcgcgaccccgatattctgtcagctctgcatacacgagcggcaaaacgctacgtatcagtatgcactggtgcatttattctggcggctgccggtaagcttgcaggtaaaagagccacaacgcactgggcccgagcctctgaactgaaaaagatgctgccggatattcaccttttggccgatgaaattgtcgttgaagatggtgatgtctggacatccgccggagccaccgccggtatggatattgctctggcgctggtcgaggctgatcacggcaaatcgcttacgcatctgataacacggattttgcttattccgcatcggcggacacgtggccagttacagtttatgaatttgcaatcaatcacccctccgccaccgagggttcagaaaatcattgattatattaaccaaaatttgaaagatgatttgagtgttactgttctggccgagcgcgctttcctgagtccacgacaactctcacgggaatttttagcgcatacgggcctttctccggcgcgtgccgtggaaaacatgcggctggagtttgccagaagcaggatcgaaaatacgaaccaaccattgtccttgattgccagagaaagtggattttcggacactgcagtcatgcgcaaagcgtttcggcgcaggctaaatacgtcaccaggtgagctgagaagaactggtgcagccaaagtgaagcatctggatgatatttaa

SEQ ID NO: 246796 - DNA, 948 bp, Klebsiella pneumoniae
atgcattacgtgctagataaacaactctctgaacagcttgcccgtctccagccacagcttgcttcctttcccgactttatacccggcgatccctttggctggcgtaaacgggcaaatgcgctgtacgacctggtgaatcagcagtttcctttccaagatagcgtcgttacttctgatttcagtattccctacggaaacggacacttgatggcgcgacgctactcgccgggcattgcctcatcccgcggagcggtcttgtatgttcacggtggcggtggtgtggcgggaagcgttgagctttatgacaacatagtgcgtacttatgcttgtcagagcggtgtcgattttatttcccttgagtatggtctggctcctgaaacaccgggtttgcttcagacagagcaggtgatcgctgcgcttgtctggttgaaggaaaacagtcatgagcaggctattgaccctgaccgtattgtcctgatgggagatagtggcggtggcggtattgttgcctctgcggcgctcgttgctcgtgacaggcaaatcccgcttgccggactggtaatgatttatcctatgctcgatcacagggtaatgcctgtagcgcctgagctaacgccattcctttccgttacagccgaagaggtcaaaacagcctgggctgcccgactcggcgcaaacgttgctgatgcaccactttcttatatcagtccggcaactgctacgaatttcagcgggctggcacccctttatattgatgtaggtgagctggatttattttgccaggaaaacatggtctgggctcacagcgcattacaagctggagcacaggtcgaatttcatctgttccctggagttaatcacggctttgaacttctggcccctgcatcccggattgcccttcaggctttcgaattacggagcaacgcaatcagaagaatggtttcataa

SEQ ID NO: 246797 - DNA, 612 bp, Klebsiella pneumoniae
atgggagctatgggaagaccaagaacttttgacagagaaaaggcaatagaagatgccatgtacttattttggcaacatggctatgagtcaacatcacttgcccagttaaaagcagggatcagaaacggcatctctgcgcctagtttctacgctgcatttggctcaaaagaagcacttttccaggagtgtgtgcagcgctatcttgcaacttttgggcaggtgactaatgctctttgggacaatacattacctgcacgcgaagcacttgaagttacgttgagaagctctgccgaaatgcagtgtgagccgggacatccgagtggctgcatggtaggtttaggttctttgagcgcaacctctgctcagcatgcttcggttgccgaacctttgatacgatcgcgcgatataacacgtgaaggaataaccgcgaccatacaacgggggatcgaccgtggggagttaagtaataacactgacatcattgctctggctgggtctttcagtacctttttatttggcttatcaatacaggcacgggatggcgctacgcttgaggaattcaacagtgctatctctttaatgatgcgcttatgggatactaatgcggcttga

SEQ ID NO: 246798 - DNA, 1008 bp, Klebsiella pneumoniae
atgcagcaaaatcagcggtttacaccatggcttaaggcccctacccgtacggttcgacgtggacatttctgggtgccaggtgaacgcattgaacaaaacggactgacctatcaacgcggtccgatgtatgtggaatgggaagcaccaaaagaaatcagccgaccttatcccgtcgtactgatgcatggcggtggttttcagggaactgagtggttcgatacgccggatggcaggcccggctgggcgcaacgttttgttgaagacgggtatgcagtactggttattgacaggccaggacacggccgctcgccgtttcacgtaaaaacaatcggtgatatggggcctgccttctcttatgagggaggacagcagatttattttcccggcacggatgagcgtcatacgcagtggcctttcgcagcggatgatgcggcggcgatggatgaatttattgcaggttatgggccgctgccagccgacctagcactctcccagacaatggacgcagagcgaatggctgctctgctggatctcatcggcccggcaattcttgttacgcattcagcttccggcccggatggctggctgacagcggatcgtcgtccggaacaggtgaaaatgattgtcgctgttgaaccgatgggacctccttttgcagaaataccgaatatcgggacaatgagttgggggcctgccgccgctccattaaaattcgaaccctctattgaacatcctgaagacctgcggtcaagagaacctggcagttaccgcttgccgtcgctgaaggaaaaacccgttcttatcgtaactgctgaagcatcagcgtttgctgtcgcaagcccgcctacagccgctttcctgaatgcagccggtgcgtcagctgaattactgcatctgcctgagcatggtgtatatggtaacggacacggcttaatttatgaaaaaaattcagatgaggcgctaatgcctgttttgaaatggctaaatgacaatatgccagcggattga

SEQ ID NO: 246799 - DNA, 864 bp, Klebsiella pneumoniae
atgaatattggtattattggcatgggagcgatgggaactgccattgcgcagcaactggtaaaagcgggtcattcagtctgtgcctggagtcgctctgaaaaaaaggcagcaggcgtcgccatagtgaattcccctgaacaggctatgaaaggagatatgacgttaacgcttctgtccgatgattcagccataaaagaagtgatcatagacactggattactatatgacgcaaatccacatctgatacatattgtcatttcaacaatttctgtagagttttcatatgaattgcttattcatcataaaaacgcaaatattgactggatggcggcacctgtacttggccgaccggatgtagcggcacgtggcgaacttaatattctgactgcgggttcagacgatgtacttcaccgctcacaggccgtccttgaaatactcagtaaacgtatctggaatatggggacgtcaccggccgcagcctatgcagccaaaattgcgtgtaatatgatgatcactatggctattgaggccatggctgaggccgttgttcttacagaggccaatggacttgaacgtgagcgattctttgacctcatccttaataccctatttggtagccgaagttatcaggtttattctcgtaatataatcaatcaggtttatgaaccgggctttaaagcttctctcggtttgaaggatttacaactggcgaagcaggccgcttcggaatcaggcgcagaccttcccatgcttcaggttgttcatcagcaaatgtccagggcagtagaagcaggtggtagccaaaaggactggtctataatggcggattatactttacgtttttcggttaaacggcgcgagtaa

SEQ ID NO: 246800 - DNA, 648 bp, Klebsiella pneumoniae
atgcatatcgcggttgccacctcaacggcggtgatgatatttaacgcgggctgggtcagctatcgtaactggcgagccggtaaactttcctcgcagacgctcttcccgttgctgtggtttatcggcatcggcgcttttgttggttctttgctggcgggcgtgttaggtgaggcgctcgttcgcgcgctgttcattctttacatggttgcgacaataggtgactgtctgctgcgcaagggtttcttcaacggtgctgcaccgcatcgcctgtcgccttttatggcaacaggcgggggaattgcgatcggcatgattgccgcgttgctgggcgtgggcggcagcgtcatgacggtgccgctgttgcgacgacacggctatgcgatgcgtgattgcatcagcgcagccaatccgctttcgctgcctgtggcgctgtgcggctccgtgacgtatgcggtcatcggctggcgcactattcctgtaagcggatttatagggtttatcagcctgaaaattctgggcctgcttatactgtcgggcctggccggcattgtgtttagtcgcagggctattcccgctgtccccgatatctggcatgcacgaatttatgtaatgctgctgtgtctggtattcctggcgatgttgctttaa

SEQ ID NO: 246801 - DNA, 768 bp, Klebsiella pneumoniae
atgcgtaacataataattgacgaggtggatgagcttgaccgtgacgtggtggcgttaggcaatgactatgcgcagggatttacactgccgtcccacaaacatcgccgcgcgcagctgctgtatggcgcaacaggactaatgtacgtctcaacacatgacggagagtgggtggttcccccacagcatgcggtatggatcccacccgacaccacgcacgccgtccggtttgtgggcgtcaccacccgtagcttgtatattgagcccgcatgcatgatgggaactatcaaacaccgtcgctgtgaagtgataagcgtatcgccattgttacgtcagttattgcttgaagcggtggatttgccgccgttatatgaaaacgcacgcgatcgtgtgctggtagagttgctattactggaattggcggcaatgccggttcgcgagttcgacattccgcttccccgacatccggctctgctggcgctttgtcaggcgtttttaatcgccccgtctgttcacgatcctgctgagcgctgggccagggcgctgtttatgagcgccagcacctttcgccgccttttcttacgggaaatcggcatgtcattttcagcctggcgccagcgagcttgtgtggtccgcgcgctggcgttgctgataaaaggcaggccggtgtttgacgtggcgctctctcttggatacgacaatgcctcatccttcgcgacgatgttccgccgcgttacggggcagacaccctcattttatcatcctgtttaa

SEQ ID NO: 246802 - DNA, 570 bp, Klebsiella pneumoniae
atgcctttagttgcggagcttgaggcgttacgattatcgctttcatgctgtacataccgtggtgatcaacacacgaacatattgattaaagaggacgacgccctcgctaagttaaaactagtgaaactactggctccgaatggggaatggttcagttttaatcctgataaagggcgcgggaggaacgcactaatgtcgccacttttgacggctggcaatgggcatgaccatcaccgggcttgtgattgtgttgtactgatcgcaaaggaaagggagttaactgcgctctacatagatttgaagtcgggtaatccggttgggtactgcggtcaattcaagagtacgcggcagtttgttcgttatgcattgggtttgttggaagatttttatgggcataaattttcgttgcaagagcgttttgtggttctttatggtggaaaaccggcccttttgcaaaaaaaaccaactgtacctaaaattgagaagattgggaaaacgctgccagataagccttacaagcgtgaagtattcaatgccagcactctttatctaaaagagctgctgacctaa

SEQ ID NO: 246803 - DNA, 1404 bp, Klebsiella pneumoniae
atgcactttcaatttgaaaatctcggcttactagatcaggttgacctggagctagctaatctcacgcttatatgcggagaaaataacacgggtaaaacttacgcaacttatgcagtgtatggttttttgcgcagttggaggcaaatacttcgtgtagttatagaagacgaaattgacacccttttaaaagattctaatcaatatcgtatcgatcttggggcgatgttcgatggaaagatcgacgactacttgaaaagaatgggtaaaatttatgtcggcggattgccgagagcgttcgctacccaagctgagatatttgaaaaaacagtattcataccaagtgcttgccttgaaactgatatttcaagtaaggcgtttcaacgaaccgtgaaggctggcacgggggggaaagttcttgccaccttaaccaaagaatccgatagcgttatgcttgaagtgttggtggcggatgaagaagttatcatgcgccctttcggagggctaaccgatttcatcgtagacgctattgctgagattgtcttcgcgcagcatttgcctagagttcacatatccagtgccgaaagaacgggagcagcaattttccgtaaagagctagatatggctcgcactcgtatgcttaaggccataaatcagattgattcaaaagaactcagaagaaatccttttaagatacttcaagaaattgagactgattatgcgtggccagttgaagataacgttgattttgtcagacagcttgaggatattgacaagagaaccggggagctggcagcggataatcctgaattattagtcgctttcgacgccatcatcggtggcagttataaggttgtaaaacaagagcttgtctatcaggcgaaaggtgcaggtaaacagcgctttacgatgaatgaggcgtcgagttgtattcgcgccctgctggatgttggtttctacttgcgatgccgagcgcgctccggtgatatttttatcattgatgagccggaactgaatcttcatcccaagaatcagcgagcttttgctcggcttgtggcgcgtatggtcaacgcaggtatcaaagtattcattacgactcacagcgactacttggtcaaagagttaaatacactgatcatgctgcatcaaagaacagaacatacgagatctgttcagcagcaatacaagtatgtagatgaggaacttcttgatccggcagttgttcgactttacatgacggcaacaatagcaaagccctcaactggtgctggtcggcgcggtaaagtaaggacgctgaagctggctaatatctaccctgatcgcggaattgaggtagaaacttttgatgacactattgaggtcatgaatgccatacaaggtgaaattttgtatgggggtgacctctga

SEQ ID NO: 246804 - DNA, 219 bp, Klebsiella pneumoniae
atgacatgggcgcaacggctcaagcgtgttttcaatatcgacatcgagacctgcagcggctgcggcggcgccatgaaagtcatcgcctgcattgaagaccctatagtgatcaagcagatccttgatcacctgaagcacaaagccgaaaccagcgggaccagggcgttacccgaaagccgggcgccaccggctgagctgctcctgggtctgtttgactga

SEQ ID NO: 246805 - DNA, 384 bp, Klebsiella pneumoniae
gtgcaagtgcgtacgttcatatcggttttcttgttgcccaacgccctagctaagccgacggacagcccgcagggctggccggtcggcttgagcgccatgttgggcgacaactgccttgcgcattgcatacctacggaacatgacgcctccacgggagacattttgctcctcaactacactgaaaccatgccgcaggaaaaagggcttggcgaccagactggcttctgtgaagagcgaaacacctgggagggctttctcaacctcacggtacagaacagacgcgacgccccgacgctcggaacccggtgcggtgtaaagaaactcgatgtggccgctaagctcgtaagagatgaacccgataaccgcatctccctcaattgctag

SEQ ID NO: 246806 - DNA, 768 bp, Klebsiella pneumoniae
ttgatccttgaatggaatgttagaaatatgatcccggttagatatttaatggtggccagaaagctttcggatgcgattaactgcggtgagtatccggttggcacattattgccgacagaacatgaattatctgagatgttccaggtcagccgtagcaccatccgggcagctattgcacgtctgcaggaacaaggtttagtgtcgcgcaaaaaacgtgttggcacgcgcgtggaggcatctacctgtcagaaagggtactcccagactttaggttccgttgcggacctggcgcatctcgcaaaaacgcaacagcgcgaagtgaaagaagtcgagcaatttgtggcggataaggcacaggctgagcgcctgggactggagccaggtggtaattatgtgcgtatttcaagtgtcaggacggacagcgaacatcccggaaagccggtatgctggacggatgtctatgtagcgaaacagtttgtatcggttgttccgctggcgaaagagcgaaaagaagtactgatagccgccattattgaagcagagtttggtctggtcattaacactatagagcagcgggttaaggctgtcctgataaccaaagaactgtcaaaagcgctgaataccgcggcaggtgaacccgcactggaaatcacgcgtgtctatcgcgatcaggataccaacatgatggtgacgtcagtaacagttcatcctcatgagcgtttcgcgcttattatgaaacttgagagagataaaaataaaacaagttaa

SEQ ID NO: 246807 - DNA, 1356 bp, Klebsiella pneumoniae
atgtctagcaccgtatacgattccctgctgttcaggaacatgtttgccacagaaaaaatgcgcgcggtcttctctgataaagcattgattgaacgttatatcgaaacggaagtcgcactggccagagctgaagcgcgttgcggaattatcccggccagtgcagcggtcgagattgctgaaaaatcacgttatgacgcgttagacctcagtgagatgcaacatcagacagaaattgtcggttatccaatcctgcccctggttgagcaactctcaaaaatatgcggcgaagccggacgctatgttcactggggagcgaccacgcaggacatcatggatacggcggtagttttacagattcgctctgcgctggatatcgttgccaccgatcttcagcacgtcagaacggcgctgaccacactggcgaaagcgcatcgcgacacaccaatggcggggcgtactcatctgcaacatgcactgcctgtcacctttggctacaaatgtgccgtctggttgagcatgtttgatcgtcacgccgaacggcttgctcagttgcgtccccgcgttgaagtagggcagttcgcaggagctgccggcactcttgcttcgctgggcgaaaaggggcttgaggtacagcaagcgatgatggaggaactcggcctgggcgtaccgcagaccacatggcatgtggcgcgcgacggcttcgccgaaaccctcaacttcctgggtctggtgaccggctcgctcggtaaagtggcgctggatatcatgatgatgatgaccagcgagctgggcgaggcctatgagccattcgttaaggggcgcggtgccagcagtaccatgccgcagaagcgcaatccgatctcctgcgaaattatctatgcagcagccaaaggtgtccgccagcatgcaggcctgatgctggacgcaatgattcaggatttcgagcgttcaaccggtccatggcaggcggagtgggtcgccattcccgaatccttcatgttaagcagtgctgcgcttgagcaggccgttttcatgctaaacggtctggaagtgaaacccgacaacatgcgcaggaatctcgacatgactcggggccttatcgtcgccgaagcagtgatgatgggactggcaccacaactgggtcgccagacggcacatgacgtggtgtatgacgcctgtcgggttgctaatactgagaatatgccactactggatgcgctgctgcgtaatgagattgtgactgccaggctcagcaaggcggaattacaggcactgacagaaccgggcaactacaccggactcgcgccagtgatggtggatcgtgccctgctggcttccgaaaaaaataaaaaatag

SEQ ID NO: 246808 - DNA, 1293 bp, Klebsiella pneumoniae
atgtctacagttaaaccgttctggaaagggctgacgtttcaggtactcgccgcgatggtgctcggaattgttctgggctttgccttgcccgagtttgcggtaaaattcaaaatactcggcgacatttttttgaagctgattaaaaccgccgttgcaccgctcatcttttttactgttgtacacggtattgcttcagcgggcgatattaagaaggtcgggaaaataggcgtacgtgcgctgatctatttcgaactgatctcaacacttgcgttagcgctgggtctgggatgggctaacctgcttaatattggtgcaggcatgggcagcagcgtcagcgaggccgccacttcggcagtaaacatgacgctggcaaaaggccacgcaccgtccagtaccatggagtttatttacgccatcttcccggacaacttcattggtgcctttgccggtggtcagttgctgcaggtgctggttatctcaatcatctttggttttgccctgctggcgctgagtcaggagaggcgcactgtcattgaaagtggcatgagccgcatttccgaatgcttctttgaatttatcaacctgatcatgcgtctcgcaccgctcggtgcctttggctcggtggcatatgccgtcggcagcaatggcagttcagtattactgtcgctgctgaatctggtgttgatgttctatgttgccgttgccttctttatccttgtcgtgctggctgccatttgccgcctctccggcttcagcttatggcgttttctcaaatacatcaaagatgagattttcatcgtgctgggcaccgcatcttcggagagcgcactgccgcgcctgctgcaaaagctggagcgctttggttgctcccgtcagagtgttggattgatactgccaaccggatatgcctttaacctcgatggcaccagcatttatatgtcgatgtgcacgctgttcattgccaacgcgtatggcatcgatctgagctggcagcagcaattaggtattctggcggtaatgctggtcacctcaaaaggcgctgccgcagtatctggcgggactttcgtggtcttcgccgccacggttgctaccgttgggcatctgccggtggaagggctggctttgatctttggcgtctatcgctttatgtcaatggcagtcgccacctgtaacaccatcggcaacagcgtagcaaccgtggtggtgtcccgctggtgcggtgaattttctgagggagatgcaaagaaggagtacagccgtttactgaacagtaaacctgagtcatctttgtaa

SEQ ID NO: 246809 - DNA, 327 bp, Klebsiella pneumoniae
atgaagtggcgctattccctgcgctggaaactgccgcacaggccctgcccgggtccactggagctggtttccgttgtcgtggaggcagggcaggcgacacctgaagaagtgatgtcttgctgggtggcgggcgctggatatgcggtatgcgtggattttctcgacgagaggcagattaagcgatggagcgacgagcggaaagccgccgcccgccaccggaatctggtgcgccgcatcaacaggattgcgcccttgtttgccgacgagctgatcgagcgggagcttgagagcagacccggatattttcgcggcaaatcagaacgatga

SEQ ID NO: 246810 - DNA, 135 bp, Klebsiella pneumoniae
atgcgcacaatgaaagtcaacaccgccactcgtgaatcagacgaacagtttaaaacagataaatatctgcgcagtgccgtaaccaatggtaaagctcgcctggattttatcccggagctctttttacgccgttag

SEQ ID NO: 246811 - DNA, 921 bp, Klebsiella pneumoniae; identical to SEQ ID NO: 190513

SEQ ID NO: 246812 - DNA, 834 bp, Klebsiella pneumoniae
atgacatctgcaaaaacgattttaatcaccggcgtcagcagtggctttggccgtgcactggcgcaggaagccctcgccacaggccatcgggtcatcggtaccgtgcgcagccgcgaagcacagcacgatttcgaggcgcttcattcgcagcgggctttcggccgtctgctcgatatcacggactttgagcatattgatgaggtggttgcggagattgagtctaccgtcggtccggttgatgtgctggtaaacaatgccggttacggtcatgaaggcataatggaagaatcctcgctcgcagagatgcgccgccagtttgaagtcaatgtgtttggcgcagtggcaatgatcaaagccatgctaccgggcatgcgccagcgtcgtcatggccatattattaatatcacctcgatgggcagtttcattaccctgcccggcatcagctattactgcggcagcaaatttgcgctggaaggaatatcagaaacgttaagtaaagagctggctccgttcaacatacacgtaatcgccgtggcacctggctcgtttcgcaccgactgggccggacgatcgatggtacgcagcgctcgcagcatcccggactacgacgctttatttgatccgattcgtcaggcacgtgaagaaaaaagcggtaagcaactcggcgatcccgttaaggccgcacatgccatgctggcaatgattgagagtcagaaccctccaacgcatttattgttaggcagtgatgcattaagtttagtgcggcaaaagctcgaggcattaggtaaggaaatagaacaatgggaagaaataacacgttcaacggatggctga

SEQ ID NO: 246813 - DNA, 222 bp, Klebsiella pneumoniae
atgatgcaagtagctgatatttttgatttattcattaaacttacgccatcgggactggcattactggtgtgggcgtatggggtttataatcagttttcactgaagaaactggaagccatgcagttgcagaaaaggtggcctgagctgcctgacggtttaaccatacaggacaaaaaagaagcactccacgcgatgatttctgcggaggaaaggaaaacctga

SEQ ID NO: 246814 - DNA, 543 bp, Klebsiella pneumoniae
atgtactgggagtcagaaagactactttacagaccagtaattatgtccgacgtggaagcgctgtttcgcatatatggtgacgaaagaacgcacgcgtttaacccacgtgggccacaccgggacatcgagcaaagtcgcagtgttatcctgcagcgaactgcagatcgtgagctatacgggtttgacgactgggctgtctctgaaaagacggctccagaacgaatcattggatttggaggcgtatttgtcagccatttcaatggccgacaaacgaataatctgggctaccggtttgaaccagaatcatgggggaaaggttatgcaactgaactttcctgtcgagctttgatatatggatttgacgagctaaaactgcctgaaattgtcggagtgacacgcgaaaatcatatcgcctcccgccgcgttcttgaaaaagcaggtttgctgtttacccaaagggtggacaatccggaggaccccccggctaacctgatgttcactctgactatagagcaatggaagaggttaaaacgacaggcttga

SEQ ID NO: 246815 - DNA, 123 bp, Klebsiella pneumoniae
atgcacatcatcctgaacagcctgcgttaccaccgtctgccccgcagggaaactggtgccggaagagggacgtatatccgtatggccgacggtaaaattataaaggaggcagacgatgagtaa

SEQ ID NO: 246816 - DNA, 669 bp, Klebsiella pneumoniae
atggcgggtacttcagaaaaagatatcaagttactgtggggccgcgcagcagggcgctgttcttactgccagtgtgaccttacacatatcatggatggtttaggcaattatcatgtaggtgaaatggctcatgttatcggtaagaaaaaaggtgcagccaggacaactgagggtacaggacctgatacctatgacaatttgatccttttatgcccaacccatcataggatgatcgataaggctccagaaggggcctatccgaatgaaatgctttttcagtggaaagagaaacacgaatcttctgttgcaaatgcttttaagaaggctgtttttgatagtgttgagcaacttaaagaagaaattgcgttaatgctttatgaaaataataaatgctttactcattatggaccatattctgaagctgcaaaagatatgggttctaatactcaagaattgtgggagctaaaaaaactaagtgtgatggtgcctaataatcgtaaaataataaatgtaattgaaggtaatatgggtttattaagctccaggcaaaaacgattgtatattgactttagagatcatgccgaagcttgggaatacaatcagtataatagattggatacctatcctttatttcctgaagagttccagaaggagttcggttatgaataa

SEQ ID NO: 246817 - DNA, 408 bp, Klebsiella pneumoniae
atgaataataactcatggggtgtcagtttcgcatcgatttcatggtttgacgactatttgaaatctcataaaaatgtcaagggttttattcgcgaaaaggatatagtctttcgtgttgagaggaaaattcaaaatgatatgttgacgatcattcttctgaatgaatacacaatgagtgtgacaaaaatactcaaagttatcaaagagtttggtggggtggatataatcgttgttggtggtaattggaatagctacacatctggtgccaaagagcatgctatacagcaagaacttgggttgtttaattcggcagaaatcggcgcggctttattcaaaaatgattactggaatttccatagaaaagatagaaacggcagtccgcaatatcatattagagaggagcagtaa

SEQ ID NO: 246818 - DNA, 546 bp, Klebsiella pneumoniae
atgcgcaattccgagatatatgtgtcagttgatattgaaacgtcaggtcctgttcccggaatttacagcctcctatcaattggggcttgtctggtgagtgatcctgagaacgcactgtaccttgaacttcaaccagagggcgagaagcatgatgctgaatctcttgctgtgactgggcttgatattaaccgactacagagcgagggacttgcaccagaacaggctatgttaaagctaaaagactggcttgcttctttaatttctcaacatcggaaacccatttttgtcggtctgaatgccccatttgactggtcattcatcaattactactttcacaagtatattggcagcaacccctttggtttcacagccatagacattaaagcctgctacatgggggctatggggtgcgagtggtcagacacaaaatcatcacatatgtctgcagtccttgcccctctaacccaacccacgcataatgcgcttgatgatgcccgttttcaggctgaacttttttctttattactcgcgcgatcaggccgttag

SEQ ID NO: 246819 - DNA, 489 bp, Klebsiella pneumoniae
atggaggttacctggagttggaaatggcccggtgttgaggacgtcttactggtatcccactccgcggctgatatttttcactgtaatcggcaaataagtggggaacatgagcgagggggtcagctttttgtcgaccccaatcatccagacggtatcattttgtctcttgcaacagcaccacacaaagccgacaaggcagggcgaacatggcttgagttagaccctgaacgctgtaagaaggagattcagaaggcaaatgctcttgggttacgattaataggatactggcatacgcatcctcaggtaataccgcagatatcgagtgcagatatttcgagcttttcccgctttgcgcaacgttactctcaggtacttccgcatcctgtagccattatcgtcggcacctctccagatacttcaggaattaaagcctggttatttagagagggggggtattttgaagctgtcagaatggactgtcccttttag

SEQ ID NO: 246820 - DNA, 1779 bp, Klebsiella pneumoniae
ttggttaatattccagatgatgcggttgcacagggaattgccacacttgaggcactcctaaacacaggtaatgccgcaggtctactgcagcacaccaaagcgcgctcagatgaaaccgtagcataccgtttcccgcttccaacagattatctgggcatagaaaggacattgcacataggatttcccaagggattcccatccgctggtctcaatctgtatgtggatccctcaccttggcttgtttggccacacgcaacaaaaacaggtctatgtcttcacgggtttaaagaagagccagttacggggtcacctgacacagtagttcgcgacagcattaatcggctgaagaaaatattgtctttatccatccagggcgcaaacgcagataaacgtaatctcgaatttcagaatgagattacgtcttactggataagacagcacggtaggtctgtacggaatgtattgctcattgggcggccagaatttgcttctgaactattcgcactcagtgattctcgatacatcgttccctcaggctatgagtcagtctggttatcatcagatataaaagctcttggtagccatgcccgccggattatgggaaggcaagtcacgatacgctctccacatgcaggcggtttttttgtaaaactcaaaagttttcctggactcgtgtttccagcaccggcagagctgttgtcgtggatcctccctcatgtatctgaggcggatgcgacaaaactttctacgtggtttagtaccagtagctcacttatttccagatggctgattctggagttacctggcaaagccggcgcgcctttatacacactgaatgtttttgcaaaggtagatactcgtcgccgtagcccattcttcggatcgcgctccgcacgtcggaaacctttggcgataaccgggcaacatcctgcaattatttattcctccagattaaacgtcattgaccgtacagatttctatgcgcgagatttaagcggtagcatcagagggctggaagcagcacacgttgtgttcatcggggtaggatcgctgggtggggctgttgcatcacaacttgcaaggtcggggcttaagcatctgactcttatcgacccagatacttttgagtccgccaatatgggaaggcatgtgcttggcatggatgatttaggtaaattcaaagtcgatgcacttaaaaccaggctcatgcgggatcatccaacttctgaggtcaaagcttttaatacgtatgtgcaatttgccttagaagacaagcctgaccttcttcagactgctgatttagtcatcatcacaacagctgactgggagtctgaagctagtttgtggaaactaaaagcaaaaggtcaatcatgggcatttattcagggatggagtgaacctcatacgcttgtgggacatgcattagcgtcacctcgaggtgactatgatggcaggcacttattcagtgacaacggcgactttagtcacaaatatacagagtggccggaaggaggggttgttccgctacctgcctgcggggaaagtttcattcccgggaacgcagcgggtatgaataccatcgccacaatgataacgcaggcatcgattcagtatctgaacggtattaaaaaggaatcgctctggttaacaagcataaaccgccctgctgatgcacaggtgcagggcgggacgtatatcggccctgacttaccgacaggaaccattcaaactgttctggagcgggcttggcccgaatctacacatgaggctggaaaataa

SEQ ID NO: 246821 - DNA, 1248 bp, Klebsiella pneumoniae
atgaataatgaacagactaaacacagcagctgggaatttttccttcttcgagcagcaagagcgatttctctgaccggtccgcagtatgaaaaaattaatggccgctacgctcaactgcagacaatcctctcagcttccgatgatcctattctgcaggatgcacatatttttccgcagggatctatgcgccttaaaactaccatcaaccccgtgtcttatgcgccggcagacctgggcacaattgatgcagatgcaattgtctggctcccgaattccagaggagtatcagcggacactgtgcttgaaacgatagaaaaacggtttcaggaaggcagtcgcgttcatgaggacataaagcctctgcgaagaggggtacgtgttgtttatgcagatcagaacccaggttttcatattgacgtgaccccagcacgaccccgcagctggaatgatgaaactcacggccatggcatgcttgaagtaccagatagagaaactgggtggaaagcgagcagccctatcccctatgcagactggctccatgatgcttcggagagtcaaatcatgcttgaaaattatgttgctctcaataaaagtcgggctgttgcagattccgcgactatagccccactacccgaatatgaagaatatcagaccgaggatccacttagagccagtatcaagcttctgaaacgccatcgcgatgaatgggctattcgcactaaaaatgaaaaatcgcgcccaatttcagctgtcatcacaacactcgccgctcacgcctggctgaatgtagcaatgcaatcgcggcaaaggccatttacgccacttgaagccattcttgagatcgtcagaactatgccaaacttcattcgaagcaatggacaggaatacatggtctgtaatccagaggatagcggcgaaaactttgcagaaaaatggaatcgcccaggagaaggctctgcttaccaaagggcgttctatgaatggcatgaaagtgcctgcgaggcattcagccttggacttgaaagctatccatccgcggaatcatttgccaaggcagtaaacgaaagattcggaatcgggcgttcatttgtagatgaagtaaataccagtatccccgctaactggacaatgccgggtcggccttcaggtatgaaccgaaactctgtttcaatgggagcgctgtttggaggtgtggctggcagcgagcaatctcaggctgatacgaaaccggtaggtcgacttggttaa

SEQ ID NO: 246822 - DNA, 1173 bp, Klebsiella pneumoniae
ttgaacgcagaagccccccccaagaaaaaaggtggaagatttaacaccaaatccgaagtaaaacagatggtatgggtaaggatggcaggacactgcgagctttgtgggacagacctgacgcatgattttcgcgtgggcacatccatgcagtggggtgaggtcgcacatatacttccggctagccccaaaggacccagagggcgagaagagcatagtgatgaacaggctcaaaatcttactaatgacttctcaaatctgatgctgttgtgcccaaattgtcacgaaaaaatagatcgcgatgatgacggttatcctgaagatgatttgagtggcctgcatgaaagctgtcttgctcgtatacgccttgcagcctctcagcctgctgaaggacgggctataccgctaattgttcagagtcagcattttgcatctaccaataatatcccagcaggggaattgctgacagcgatgtcgtccgagggacttactgcgtttggtcacacaattaacatcactttcagagagcctggcccccgcggaagggatgacttgtactggcaattaattaaggacgatatcgagcagaagatttcaggggaattagccaaacgcggaggcagcttcggcgatatgcctgctttagccctcgtgggtctcgcagacatccctgcattgattatgctcggacaagccatcggagaccgctctaaccggtatttattttccagaagtcgcacacatggtctttgctggccatcgaaatccgcttctcctcctgattatatattctctccagcacctcaaggtaatgggccactggccttagtcctttcgatatcggcgactattcctgaacgggatattgaagcagtgctgccgggcgtgcgaatcgcgtcgttcactattccagagccctcatatgcgatggtttcaaaccggaatgttatcaacacattccgggatgaacttcaaaagcatttgagtcaacttgaagcagaatcggagcaacctatcagcgtctttgctgcgatccctgcagcgcttgcaattgaatttggagctttgctgacgacgcagcatcagcacccttatgtaatttttgatagagagagtaattcaaaccagttccggtcaatgctgactatcggccaccctcaggagtcacagaaatga

SEQ ID NO: 246823 - DNA, 1518 bp, Klebsiella pneumoniae
atgacaccgccaaccaaaattgatacatcaagtctacttaccatattgggcgttattgctgctgtatgggcccttattacgccaaacgctcgactacgtttaaggttctgcctagcgtggtgggattgggtaattgttgggtttgcattcttactaagcaattatttggtgtttgcaccggctttaaaatcactagacttatattttagctttggcccctggaaatgggggttagatagttcaagtgccgtatacctgatatcactcgcagttgctatttacattttatttcgcttaaaaaaccctaaactctcaattggaagaacagggatatttctagagttagtggaaaatttgcaccttactaaacgatacgacgatctggcacaattgttggcacctcaactagaaaaattaatatcaataattgatagacctgtgaagaatcgactttgtgataagatagctaacaatctccgcatctctaatagcgagacagctgctgaacatgcacatgaagcattgttaaatattgtatcatcacctgaacttatcaatcactttgcacttgcgcacccatccctctgccttgagttaatcaagatcgagccaatagttcgttctgactttacttctaattttatcagtgcattacttggttcacctaacagtcgtctatatgttgagcttaaaaataatcttaacgttagtcgaggacatcgtttattgattccaaaaaacaaccgtatattacattttttcttttccaatgctaagtttgcagctgatttagcaatataccgtgatatcggtgactatctctactggaggttagatgaagatgaaaaaattattgctgcacttaataagtctttaggttcctattacgatgcttcaaaatataaatgtcctatttactcaggtgtcacgctgtttgaaattatggttcatgaaggtattcaccagggtcttcaggatcatttatggttgcattactattcatattttgcaaggaaaattttaaagaatatgaatatgcaaacggatgaatatagtggtgaatgggaaacaccttttcacttccttctctgtcatttatttagcgtcgctacagattgggcagaacaatgcgaatggatagatgaaaaggagattcctcaagaaaataaagaaatagataatttcgatcttcattatatttcaaaagaggcaacaaaatcacttggtgctatgctgcagttggttatgcctaataaaaaactcactttgaaatctagaaaacatattcttgatatagttgtatcttgttatattagattgaaaaggaataaaaaattaaaagacgtcgctgactcattattaattttcaccactagaggcgaatgtaattcagcaccgccgcattatcgtagagaacttctagaaatattcaatacccttgatgattatcgattaagaactgatgccccggaattccgagcagctatagagtctgctattcaagcaaggccgaattag

SEQ ID NO: 246824 - DNA, 1239 bp, Klebsiella pneumoniae
atgtctgagcagataatcgactgggatctggccctgatccagaaatataactattccgggccgcgctatacctcgtatcccaccgcgctggagttttcaccgcaatttggcgcggcggaattcgatgccgctgtggcccgttacccacagcgtcccctgtcgctgtacgtgcatatcccattttgccataagctgtgttatttctgcggctgcaataagatagtcacccgccagcagcataaggccgatcaatatctcgatgtccttgagcaggagatcatccaccgcgcgccgctgtttgccactcgccaggtgaagcaactgcactgggggggcggcacgccaacttatctcaataaggcgcaaatcagtcgcctgatggatctgttgcgcagccattttcatttcagcgcggaagccgagatctccattgaggtcgatccgcgtgaaatcgagctggatgtcctcgatcatttacgcgctgagggtttcaaccgcctgagtatgggcgtacaggacttcaataaagaggttcagcgtctggttaaccgtgagcaggacgaagcgttcatctttgatttgctcaaccatgcgcgggagattggttttacctcgaccaatatcgacctcatttatggcctgccgaagcaaacgccggagagcttcgcctttaccctgcaaaaggtcgccgagctcaatcctgaccgcctgagcgtgtttaactatgcgcatctgcccacgctctttgccgctcagcggaagattaaagatgccgatctgccctccgctgagcagaagctggagatcctgcaggaaaccatcggctcgctgacgacggcaggctatcagtttatcggcatggaccatttcgcccgtcccgatgatgaattagcggtcgcgcaacgtcacggcgtactgcatcgtaatttccagggctacaccactcagggcgataccgatctgctggggatgggcgtttcggcgatcagcatgattggcgacagctacgcccagaaccaaaaagagctcaagcagtactaccagcaggtagcagagcaagggaacgccctgtggcgcgggatcgcgttaactcgcgatgactgtctgcgtcgcgacgtgattaaggcgttgatctgtaacttccagctggatatcgcggctggtcgaggcgcagtgggacgtggattttgcgtcttatttcgccgaggatctgaagctgctggcgccgctggcgcatga

SEQ ID NO: 246825 - DNA, 1446 bp, Klebsiella pneumoniae
atggctttaacaggttcatcccgggacgaaacgcaccggcaggaacaccctgactcagggcggatttccgggttggcactgctggttgccagcgcattttttatggagtttcttgacggaacggtgattgccaccgctctgccggatatggccaaggcttttggcgtcacggcaatagaccttaatattggcatcagcgcctatctattaactctggcggtgctaatccctgctaatggctgggttgcagagcgttttggcgcacgaaacgtctttactctggcgctatgcatttttacgctttcatccctgctatgcggtctgacccatcatgtgactgagttcgttctgatgcgtattcttcagggggtcggcggcgcaatgatggttcctgtaggacgcctggtcgttctgcgaaccaccccgaaagatcggctcattaaggccattgccaccctaacctggcccgcactggcggccccgatcattgggccgccgcttggtggattcattacgacctacgccagctggcactggatcttctttctcaacgtcccactgggactgatcgccattgtcttgtcattgcggatgatgccaaaccagtcggctaacgaacgcaggccgtttgatttcacaggatttgtcgcaaccggcgtaacgatgctgtgcctggttgccgggctggaaatgctcagccaacaaaacgttagtctgaccggggctgcagtaaccattactgttggccttgctaccctggtctggagtattcgtcatctattgaccagtaaaacgccgctgattggcctgtcatcactcttggtcccctcatttcgtatcagcatgcgtggagggttcatccttcgtgcaacgatcagttccgcaccctttatgctgcctctgatgtttcaggtaggttttgggatgaatgcgtttgaagccggctcgatggtgctggccgtttttgcaggcaacctggcgatgaagcccgcaacaacgccgctgattcgctattttggcttccgtaagctgctcatcggtaacggtatcgcctgcgtattgacgctgttactctgcacactgctaacacccgactcgccgcatctgataacgctggtgctgttgttcctcggcggattgagccgttccatgcagttcaccggtatcagttcgctggccttcgctgaagttccgtcacaggagatgagctcagccaatacgctgtttagtacatcacttcagctcgccagcggactgggagtgacaatgggcgcgctaagtattcgcatgggcagcatcctcagtgaggaacttggtttcgccaccgttcctggaatggggtttcgcctgggatttgtcgtcattgcgattatcactgcgctcggagtgtatgacatgacgcggcttgcgccgaatgcgggtatcaacgtctcgcagaaaaaatag

SEQ ID NO: 246826 - DNA, 747 bp, Klebsiella pneumoniae
atgagcagtgatgtagagagtaatggttctcaagttatcgctagggctgcgaaaattcttcatgctcttgaagcacacccgggcggtcgaactatttcgcagctttctcgtgagacagctttgcctaggacaactgtccatagattggtcacctcgctggaatcgcagcaattactcattgcaggtgcttcaggggttaggttagggcctgccctagcacgtctcgcagcttcagcacacactgacattatttctctttcaagagcatccattgaaacgcttgggcgaagaactcgtgaaactgttgatttaagtgtttatagagggagtcacgccgtttcagttagtcaatacacttcagaccaagagcttagagtggtttcggctgttggcactgctttcccgtgccactgtactgctcatggaaaagctattctggctaattttagcgataagcaaatatctgatcttattggaacgcggccggatgtaaggaccaaaaacaccctttcaacactgccagaaattcttgaggatctgcgggaaacacgcgaagcaggatacgctattgattgtgaggagcatgcaagaggtgtttgtggaatcggtgttcatttagatattggtcttcatgaacattacgcagtttcaattgcagttcctgcaatccgatttgaggaaaagctcgaccttctacttagctctttgcttcaatgcaaggctgagatagaggcttcaataagatag

SEQ ID NO: 246827 - DNA, 1152 bp, Klebsiella pneumoniae
atgaatgaaatgaacaaaatgggggcgtttacgctcttggcggttgcatgccttactatcatggtgggctgcgtaatcgttcccgggctgacagaagttgctgaaaatcttggcacaccgtctgcagcaagctggctcgtcaccgtaccatcactaggggttgtagtatttggtccattagccggcaatttcatcgacaaggccggggcctataaggcactctcttggggccttttcctttatgggcttttgggaaccgcaggagtttttcttcatggacttgtgccggtaatgattgatcgcttactgcttgggggagctacggcaattgtaatgtcagcaggaaccgggctgatttctacattttacagcggacgctctagattaaaaatgattgcctcgcaaggcatgtctattgaattaggaggggtgatattcctattcattggagggatactggctacattaggttggcaatggccatttgtattgtatcttgtcagttggctcttacttgctatgcaactcatttttatacctgaaccatcttatgaagtttctgaaaagaatgaggtgcttgatggtttatctaaaccagaaacaatcggaagcctgaagccagtatttatcgcagcagtattctctatgatttgctttttcaccggcatcatagtgattcctcaacaattccacaaaatgagcataggctcagcggaaactggttactatctgtcattcatttcactagtagcagttggcgcggcagcattgatgccaaaaatagttgaccgcattcatgagtttggaactctttacgctgcttttgcgtgttatacattggctcacgtcatcttttccatagcttcttctgtttcgatgtttatagtgggtggtatcttgatgggattcggttttggattgtctgtcccgcttgttaatcacatgaccgttgagcaaagccatatgagtgtcagagggcgaaatctagcatggctttcgatggcaattttttccggtcaattcctttcgtcgtttatggagttcatacccggagattcatccactgtattcttaggggcagctatcgttggggttgtagttatttttatattggcagaaaatcactggtcgcgccgccgtaaaatagcataa

SEQ ID NO: 246828 - DNA, 477 bp, Klebsiella pneumoniae
atgcttattgactctttacagacaataaaacaacacgttgggcttgggccacaattgattgatggtattgagcgcattcttgctattgatcttttcattcttgagccgggcgattatcatctggtagagggggaagtgattgtcaaaataatggacagggagttatcgcatcctccggcaaagccctatgaagttcaccagcgttatattgatattcatattccattaagtggaacagaggttcttggctatattagcggaaaaagccgaatgaccattgtggcaccgtttgattcggataaagatattggctttgccgattcgcatgagaaacacgctgaggcctggttgacgattcctcccggcggtctggtgattttttaccccggcgagtggcacaaacctgcttgtagtttagatgctagttacgtgctgagaaaagccgttatcaaaatcaaagcgccatcattacgatga

SEQ ID NO: 246829 - DNA, 696 bp, Klebsiella pneumoniae
atggcaattggtaatcgtgtatttctgaaaaaaccgcaagatgctttacccttgcttgaagcatttcgcttgcttccggcagccgtggttgctgactgcatgagtcgtctgcccgcattgtcatcagaaattaagttgatgagtgcaccgaaaaaaccggtgatgtgcggcttggccgtcacggtgaaggcccgttctggcgataatctgatgctgcacaaagctatggacatcgcaggtaaaaatgacgtgattgtggtgtcaaatgaaggtgatcgcagccaatcattgatgggagaagtgatgagcacttacgcgcagttccgcggcattgaagggattgtgctggatgcaccaatccgtgatatcgagggaatttccaaaatgtcgttcccactgtatgccgcgggccacacaccgggtgggccgttcaaagatggccctggtgaaatcaatgtgcccattgcctgtggaaaaattcatgtctgccctggtgatattgttctgggtgatgccgatggagtcattattattccacggctggatgcggcccgaattctggaagaagcacagcaatatttaattgttgatgaccataattttgaactggctaaaacgggggctctggagcgtagctggattgataaattattcgctgctaaaaatgtggatgttatcgacgacatttacttctaa

SEQ ID NO: 246830 - DNA, 1512 bp, Klebsiella pneumoniae
atgaacaatcagtcttcgaccttacactggagccgaaggatcactcgcccacaatggaaggcattctgggctgcatggatcggttatatgctggatggttttgattttgtcattatcactctggtgctcacggaaattatggcggaatttaatattccgaccattgaggcggcgggtctagtctctgctgcgtttattttacgatggtttggtggtctcgctttaggtgctatgggcgataaacttggcagaaagagcgccatgatcaccagtattattctgtttgccggtggtacggtagcatgtggtctggcaccaaattacacttggttatttatcgccagggttctggtcggtgtaggaatggctggggaatatggcaccagttcagcttatgttatcgaaacctggccgaaagacatgcgtaataaagccagcgcatttcttaactccggcttttctgcaggggccatcctctctgtccttgcctatagcatcatcgtcccattatggggatggcgagtactgttttatgttggggtgatccctattctgtatgcgctctggctgcgacgggcaataccggaagccgaagagtgggcaaagaatcgggcgaaagataaaaagccagtatttaccatgattgacctgttgtaccgcaatggtaatacggccaaaagctcgatgaatatcgtgatgtcgattattgctgccatcgcactctatttctgctttgaccacagcaggcctgtagcactgattgccgtactgggcgtaatcacagcgttgatctttgtttcgttcttggtgcagagcggcggaaaacggtggcccaccagcctgatgctcaccgtcattattttatgcgtctttttatacggatggccgattcatgcattgctgccgacctacttaaaaacggaattgcactatacgccggaaacggtggcgcttgtgttctcattcagccgcctaggtatggggctgggctgttgtttcgccggtatggcgggggactatttcggtacacgtaagacctatgtgctgagcttattaatcgcacaggtcattattatcccggtttttgcactgacgggcggcagcgtctggttgttatgtgtcctgattttcttgcagcagatgttcagccagggagttggcggtctgctggcaaaattaattagtggttattttgataccgaccagcgtgcggcaaacttgggctttatctacaacattggctcaatgggtggtgcattagccccagtgctgggtgcatctatcgcacaacatttcagcttgggaacagcgctcagtggactctcatttacgctgacatttgtggtgatcttacttatcggtctggatatgccctcccgcttccagcgctggctgaaacctgaggccgtacgttattacgacgccgttgacggtacgcctttacagggggcattcaccaaaaatacaacccaggaacaaatttccctggcggaaaatgttcataagtcatga

SEQ ID NO: 246831 - DNA, 951 bp, Klebsiella pneumoniae
atgagcgaaaaagctattcatgtacttgtaatacaaccattaatggaagaactggcaaagaaaatagctaatcggtttatttgccataacctttttcagtgcgaagatgttgatgactatttacaacgtcatggcgataagattcgcggcgtcgccacccgaggtgatgttggcctttcatctgaggtaatggaaaaattacctaacctagaaattatttcggtatttggtgtcggtactgactgtataaatctggaagaggccgcagagcgtaatatcaaggtgacaattacctctgatattcttacggaagatgttgccgatctcgctttaacatttattatggcattatcacgcgatctgcaatatcaagacaagtttgcccgtagcggcaaatggctcactactccacctcgactggcgagcaaagtcagtgggaaaaaaattggtattcttggtttgggcaaaattggcagagctattgccaaacgcgccagcgccttcgatatggagattggctattgcgacagccatcgaatcagcacagttgattatcgttattttacaaacccgagcgaacttgctggtttcgccgattttctggttctggctataccaggtggtgagaaaaataaaggactcattgaccttaatattttacgggcattgggtgaacaagggtcacttattaatgtcgcccgtggtgtgctggtaaatgaagttgatcttattgaggctttgcaatcaggcattattaagtccgctgcacttgatgtttatgaaaatgagccggaaattaaaaaagcctttttatctatggagaatgttattcttacaccacatatcgctagtgcaactgtcgaaacacgccaacaaatggcgaaaaatgtctttgataatttggatagttatttttcaaaaggaaaagcaattactgatattcaattttga

SEQ ID NO: 246832 - DNA, 825 bp, Klebsiella pneumoniae
atgatgttaggtgcaaagagcaactccattggtgtactgattccctcatttcagaaccaggtcttttcggacatcttatccgggctggaatttgtcactaatcagcatgggtaccagctcttaatttcggaatataactattcgcgagaaaaagaggaaaaacagatcctcaacttactgtcatacgatattgagggtctggtgttatgtgataaaaatcatacgctacgggcgcaaagttatttacattcacagaagattccggtgattgaaatcatggatacgcttgactcgcaactggatattgagattggttttgataataagctcgccgcctatcatatgaccaatactatgatcaccagcggcaagcgcaatatctactattttggctcacgcaatgatcagcgtgataaccagcggtatgtcggttatcgcgtggcgatgcaggagttcaacttgacggcgcggcgtatggttccaaacagcatttcatcattttctctcggtgtcaccatgcttagacaggtgctacgtgaagaaagaaaagccgatgggatattttgtacaaatgacgatatcgccgtcggtgttttgcaagaatgtttacgccttggcatacgggttccacaggatatggcgattgccggtttccatggtcttgatattggcaaagccgtgacgccaaccctggcaagcgtaatcacgcctcgatttgaaattggtaaaaaatctgccgaagttattatccacaaaatgaacggtgctcatcacaccaaaagttttgatctgggatttaagattttcagcggtgaaacaatttaa

SEQ ID NO: 246833 - DNA, 765 bp, Klebsiella pneumoniae
atgaacgaccttttttcactggcgggcaaaaatgtgctcattaccggttccgcgcagggtattggctacttattagcaacgggcctcgggaaatacggcgcgcaaattatcgttaatgatatcaatcaggagcgtgccgatgccgccgtcgccaaattgcatgcggcggatattcgcgctgttgccgcgccgtttaatgtcacccaaaaagcggaaatcgatgctgccgttgcccgtatcgaagagcaaaccggtccgattgatgtcctggtgaacaatgctggtatccagcgccgccatccgtttaatgaattcccggaacaagagtggaatgacgtgattgcggttaaccagacggcggttttcctggtgtcgcaggcggtcacgcgccgcatggttgaacgtaaagccgggaaagtgatcaacatctgttccatgcagagcgagctgggccgcgacaccatcacgccctacgccgcctctaaaggtgcggtcaaaatgctgacccgtgggatgtgcgtcgaactggcacgacacaatattcaggtaaatggcatcgccccgggttacttcaaaaccgagatgaccaaagcgctggtggaagacgaagcgttcaccgactggctgtgcaaacgcacccctgcagcacgctggggcaacccggaagagttgattggtacggcggtgttcctctcctctaaagcctccgattttgttaacggccatctcctgttcgttgacggcggcatgttggtcgcagtgtga

SEQ ID NO: 246834 - DNA, 1032 bp, Klebsiella pneumoniae
atgaagattaaaactcaatcctgcgttgtagcgggaaagcaaactgttggtgttagcgaccaggaaattgaatggaataataaaggtacattggtgaaaataacccgagggggtatttgtggatccgatttacattattatcaggaaggcaaggtagggcatttttctgtaaaagctcccatggtattaggccatgaagtgattggtaatattgttcatacagattcagataaattacaaaaagggcaaaccgttgcgataaatccatcaaaaccctgtggtcattgtaaatattgcctggcgaaagaagaaaaccagtgtacggaaatgcgtttctttggcagcgccatgtatttcccgcatgttgatggcgggtttacccgttttaaagtcgtggataccgcgcagtgtattccttttcccggaaatgccgatgccaaaacgatggcctttgccgagccgctggcggttgctatccatgcagcgcatcaggccggtgatttacagggtaaacgcgtctttatctccggcgttggccctattggctgcctgattgtgagtgcggtgaaaacgctgggtgccgccgaaattgtctgtgcagatatcagtccgcgctcccttgaactggcgaaaaaaatgggagccgacacgctgctcgacccccgtagcgcagacctgacgccatggaaagctgaaaaaggctatttcgatgtcagcttcgaggtatccggccatccggcctccatcacgacctgccttgaagtgacgcgcgccaaaggggcgatggttcaggtgggcatgggcggcgcggtgccggatttcccgatgatgatgctgatcgccaaagagattgcgctgaaaggctctttccgcttcaccaccgagttcaataccgcggtctcctggctggcgactggcgtggttgatccgctgccgttactgagcggcgaatacccctttaccgagcttgagcaagcgctgaaattcgcgggcgataaaacccgggcggccaaagttcaactcgttttttaa

SEQ ID NO: 246835 - DNA, 528 bp, Klebsiella pneumoniae
atggctggtgaaagttatattttgatgggggtttctggcagtggtaaatcattgattgggaccaaagtcgctgccgtattgggggcaaaatttattgatggtgatgatctccacccagcaaagaatatcgataaaatgtctgccagtattcccttagccgatgaagacagattgccctggctggagcgattaaatgatgcgtcttacagtctgtataaaaagaatgaaacgggtttaattgtctgttcagcattaaaaaaacgttaccgggatattctgcgcaaaggcagcccgaatgtacacttcctgtggctggacggtgattatgaaaccatccttgcgagaatggctaaacggcaggggcattttatgccgcttgagttactcaaaagtcagttcgcggccctggagcgccctgaacaggaagacgatgtcatgcgcatcgacatcaaccatgaggtcgataatgttgttgcacaatgcattcactccattatgacattcagggaaaaaatatcggataactga

SEQ ID NO: 246836 - DNA, 420 bp, Klebsiella pneumoniae
gtgagtgaacagttagtaaatcttgaaaatttagaaaaacctacactgcttaatattttggacaaatatttcattgaatatgaaatagacggggatggcgatattttcttagaaaagccgaccaggctttatttagaaataaataaagaaaaggaagtcttaagaatgtacggatttatacattacaatgactttccaaactccagctatatacctaagtttattgataagttcaataaaaatagttacacattaacttatacattaattagtgagagatccatcctttgtgagtatcacatatttcttttgggaagcatagacgaaaaagggttgataaaatcaatcaaaagaacagagtctgaaattatacagacaaaagaatactgcctatatgcaaaagaaataacagaagaatag

SEQ ID NO: 246837 - DNA, 495 bp, Klebsiella pneumoniae
atgatactatctctagcagctaagcataggaaaaacctaatagctccatctatcgctggaggcattatttattcctgtagtttctttgagatatctgccaaaatcgccgcgtttgcaccgatcgctagcgaagtcttagttatactttttttttcttggtgtggtgtgcggactttaaagagatgcgaaaaagaagaaactgatgctgacaaaaagataaaagataatcttgatggcgaacttgattattttacaaaaataatcaagaacatcccagaaaccagttcggaggctaaaaaggcagctgaaaaacacattggtgatctaataaaaatgagagcggagcattccaaatgtatgcacgaaaaattagatgccaaaagaagtgaggcttcagctaatcacaaaaaatccaaagaggatctacttgaactagaaaatgacatggatgagcagctaggaaaaataagtagtgctattgctgatgataagtaa

SEQ ID NO: 246838 - DNA, 996 bp, Klebsiella pneumoniae
atgacaccgcaacaagaaatcacaatttttttctcatggcaaagtcaacttgataagaataaaaataccaatttcataagaaacgccttgcgaaaagtgattaaaaagattgaaaacaagagaaaaaatataaaattcacacttgatgaggcaacgcgtggggagactggaagtcctagcatcactgaaactattcagcaaaaaatacctttatgcaatatatttattgcagatgtaactataatatcgcctaaaaacagtgaaagtatattaacacctaatcctaatgttatgtttgaacttggccttgccgttgctgaaattggttggctcagaacaatctgtctcgtaaatgaacattacaaacatactattaacgatttaccattcgacatcagaggtcaacgagtatcactttataactctgatgcatcagaagaaaaaataattgaaaatctttatgactatataacagcaatcattgataaaaacccaaagacaccacaggagctaagaggggtttcaatacaacaaatacagcatgagcgaaacatcaaaaatataacttttataatgagttatttacatactccaactctgaataaattagtaacagatgcgccattaatcatacacggagatgtatttatatgctgggcgtcattcgatagcattctgaatgcaaatgaattttacttatatgataataaactgaaggaaatatttagctcgatatataaatcttggggtaatttgcttcatgctggtgcttattattatgaaactgactcaaatggacgtgaccacatattccccaaaaaaaagacatataagtcagaagaagccagagatgcatggatagaaatagaaaaccaagcaaaaatactaaaatctcaactcagagagttaacaacgtatctccatgaaaattacgttgaaatagatttagatgaaactaaccaacaagcgtggaaagatttaattgagcatcggtaa

SEQ ID NO: 246839 - DNA, 351 bp, Klebsiella pneumoniae; identical to SEQ ID NO: 231803

SEQ ID NO: 246840 - DNA, 384 bp, Klebsiella pneumoniae
atgggtttcaaaataacacgcattgaccaagctagctcaacatataatgagttagaaggaacgtttcgattcatcttagatgggattcctgatgaaacttggcgaaatcttttttcggacaaggttaattcctaccaagggaggaacttcattacccctcccgttcatactaaggacactagctatatagacgcaaaggcagaaattcatgggcaaaaaaaccttgcgttgatatcaagtgatcttgttattataattgaagatgtgaatgttctatatgatcaagaggttaatagaattgccgagatccaaagagctcagagtgaggctagagcatctttagaaaaaaatgttgccaaacaaattgctgggattaagttttaa

SEQ ID NO: 246841 - DNA, 312 bp, Klebsiella pneumoniae
atggtaaaaccggactgggaggccatcgagacggcgtaccgggccggggtgatgtccctccgtgaaattgcgtcgcagcacggcatcagcgaagacgctatccgtaagcgcgctaagcgtgacgactggtcatgtgacttgaatacgaaggtgaaagaatacgctgacgatctggtacgcaaagcagaggtacgcaaacaggtttgcagtgaagccactttgaacgaacgcgaactgattgtagcgactgctgaggtaatcgcaaattccgcatggagcatcgtggtgatatcaagcgcgcccggcagataa

SEQ ID NO: 246842 - DNA, 801 bp, Klebsiella pneumoniae
gtgaaaatatttgttagttggtcaggtaaccgtagcaaagccgtggcagagctgtttagtgattggttaaagtgtgtcatccaagtttcaaaaccatggatctcaactagagatattgatcgtggggcaatctggttttctgaaataaatgataaattaagggacgtgtctgttggtgttgtttttctaacacaagaaaataaagacaaaccctggattttgtttgaaaccggagcattagctaaaggattaacctcaaatagagtatgtaccttccttattgatttaaaaccaactgatttacaagacccgttagcgcaatttaaccataccattccagaaaaatctggcttatgggaattaacaagaacaataaatgctagccttacagagaactctcttgatgacaaagttcttgaaaaagtattcaatacatactggccgcagtttgaaaatggttttttacaagctcttgaagataatcctataggtgaagtaattcctcctcgttccgaacaagatattctttcggaaattttaaacaataccaggtctttaactcataaaatcagaaaacttgaagatgaagtatatctaaaatctaacagtgttaataaaatactaacaagcataacaaatgaaaccatatcccaagctaatgggaccttaaaaaccctttatccttcagttgaaaaggatggatatatttacatccgaacagacaatgggaatataattaaaaccaaaaaaaaggatctaaccttaactgcaacacactccatcgatgaaaataaagattga

SEQ ID NO: 246843 - DNA, 435 bp, Klebsiella pneumoniae
atggacaatgagttgctgattaaaatactggctaaacaagaggttctggaacatcggttgaatgtgcaggaaaaactcctgcatattcttattcaggccgttccggaagagcaacgtcaggacctagagggcctggtcaatgcatatcgggaatttgcatcagcatcaggtgatcaacagtgcgccaggggaatagagctaattctcaccgaggctttggctcccggggctaatataaaagacgctacaaattgtttccattttcaggcgcagcttttgagcgatgtgccagaacatcagaaggaagcgatgatatcttggctgtcaactgcgaccgttgacgagattgttgatgaattttctctatctcggaatcaattgctgcctggagacgctcatcccggcttccctgacgacgaaaaaggcgaaaaatag

SEQ ID NO: 246844 - DNA, 504 bp, Klebsiella pneumoniae
atgagtaaatttgaagagatttgtgcagcttataaagtatcccaggataattattctacctaccgcgagctttctacggcttttgctattggtttaggtcgcagatacatccagtaccttggtttaaccaaagcaaattttaaatgggttccagagaatgacacttcaaccgaaaaagaaggtattaccatccccggtgccatgcatctggatgacgatacttactggcatatgggcctcaagatcaaaatattttcagcacctaacgtctacccgcaacaaaggcttttgatcattttcaaatttaaacaaaaagataaaagtaagtttgaagtgatggttgatggtgacgataagaaacatatcatcgaaacagacggcgatgcctcatatacagtcttcttcaaccacttacagaaaatcatcatgggcctttatgaagatgacctggataacttcctcgcgtcccagcaagaaaacaggactattggtttcatccagtag

SEQ ID NO: 246845 - DNA, 240 bp, Klebsiella pneumoniae
atgaaacccagtactctgaagcccggtatgcgtgttttgctgactccttctctgggcaataccgctgcacgttcagcaacagtaatcaaacgtcatcctgcaggctgcggacggaaagccattaccgttgtgaatgtcgatgattttcgtgggctcagcgggcccaacgatcagggcaccgtccatctttccgattatgaggtctcccgcttgctcacccctctggaggtcagatcatga

SEQ ID NO: 246846 - DNA, 126 bp, Klebsiella pneumoniae
atgaaattaaccgtaggcaatgtccttttattgtgtgctcttggctgtatcgtcatatgggttgctgtcggttttattggctattacaccgtcattgctgttttggagcattttcataaaccgtaa

SEQ ID NO: 246847 - DNA, 666 bp, Klebsiella pneumoniae
atggtacacgtttttacgtatcaactcgcaatttttttcactaacaccattaccagaccagatcaatttctatcaaagttaaacgaatcctcgggtaacattttcgattcgatgcctcagattataccattaccacctgaaatccctccagaaattcctcgagttagttcaacgagtgcatcaggtatttatagcatcaacatttcactatcaagaatggatataaccatgaatatggttgactcacctctaaaggaaggcgatgctatttccgatttcattctaaaagctaagttaatcatcaaaaacatacctagtgatgttcaattaaatagaattggtattataggtagctattttgagttggataaaaacccagcgataacactctcacgtaaactagcaaaaaaagatttgggcaatgtctcagaattcaatttaagatataacaagccatcatcagatttcggctacacatttaacaatatctattcaatcaacaacgctcagatcgatactcgttccatttcttcaaatggagtcttcattcaaaaagatataaataacatgcctagcgagaccccgatgagtaaagatttgctcattgaaatcctcactaaaaaaataaaggaattagcaacaagctctatcgaggggattttgtaa

SEQ ID NO: 246848 - DNA, 381 bp, Klebsiella pneumoniae
gtggatgcgatacagcgcatcgaattccgcttccgtggcgttaagaaatcccatgccgctggcgttgccggcattattgaccagataatcaaatttatcggcacccagctccgtcagcgcgccctgaaaagcgctaacaaatgcgtcaaaggtgtcgatttcgccggcgctgaaaggcaacgcgatcgcccgggcgcccagtgcttcaacccgtgtaaccacctcgttcgcctcggcaagacgcgttttgtaggtcagtactacatttacgccgcgctgtgccagcgcttcgacggtcgcgcgtcccaggccgcggctgccgcctgtcaccagggcgatttttgcgctattgttcatgttttctccttttctctctgctga

SEQ ID NO: 246849 - DNA, 441 bp, Klebsiella pneumoniae
atggctaaagacggaaaacacgtaattcacgcgggcggtatcttcgcgaacccacaacttcaccgtgaaggtgctgcagccgctgatactccacctggtacgattggtttcttcgacaacactacgaagaaattcaccgcctccgtggatggtaatgaagccgcgatcctctacgtagccaactatgactacctacgttgcaaaaccgtagatgacgtcatcaaggctggcgactgggttgttgccttccacccaaccccaggcgttttcttcaacgttcccgctgcagcaggcacttacacaaaagggcagccgctctctgtggccaacggccgagttaaagctgttggtactgatgaatcggtccgctgctacgtagaagaagaccgctcatacaccattgcaacggcaggtgacctcctgcgcgtggtcattaaataa

SEQ ID NO: 246850 - DNA, 1077 bp, Klebsiella pneumoniae
atgtttgtattctcaactaaacaagcgaccgaaagcgggaacctcgaagccaacatggctcagttcaatgagctgacgtttgctcgtaattccagcgctcaggccgtagcagactttattgctcgtgcccgtgttcgcggtgaagcggcaaacgccccggtactggacgcagtaaacgcagtcgacgatatccgccgtctgtacaaggcctatgaccagaccgtgctgaagcaattcgagccgaacaccgaattcacgctgctgaacgacttgatgccgctgtctcgctctgttcgcctggaagagtctgtgtacgaatacgctcgcaccggcggccgtggctgggcgcacacgtccatgtcaggtcagattggtgctgcgctggatgcgaagtcttacaccttcgacggcaccatggtgccgatccacgacagcggctttaagtttaactggcgtgatccggtattcaataaaggctctgcgctttcatccctggccgatgctcaggcgggctctgtcgatgacgtacgtcgccagtatgtcgactacatctgggaaggtttccgcgatgcggccggtaactacatcaaattcgatgacaagacctggaagggtttacgtcatgatgagcgtgtggcgcaggtgacactgaccgttaacttcgcaaccagcaccgatccgaaagccatgcgtgccgcggcgatcgccctgcgtgacgtcctcaagctgcaaaacatgcagtacggccagcagacgtggtacgtctccagcgaaatcatgtccaactgggaacagtacttcgacgtgaactctctccgcaccgtgttagaagagatctccaaactgtcaggcatcgcggcaatcaaagaggatgctgagctgaccggtaacgaaatcgtaattgtgccgctgcgggctggcgtgattgctcctatcgtcggtcaggcgttcggcaccgtcgccgatccgcgtcagttctacaactcagattacgtttggcgtacctggggagctgctggcctgatggttaagcaggacatcaacggccactactctgttattcacgcttcgagctaa

SEQ ID NO: 246851 - DNA, 402 bp, Klebsiella pneumoniae
atggcactcgtaaaggtattggtagcaaacctctttgccggtgccagccttcaaagactggaggctgggcaggtttatgacgtcgatgactcgatcgctgaaaagtggatcgagcagggtaaggtggaaaaatcaactgacaagaagggtgagaagctcgtctttgaagtggcgacaccgtctgcgcctgtggcatccggtgcatccgatttgcagtcaaaactcaatgatgcccttgagcagctgaagcaggcccagtcagacgctgatgcaaaagacaaagagcatgctgacgcccttgagcagctgaagcaggtgcatgcggctgagctggaatcggcgaacaaacgcgctgaagaggcagaagccgccctggcagaagcaaccaagaaggcgaaataa

SEQ ID NO: 246852 - DNA, 291 bp, Klebsiella pneumoniae
atgaatatcactgatgaagagttgcttcaggaaatcctgaaaatcatcgataaggcgccgttaactgagcagattgcgctaactaatttgattcaacgatatcagttggctgtctctgtggctgagtttgcattacccggttttccgttaggggttttagactttctctcggccgcaataaaaccagccacctttctttcctctcctcaatcgtctgatctgcattgtaacgcccaagataaagccgatgagaaatcagcactagcacccaatggggataaataccactaa

SEQ ID NO: 246853 - DNA, 444 bp, Klebsiella pneumoniae
atgacagctcaaatttcagcgtatggccggctggtggccgacccgcagaccagaacaacgggaaaaggtacaaacatggctatggcccgcctggcggttgcgctgccttgtaatgcggcagataacggggaggctactttctggttgggcgtgattgcctttggtaagcaggctgacgcgctggctaaacaccataaaggagaccttgtcagcgtggcgggtaatatgcagatcaatcagtggactggtcaggatggcggtacacagcaaggctatcaggtcattgcggacagtatactcagcgccagaacggtacgaccaggaggtaaagcagggcaacagggtcaagctacggatgccctgcgccgtgcccatgagcaacaaccgcccgcgaccgggtatgaaggattcgaccagaccccgccgtatgacgatgatttttag

SEQ ID NO: 246854 - DNA, 468 bp, Klebsiella pneumoniae
atgctgtcgcaaattgatagtggtgctgacgaagatgatgaagagctaaaagcgatgattgatgactggaacaggcaggtagttaatccgtatgaattctctgatttccgtgacttttcctcatggaccgacgcaaagaactttacccggatggcatttaatcaggagaaatacgttgtggatttaacctgggatgaactcgttcagataattagtttcgtgtgcaatgctgaaggcaaggaatcggaacaaagctacgcgctgggattgctggagataaactttgatgccaatccgtccgatctcatctactggcctaatgaatggttccagaatgaagacatgctccatgtagatttgacgcctgaagaaatagccggatacctgatggcaagatctggccggcttctaagcgatgcgccacaaatcgacctgagatacccgctacctcccagcgcagcaagttaa

SEQ ID NO: 246855 - DNA, 315 bp, Klebsiella pneumoniae
atgacaatgataaaaaagcttccattaaccatgccggttatcgccgcgttttttccgcttacctctgtaatggcgcaagaatttactcaggaacagatcgacgccatcgtcgccaaagccgttgataaagcgctggccgaccgccaggcgaaaatcgacgccgcggccgacaaaaaggtcgacgtgatcaccaacccgcagaccaccaccgcctcgccggatatggccattccgttcggcctcaagttcagcggctacgcggctttgttaatggaatggtcgcctcccatctcttgtgccacagtgggacgataa

SEQ ID NO: 246856 - DNA, 4614 bp, Klebsiella pneumoniae
atgaatgcgctttcggagttactttttcgaattgaacaagcttcacccactcagcgtgacaaaggtacaacctttgaaaatctttgtgttcagtattttattaatgaacctaagtatgccgaactctacagcgatgtgctgagttatgccggatggatagagcaatttggcgatactgtcgggattgcgacgaaaaaagatgccggtattgatttggtggcgattactaaaaccggtgactttcatgccattcagtgcaaaaactacaatcagactaaaatagccaaaaaagacattgatagctttcttgctgcctccgacaaaacctattttacgctccggtatattgtcgcctccacggataactggacggaggaagccaaagacatgctgcgggacaaggcggttccggtcacggcattgagtctgactgaccttgaacaaagcgcattagactggacacaattcgaatttgatccggaatacaaaccggtgatgaaagcgaaaaaacagctccgtcctcatcaggttcctgcgcttgaagctgtcaaaaaaggactcagtacggctgatcgtggcaagctcattatggcgtgcggaacggggaaaacatttacctctctgcggatagcggaagctgtcgccggacgcgggaaaacggtgctgtttcttgttccgagtctggcattgctgagtcaaacgctggatgagtggacacaggatacactgattgatctgcgctgtttcgcggtctgctctgatagtgatgttggcaagaaaaaccatgatgacaatgttgtcgtcgggatcagtgatttgaaatatcccgccaccacgaatgcaaaaagcctggtgaatgcgtttaatcagcccgatatttttggcagtgataaacaacctcacatgaacgtggttttttcaacttatcattctgttgatgtgatccatctggcgcaaaaactgggctttcctgagtttgatttcattatttgtgatgaagcgcaccgcacgacaggggcgacttttgagggggatgatgagtctgccttcgtccgcattcatgataatgcgtatattgccggtaaaaagcggttatacatgaccgccacaccgcgcattttcggcgatgatgcaaaagagactgaaggtgtcacactctgctcgatggatgatacaaacctctacggtgacgacttgtatgttattaccttctcaaaagccgttcagttagggatattgtgtgattacaaagtcattgtactcgcagtagaagaaaagcatgtcagccgccgcattcagtctttactgaaggatgaaaacaaccagcttaaagtggatgatgcagcaaaaatcgtgggttgttggaaagcactggcaaaacagggactagctgcctctgatagtagtcaacctgatgctatgaagagggctgttgccttctgtcaggtaattgaaaaagattttcgcggcaaaacgcataaagtcagttcaaaactcatcactgaaatgttcggggcagtggttgaagcctatcaggcatccgagattgaacatctcagggaaactgcgccggagcaggagattgacccgtcattaaaacttcagtgtcaggttaagcatgttgacggcggcatgaatgccacggagaaaaagtccaaaattgaatggctgaaagcggaaacagatgagaatgtctgccggatattgtccaacgtccgttgtttatctgaaggcgtagatgtgccttcgctggatgcagtgttgtttttaaccccgagaagctctcaggtggatgtggtgcagtcagtcgggcgtgttatgcgtcgcgctgaaggtaaagagctgggctacgtcattcttcctgttgtgatccccgctggtgaagagccggaaactgccttaaacaataatcaggcataccgtgtcgtctggcaggtgctgaatgcacttagggcgcatgatgatcgctttgatgccatgataaataagctggaatttaacggcaaggacaccgccagaatggaggtggttgccgttgctgataacgtggtgaagaaaaccaagcggcagactaaaaaatcggagcttgcagggaaagcacgtaaaagtagtggtattggctcggcggttacgtcagcgcctgagcagtttgatattgagttctcagtcggggaaattgagcgagcactgtacgccaaaatcgtcaaaaaatgcggtaaccgccatcactgggaagactgggcgaatgatattgccaaaattgcccgcacccatatcgaccgtattcacgttattctggaaaatcctgccaatacggccgaaatcagcgccttcagtgcatttgcggatgaactgcgtgatgacctgaataatagcgtttctgacgatgaaataattgaaatgctggcacagcatctgattaccaagcccgtctttgatgccctgtttgctgattacaattttaccgaccataacccgatgagtacggcgatgcagaacgtcctgaatacgttgcaggagcatcatctcgaaaaagaagccagtacgctgaacagtttctatgagtccgtcaaaatgcgggctgacggtatcacgacggcggaaggcaagcagcagattatcgtgcagttatacgataagtttttcagaaatgcattcccgcgaatgacggagcgtctgggaattgtgtatacccctgttgaggtggtcgattttattattcacagtgtgaatgacgtgctgaagcaggagttcggacaaacactggcggacaaaggcgtgcatattcttgacccgttcaccggtactggcacattcattacccgtctgatgcaaagtggtcttatcccgccagataaactggcgtataaatttaaaaatgaaatccatgcgaatgaaatcgtcttattagcctattacattgcggcgattaatatcgaggcggtttaccacagcatcacggaagaatcggactacacgccgtttgaaggcatatgtctgactgatacctttgaaatgtatgaaaaagatgatttagtcagtgcagtgctggttgataacagtgaacgacgtaagcgtcaaaaggcactggatattcgggtgattatcggaaatccgccttattcaatcggacagtcaaatgctaatgataataacgctaatgtggcttatccaattttggatgcaaggatagaatctacttatgccaaaaattcaaaagccgttttgtctaaaggtttatacgactcatatattagggctattcgttgggctagcgatagggttggaaagcaaggtgtgattgggtttgttactaacgcaggatatattgattcgaattctgcagatggattacgtaagtgtttggcagaggatttcagtagtttatactttttccatttaagaggagatcagagaacatctggagaaaaatcgcgacaagaaggcgggaaaatttttggtagtggaagtcgtgcgccgatagctatagctattttagtgaaaaatcctgcagcaaaaaaatatggtcagatttatttccatgatattggcgattatctttcgcgcgaagaaaaattggaaaaaatctctgattttgccagcattaacggtattgaaaaaatacatggttggcagtcaattacacctgatgcttataacgactggctgaatcagcgcgatgatagttttgatctcttcttgcctataggtaataaaaaagacaaatcaaataattgtttgtttgtcgattattctcttggggtttcaacaaatagagatgcttgggtttttaactcttcgaagaagaagttaataaaaaacatagagacaacaataaagtattacaatgatcagttgagtgctggggttggtgttgatgatattcaaattaatcttaataaaataagttggacaagaggtttaaagcaaaacttcattaaaggtaataaaattgacatcaataatggtgaggtaagaattagtacatatagacctttttttaaaaatcatctttattttagtaaagaactgaatgaaatgcagttgcgaatgccatatttttttccttttgaaggcgttgaaaatattgttatttgtgttagtggagtgggggcaaaaaaaggattttcaacattggttatgaatggtttgttttgtatggatacagttgaaaaaggtcaagcttttcctttgtacatatacgaaaaaaaatcagatgtcataagtaataatttgggttattcaactggtacgaattactctaggaaagattcaattagtgatgaaggaattaagatatttcaggacttctacaaaacagaaaagatcaacaaaaaagatgttttttattatgtttatggtttgcttcattcaaatgaatatcgcgaaagatatgctgataacctttctaaggagctaccgcgtatcccatgcgtgaaaaagctggaagatttttgggcgttctctaatgcaggttttgacttggctagtctgcatttaaactatgaaacagtcgaaccatataaagcaactattgataccggtaacctgatttactcccagttagggaaggtgcgaataagcaggtcatttcttcccaagctgactcgctga

SEQ ID NO: 246857 - DNA, 303 bp, Klebsiella pneumoniae
atgcccatcacccggttgctcaagaaattctttatccagaactacaccgacgcgcgtccatgccgtgaggtctgcggggtcggctgtagcgaggcaggtttgctgctgcccgatagcccctggcacacccgcctgctggtaatacataagaactttattgctaacagggtcataaataacggacggcgtttcggtttgccaccccccagcgtcatcacggtatattttccccctattaacccatgggcctgtaatatcgtccgcctcaaacaagaaaataccggacggatcgtgtgtcgctga

SEQ ID NO: 246858 - DNA, 741 bp, Klebsiella pneumoniae
gtggcgaaacggctcggcgacgacgtgcatcaacgttttaccgaggggcgtagccaggaacagtggctgcagtatctgtacgccaaaatggtggcgaaagatccggcgctgccggcctacgaggatctgaagcgaatgggcatctacaagcgcaaagacccgaacggccacttcgtcgcctatcgcgacttccggcgcgatcctgaagcgcatccgctcaaaaccccgtccggcaaaattgaaatcttctccagccgactcgcagagattgccgcccgctggcagctggataaagacgaagttatcagcccgctgccggtctacgcctccacatttgaaggctgggacgatccgctgcgcagccagtatccgctgcagctgtttggtttccactataaagcgcgcacccattccagctacggcaacgttgatgtattacaagcggcctgtcgccaggaagtatggatcaatccgcttgacgcggaaaaacgcgggattaaaaacggcgatatggtgcgcgtttttaatcagcgcggcgaagtccgtcttccggcgaaagtgacgccacgcatcatgccgggggtctcggcgatgggccagggcgcctggcacgacgccaatatgaccggagatcggatcgaccatggcgcctgcatgaataccctgaccacccaccgcccgtcgccgctggcgaaggggaatccacagcataccaacctggtcgatatcgagaaggtttaa

SEQ ID NO: 246859 - DNA, 192 bp, Klebsiella pneumoniae
atgacgaaacaacagaaaacagcgctgaacatggctaaattcatccagaatcagtctctgctcctgctggagaagcttaacgagcttgatctcgatgctgaggccgacctttgtgagaaactccacgatgatgcggagcatcttttccgtacactgtcctcgagactggatgaattacaggatggtaactga

SEQ ID NO: 246860 - DNA, 1455 bp, Klebsiella pneumoniae; identical to SEQ ID NO: 104938

SEQ ID NO: 246861 - DNA, 237 bp, Klebsiella pneumoniae; identical to SEQ ID NO: 162285

SEQ ID NO: 246862 - DNA, 375 bp, Klebsiella pneumoniae; identical to SEQ ID NO: 209513

SEQ ID NO: 246863 - DNA, 600 bp, Klebsiella pneumoniae
atgacctgcttattcgcaccttccttagcggatattaaagcgggcgatattatttatctcaacggccatattgtgacctgccgtgatgtggctcatcgtcgcttaattgagggcggacgtgaattaccggtaaacgttgctggtggcgcgatattacatgccgggcccattgtgcgcccgattaaaggtacggaagataaatttgaaatggtctccgttgggccaaccaccagtatgcgcatggaaaaatttgaaaaagaatttattgctaagaccggtgtgaaattaatcgtcggcaaaggcggtatgggcaaaggaaccgaagagggctgtatggaacataaagccttgcactgtgtgttccctgccggctgcgcggtagtcgccgcggtctgtgtggaagagattgaagatgcgcaatggcgtgatttaggcatgccagaaacgttatgggtttgccgggtgaaagagttcgggccgttaattgtatcgatcgatactcacggcaataacctgtttgagcagaataaagtgatctttaatcagcgcaaagaaattgtcgccgatgaaatctgcaaacacgtgagctttattaaataa

SEQ ID NO: 246864 - DNA, 141 bp, Klebsiella pneumoniae; identical to SEQ ID NO: 36145

SEQ ID NO: 246865 - DNA, 660 bp, Klebsiella pneumoniae
atgaaagagcgcggaatgattttcaactctgaaatggtacgagccattctcgacggccggaagacgcagactcggcggattatgaaggtgcagccggtgctaaatggaaatttctatgaggtttttggggcggcgtggagcaagggcatgaagtctattccagccgtgccggggcatagcctgtctaccagatgcccgttcggtgccgtcggcgaccgcatctgggtaagagagaccttttgcccggtagatgacactcaatatggcggggagaagtgggtggattaccgcgctacacctcgttatgaagccagccaccccgctggttgggatgtggcgcctaacgacgccgaagccctcaaatggcgcccatcaatccacatgccgcgctgggccacccgcattcttctggaaatcaccaacgtgcgcgtggaacggcttaacgctataagcgaagaggatgcgcgagcagaaggcattattgacggtggctgtcttaattgcggggaacctgagccatgcggatgcgccaatccagagcctgacgctaccgatgcttttgcctacctgtggcaatcaatctacgggcaggaaagctggaatgctaacccctgggtttgggtaatttcttttgagcgcattgaaggcggtgcagcatga

SEQ ID NO: 246866 - DNA, 171 bp, Klebsiella pneumoniae
atgaaaaccaccaccggtcagtcgatgtgggtggtatcaggtgatgtatcgatttacaaacgcaagccatctggcgggatgtccatttttccagccaaaagcctgatgccaatcgacggcgacgacttcagcaatgaagaccagcgccagaaggaacgggagaatgcctaa

SEQ ID NO: 246867 - DNA, 651 bp, Klebsiella pneumoniae
atgactggatcatcgaatgattcagggcttttgcacgcccataccatctgtgtagtgggtggatgcgggttatcggtacggtcccgtaatagcccgtattgcgagaagcactacatgcgtgttaggcgtcatggctcttcagagaaacttagcaccaggaaggatggcaagctggagcacactggagggtatctcctggtgtatgcgccagatcatcccttagcatgcggtagttcacgggtatatgagcatcgcaaggtttattacgacaaatatggcgctggtccattcagttgccactggtgcgctaagactgtgggctgggacactcttcacatagaccacctcgatgactgcaagaccaacaacgagcttgacaatcttgtgccaagttgccccgtgtgtaaccagaagcgaggcgtagacaagatgagaagggcaatgcgagagaactcaagtcgcagatataccgctcatggcaagacgatgtgtcttaacgaatgggctgactatctggggatttcccggaactctattgagtaccgactcagggcgggctgggatattaacaaggtcttcagccctcgaattggtaacagcggtcccccaagccgcaagttggcgaaaatcgtgcacgaagctgtcaaatga

SEQ ID NO: 246868 - DNA, 306 bp, Klebsiella pneumoniae
atgcctggcatgcagttcctgatggcgctggcgctccggatgggccgcacgctgggcgaactgcgacaaaccatgacggtcggcgaattcaggatgtgggctgaatacgaccgtatcagcccgatcggtgatatccgtggcgatattctcaatgctcagctggtttcagcgatgtacggggcgcagggcggtaaagtcaccattgaagatgctcagcttcagtggagcacagaagaggttgaggtaaacgacagcagcgatccatttgccggattagaagccgcattgcttgctgcttcatcttaa

SEQ ID NO: 246869 - DNA, 846 bp, Klebsiella pneumoniae
atgagtaaattattatttttattgtttacttccgttgttgtcacggggtgtgctaacacaccccgtaattataactacctccaccagtttaacgacaaattagaaagtggtgtttttaaagagaaaataatcgaatatcccacgtcttataatgaaattgattggcagcatccaattaaggggcaggagcttcttgataaaattatatcaagaagagggaagagtaaccatgaaactgagcaggagtatcggaataaaaacattgatgtagatgggtttgttttctcagtatattcaaattgggattttgattatgacgcagaaaaggagacgatcacttttacagattatggtgatggctacctaagcagctacgcatctacatacacaagtgaatcagactttaaagatgtgagtatgtatattggctatcctatatcaggagatataacaaaaaacatcggtggatattacgggagcaatgcttttggtgcaactgcctatgttacaaaaaacgtaagtagaagatttataattattccatacaaaaagaatgatatctacgaaaaaaataaattaattttcgttaatggctgcaaggttgatagggaagaatttaaaaaacataatggcgacatgttagttcagtttatgtctcgtctgatatatccatatgtaaaaactgacgttaattatcagacgcctaccttagacaacccaattagtaatgatatctcaatttatatgttcagggtggatatcctagcagctaggctggttaatgtgaaaagtggaaagatatacccatgccaaatagggttgagaagtttatgggctaaacaatga

SEQ ID NO: 246870 - DNA, 222 bp, Klebsiella pneumoniae
atgtttatttttcataaagacaccacccttgaagacctcggcaatggcgtaacccgccgcattctggcccacgacggcaaaatgatggccgtggaggtgaattttgccgccggcgatacgttgtataagcggccggggattatgcacggctgcgtctgcctgcagcccggcacgctgctcgatacctttactcccattcgcgaagattttcttgaaggctaa

SEQ ID NO: 246871 - DNA, 390 bp, Klebsiella pneumoniae
atggcagatatttttacaggtaatggactttcattatcatataacaccgatacggggaacagatcaccacagggaattggcaacgtccagattaatgaagtggcagaatttccagtactggagattgaatcagaggtgaatcagtacgacacctacaacagcacatataacagtaaattacttgcagagaaatccgctaatccacttgatattgttgttaattacctccccgatgattctacacatcaatttctggatgaagcagcagaaaatcaggatgtgttccagctaaccattgcctatcaggaagagggcagccagttaacttatgcaatggtgaacggggcgattaccagtacacaactctccggggataaggggctttgttga

SEQ ID NO: 246872 - DNA, 582 bp, Klebsiella pneumoniae
atgcctaagacaagaacaaataaaatcaacctgtcaatttcgtatagcgagttatcacgccgctatggttatgacgtttccgttattagccgcgattgggtgaacaggggattagactgtactaaaacagaacctgaaatttacgaatggatacgtgagaatgtccttgctccattacgtaatactgatacgaaagaacagatagaacaagaaagattaaagaagttaaaagcagaagcggcattagccgaacttgaacttgacgaaaagaatggtgaagtaatcagtactgcatatattgaacaagtactgactgagtatctctttcaggtaaaaacggcaatgagggcaatcccttctaaagcataccttgaactatttgcacaaacagatgcaaaagatctgcgtgatttattgaaaacggagatagataaaacattatatcaattaggttcaatggaatttgaactacccacggatgaagaaatattagaatatggaaacgaacaaaataaaacttacgaggatattacagaaagtactaccgacaatacaaccgccgaaaatccagaatacgagtga

SEQ ID NO: 246873 - DNA, 291 bp, Klebsiella pneumoniae
atgaaaatactcatcgtcatgttggtagcactgctcacaggttgtagtagtgtacatcactcattcatggataacgccttagtcggcaatgttgataacaaggctgtagtcgtactgtttgacgctggcacacgtaacggggtgaagtattatcggcctcagtttcagagtgattgcggtcgcatctacaatccaatctaccagatggacaatggcagtacgacatgtctaatacgcgaggaaagaattcaaaaatataataatatagataataaaaatcatcaaagttaa

SEQ ID NO: 246874 - DNA, 345 bp, Klebsiella pneumoniae
atgagtaagaatggctacgatccagcaatcattcgaggggtacagaccttcacccacggcgagcgtgaattcagggtttgttactacggttcagtactggacaagtttgcatggggtgatcgtgtgttcttccagaatggacaagggaagtactggttcggtacagttcaacgtgattgcttctgcctgatcatggagtacccgatcacttcagtactggaagggttaacttatctggtgagggaagatgaaattgccaggcttcatgaagatggttggtttgtggacaagaagaactgccgttttgagtactaccccctcgcacccaacaaacctacccattag

SEQ ID NO: 246875 - DNA, 2301 bp, Klebsiella pneumoniae
atggaaattgaaagtaaaaatacttttgaacgagttttgcgtgaaggtattaatatttttactggggctggattttctgttttagcttctgatcaaaatgggaaaacacttcctattggtgatgggcttaggaaggaaattctcaaagaatttccaggttctccacccatactacaactacctcaattgtgtactttaatctctaaatctaggagagaggacctttaccgttacatacgagctagatacgaagttggcgattttagttctaaatatcagcaactagctaatgtaaatattaaaaatatatttactacaaatatagataatcttgtagagaaaatattcaaaggaaatcctcacaaatatgttaataatgcaatgtttaatggcgtaagctttagagataaaattgctatagattatttttatttacacggctctgtcagtgatcctgagtctcatttaatatttggcgaccttgatattgctaatgctttttcaagtgaaccaacaaagtggaattatttaaaatctgtaatgaataaatttccaactgttttttggggatatgccctaaaggatgcgggaactttacaggtatttgcagatgcactgaatgagaaaaacaggaaaaatgcttggataattgtacatcctgagtttgttgatgagggtgagattgaatattatcaatcactagaccttaagataatacgtgcagatacagaggagtttttagattatttatctagcttcgaaagtattgattcccttgatagtacaaataataagtatcaaaatccgtttatggaatattctgtaccgtctcattcagagatagaaagacgatcaattaatgacttttaccaaggagcaaatccttcctggagtgatatttactcatctcgcgtaattagattgagttattactccattgttgaagagtatataaacagcggaaagaatatactaattacaggcgggcctgccacagggaaatcaacactattaatgcagttggcagcatttcatgactttaatggcatcaaattatttctttcggatatatctataactaaagctgaaactctggctacaagattaaaaaatattcctgtacttctgtttgtagataacatgcaaacttcaatggatgctcttaacaacctttctctcaagccaaatataagattagttatagctgaaagggattatgcttacctctcagcttctaggtcgaactttttaaggaaaaacatcgagataattgatattactcaaataactaatgctgattgccaagggattacggataatataccagtggatttaaagtcaagaaaattttataataaaaaagatggcgattcattgtttgaattaattgaaaataactgccgcactccaagcattaaagaaagattcaagaacgttctgaatgagctaaagaaaagagatgagaagttagtacaacttttcttgctggcttgttatcttcataatagccgaagtgtgacatcaatggatattatttacagttattttcagggggggcgtgttggctatgaagaaatatatgccttaataaagatattgagcagttgtttatccgagaatgttggtgaatattctgagagtgatcaggattgcttctcaattcgctcaaatctactggcggaacacattacaactatagctccagaaaaagagcttgcttgtatgttagttaacttccacaataatgtatcacgtttttgcattcctaattatgatgcttttaaaagacgcgcttatgatgctcggttatttgaaaaagcatttccagaaaccagtgatggtgaaaaaatatatgacattatctttaggaaacatgcatctcccttcaacttgcaacagaaagccctctatttaagcagaagaggcaatcatgaaagagcatttattgttattgatgaggccatagcaaaaagtggaagcggtaactggtctgtcagaaactcttatgcgattattaagtttaaagcaaatattggcagggtggattcaaatgatgttagaaaagcattagatgaaagtatggagtcgttagagcaatgccatgatgctgatttaagaaaggcatttcatgctatgtcatatgcagatcagtcactgaaatattggagaaagtatagggatgctaaggctcgaggatatcttagaaaatccaaagaatggctgggagaagaggccgataaagataatagaattggaaacgtcggaagactcctaaaacaaattaataaggccttagggtaa

SEQ ID NO: 246876 - DNA, 567 bp, Klebsiella pneumoniae
atggacgctccggactatgggaaacaggtcaacttcacgggcggccgggagtgtgggaaacaggtcaacttcgcgggcggccgggactgtgggggacaggtcaactttacggactgcccggactgtgggaaacaggtcaactttacggacggcccggactatggcaaacaggtcaactccgcggacggcccggactgtgggaaacaggttaactttgcagacggcccggactatgggaaacaggtcaactccgcggacggcccggactgtgggaaacaggtcaactacgcggacggcccggactatgggaaacgggtcaactttgcagacggcgcggactgtgggaaacaggtcaactacgcggacggcgcggactgtgggaaacaggtcaactccgcggacggcccggactatgggaaacaggtcaactttgcagacggcccggactatgggaaacaggtcaactttgcagacggcccggactatgggaaacaggtcaactttgcagacggcccggactatgggaaacaggtaaactacgcagacagccgggaatgtgggaaatag

SEQ ID NO: 246877 - DNA, 237 bp, Klebsiella pneumoniae
atggctatgaaacaaggcgttacccaggttgcaaattcagctcttgatattaaagatcagctctgctccgatatgattgatgcaggagttgatcccaaacaggcactaattgcgtcaacagtagctaccaaggcccgtatggatgacataatcaacggtgttcttggtaacaacaacgcggctgagttcacccacaatctcgctcaaattggtcgcaatgcaaccacactgaattaa

SEQ ID NO: 246878 - DNA, 954 bp, Klebsiella pneumoniae
atgattacggacatgccaacaaaagatgacttctatacaatggccgatcatatggttaatgaagcatgggagaaagtagctgatttagcatatgattactacaattatggagagagtaatgattttaaaacgcaatcatcatattatgatgatggagatttagctaatttagaaaactactggcaatatgctcgcccgaaattgattaccgcatttacacttatacttcaatcagttgaatttagactgaaagggctgatagttgaaatatctccttatttacttataactaatgcaacaaaaaaccttccaaaatccgatagcgagggtaatatttcattcacggaatttcatacattggattcccaagatttactgaaaatatataatgccttttcaagtgtaaaacttcctgagactttcacggaatggttcaaaaacatgcggatattgcgaaatagattcatgcacactgttgataaaaatacagatatcacgcctgagtttatttttacttctgtagtcactgcccatcgttatcttaattctgaatcaagtcattggatttggcatagataccaatataaagtagctcattcttcaggtggggttgttaatggaatggaagataaagaagagttctctggaaccgtatgggaaatgttaaatatacattatgaattcacctccgtcatatcagtatgttcaaagcaagctgcactggatttttttggttatcataaaattgccccaggtgacatacactttaaggagagtttttactgcaaaaaatgtgtttcagttatggaaaaacgtttcaattttgatgggaaacatatcgaatctgcacttgagacagtccagtacaaccgtaaattagaaaaatatatctgtgcattttgtcatgaccaacaagatgtcaaaacaaaaggtatctgggaggagtgtgattaa

SEQ ID NO: 246879 - DNA, 819 bp, Klebsiella pneumoniae
atgatttaccactatacggatctgtatgccgcaaaatcgataaccgaaaacgccgaggtatggctgaccgattatcgctatctgaatgataaagaagaatttttgaaaggtcatgaagttcttctggatgcacttgttgaatatcaagatgataaaggaaaatacccaaaagactttatagatgatattgctaacgcagtggcgtttattcgaaaaaatagttttcaggagcttggcagaaataacatatttgtatcttcctttagtcgtatccccgatttattgaaccagtggagaagctacgggatgtattgtcttgaactggatgaagactttttcagtgatgaagaagtcgtggttttagactgccattatcttcaaaatgaaggtgatgcaatagagtatgcgtatggtttaattgacgcttacatattgcctgtattggttaaaatgtgggatggtaataaatcgttagtaacgctagaattgagttcactcattgatgtttatgcgctttctttcaaacatgatgccttctatgatgagcacgagatcaggtttgttgtaagccgttctcctgacgatgagcgcataacattcagagtcagaggtgatgttttaatcccatatatcccattagcgtttgatccagagttactaaaatgtattacggttggtccgatttataatcaggaaatggctcttgactctctctctatgtttgcaaacaaaatatctcgaaaagtgcaacaggatgaagggaatattgagtactatttaggtgtggaaagttcagatgttccatatcgaaatatttag

SEQ ID NO: 246880 - DNA, 444 bp, Klebsiella pneumoniae
atgaataaagaagacaatctggagaactgcccggactgcggcgaggatatgccaggcggtaaaatccgctgtacgcgctgccagcgccagcacgacgccgaaaatatgaacgaggacgattatcgcgctcacaaagcactattcccgtcaggcagcattttgggcgactctgcaccaaaactacccattatcacttacaccgtgggcacgaaatcagtatctgaaagtctcaccgggcaggaacttcagcggtatacaaacgccctccatgaggcgataacggcggcgtatccgggttatgacgtggaggtggtactagatagcaccattggcggcgcagacagtcaggtgagtaatgatccgtatgatgaaacggatatagcggagcatacgcattcaattgcccacagtgtctggataggggctgtgtggatggataaataa

SEQ ID NO: 246881 - DNA, 390 bp, Klebsiella pneumoniae
atgggtaaggattctaattttgacaaactgagcagacacgccgttctggataatatttaccggtatatgcaggatgtaatggggtttgatttaacatcactcaaagatgaatgggaatatttaaagaatattaaacttatcagaaaccggttagtgcatacgaacggaaaggttgagaaaaatcccatggaaatagaatcgttttgtgagaagaacgtgaatttcagaatccagaatggatttatcgttcttcagaagggggcaattgatgatgttattaatgtgttaatgaaattactagataagctggagaatgaaaatcaattgttcataggaagacatcaggcaaaatttggggtttttgaacacacgggattcaataacgtttga

SEQ ID NO: 246882 - DNA, 1443 bp, Klebsiella pneumoniae
atgtcaaacaggacctttaaattattaattgttgaagatgaagccgatatcgctgaaaatatatctagaatatttaatgatgtatttgataatattgagattactttagttgcgtgtcgtgatgaagcatatgaaatattagatgatagaagaattttttttgactacatcacactggatctgaatttccccatagtaaaaaatggatttgaaaaagatcctcagaatggtctggctgttcttgcgaaatgtgttaaaaatctcaaaggcacacctatcctgattttgacaggaactagtacagttgaaatgatagggcaatttctatcttcttcagttcacaaggatgtctggggtagtggagtttctggcccaacaattgaacattgtaggaaagaaaattttgagacactgtcttgtattgttgataatataaagaggaagtttgataatatatttgatgtggagttagatgttgaattcgatagtactaagcttcctgtagagcacgatagattgataagaatatttagtaaaaaacagggtagtgtcattacgaaaataaaagctataggtggcggattatcggcatctaaagtctacggattggagctatccaataatcatggaaaagtttttttaagggttgtttctaaatgtggcccaagtgataaagtaaatgaagatgaatcgaattatcgtacttttatatcaaggttatcacctggcgccactcctagattgattgatttaatcgaacatggagctgcatcaaatggtgctgtattctatgggtttgatcgtagctatgaacactcatttttcagtgcttcaaccgcaggagtaatgaatgagcggttatttaataacactagaagtattcttgatgtgtggtacgaagctcgagagatgaaaacgtgttcaataaaaagcatacgacagaaagttttatctgatgatcacgcctatgagttaatgaaagtctataaccttgattctgcaatgagttttgaagatcacaatgtaagttgttctttttcaatccagcatggtgatcttcatggggaaaacatactaattaacataactgataactcttcatctctcatcgactacggtgacatcggagaaatggttagtatattagatccgatcacgcttgaatgtagtttcttgtttcatcctgctgcaactaagtatgattggcctactgatcaaaatttagaaaattggagttcgatagaacagtatctatacggatgccccataccttcagaaattcgtttttgcagagactggctcaattcacgaaaacgtgggaacagggaggttagtgcctgcctatattcttatgctctgcgtcaactaaaatacccagaaactaataagggacgtgctttgaaactaatagaagcagcatatcgactttattcgggatcatga

SEQ ID NO: 246883 - DNA, 906 bp, Klebsiella pneumoniae
atgctttcaatcgtagggcagaattctatggtaaatgatttggacaatgcattaaaaagtttagtttctccagatgctaatgagaggttttatgcagcaaaatattttatagaaaataatactcccagtgcccgtccaagtttagagaaacaaagaagtagggagttagtgagacatgtgcgtatggcattggataaagctctacaccatatgactcctgattcgaaatgtattcctgaaactgatgctttgaccgacaaagcgagagtaagatacttaaaacgcgaggcaattgatgagttttcaggaacgatattacatgagctttcacctaaagttggattattgaaagagcatttagcacgtgaagtacatgaatatgaaaacagtcggtctaaaaaagtagtagatagtttgctacgcgtgttcggtgcgatagaaagtttaaggtataccgctaaaaaaccggaaagtcatgagtttgatttagcacagttaattagagatgtagttgctgaagaacattgtgagaatatttcatatatatatgagggtgttcagccatgtatcattaaatctgatccgcgcattttatgtcttgctctttcaaatggcatacgaaatgctttggaatcaataaattcatatgatctaagtgacagagatcttactatttgttggggtgcaaccaacgttgataattgggtaagcattattgatacaggaacggggttactaggttcgccagaggctgcttttaaaattggtaataccaataagccaaatcacactggatttggtatggcaattatccagcaggcagtcgagaacttaggtggggatgtaactctttcaaacatagcttctggtggagcaaagctagatttaaggtggggtaatttttaa

SEQ ID NO: 246884 - DNA, 1836 bp, Klebsiella pneumoniae
atgagtaatttatacattagtcgcgtgcagattgaaggcggatttctagatggattagatgtctcacttaaacgtggtttaaatacaataataggtgcgcgaggaacagggaaatcgacatttattgaactaattagatattgtttagatgtaaaaggacatactgttgaatccaacaacaaagcaatatcgcatgctaaatcagtgcttagtgatgggcaaataaccgttacgatatgtgatggaaatgagactgtatcgtataccagaactggtgagagtgagcctgtaccgccaataaatcgtgatttaaaaactccattgatcttttctcagacagaaattgaaaatgttgggttaacgtcttcaggaagaatgaaacttattgacgattttttatctggattagacactattcgacaacaagagtatgctgaagtagccattgtagaatcctatgcatctgaaattctctcattatcatcgagtgttgatgatatcgaggagaaattattgatgctacctaaactcagagaggagatggttttacttgaattagaagagaaaaaaatatccggtatttctgaaattgcaaaaacaaagtcaaatgatttaaataagttaagtgagacttactttaagttaaaagaaagtactgagaaaaaccataaaaaaatagaagcaataaaatcatttaatagttatttaaactctttcttgcttggtaaacaagaaatggaagcatgggtattaagtgagaaccctagcgacgcagacatatgcaatgatttaaatttagtgagtaattacataacatcaataatcgctaaatttgatagtataatgaatgatgtatccaatgatcttgccgcgttgcaaaataaaatgcaagacgtaactaagcaagggcaagtgttgcgttctgacattgataaaatacaggagggcgccggtgaattagcaagaaaacgtcaggcgcttcagcagtcaataataaatttagaaaatgtaaagataaacaattccgagaggaatgttaagattcttgatttgaaaagaaaaagggataaatcacttaagactctttgtgaaataaggaagcagaggtctgatatgcgcgtagctaaatgcagcgatttaaatcaggcgctaaagccaaagattaaagtaagtatcgaagttgcaaacagattggatgaatatcagcaggtacttataaatgcattgaaaggtggaggtgttagatataacgacattgcgccaatcattagtgcatcaattcctccagtagtgttaattgatatattggaatcaaacgatttagatggctttacttcattggtttcaatatctaaagatcgagcattaaaaattattaatagtttaaaacaatccactgataagatagctacggtcttgttagaggatgaaataaagctagagttattagatgggtcagagtataaagattttacttcgctctctactggtcagagatgcacagtgatattgcccataattttagagcacaaggaaagtatcttagtcgtcgatcagccagaagaccatattgataatgcatttattgtggaaactttgatttcctcaattacacgacgcgcgaaagatggtcaaataatagtttcatcacataacgcaaatgtgccagttttaggtgatgctgaaacagtaattcatctaaattctgatggtacacgtgggtatgttattgcggaaggcggccttgatgatataaatatagttggttcaatatcaaatgtcatggaagggggaagagatgctttcaatcgtagggcagaattctatggtaaatga

SEQ ID NO: 246885 - DNA, 1116 bp, Klebsiella pneumoniae
atgtcagataaattagcggctggagaaattagattgaaaccggaacagatgaaaaatagggataaattagttagctttgcagtgacacttgctagtcaaatcaagatgtacacccgcagcaaccataatgatatttctattgcacaagaaaattcgctattgcctttaatcaactatgcttggggaaaacaatttgagaatatgaacaaggtattaaaaaatcatcctggctgtgattactggaaacctgtcgagcgtttaggcctgcagatgactgccattgtcgcaaaaaaaaagtatcaggatacattagaaaaactacggaataataatagattgaagggcaagtttgacgaggtttggtttttcgtacttacggctgaacgcttacctgataatgttcgtgaataccctgacgatttttgttgtaagtatttaacgttatatgatttggttgaaatagtcatagcgcagcctctagcgtttcagcgtgattttttgctccttgccgagcaagaatactcggattatttccctcccagggtagttacttctaaacagggatatcgtgtatctgaaaatatgccgatcccctttgacttgggcctgtttaacgctttgattgaaactaatgaatggtttgatgatgttgccaaaggtgaacgagatgtacatgagtttcttgaaatttttaaaaagcgtctacgtcaatgtactttttcagctagaagtctattaagcaaaattattagtgaaatagacccaccgaagagtatcagtacaaaaatagagtttcccgaaatgctactttacggcccactaagtattgatgaggaaaatatttcagtattttcaaatgaccttgataatttgtccgctatggggctaattgtacgatttgattatcctctaagaatgtatgcggtgggtgatgaaccgtttgttgaaatggagaaaatgatctgcctcgaatttaaaaagtttgaacctgatatgaatttgtatgcggcgttatatatcttttacaaaatatatcatgatatcaacaaactagtgtttgcaattgaaaatagtaatttttctctgcttgctgacggcgcttgccaaaatccttag

SEQ ID NO: 246886 - DNA, 234 bp, Klebsiella pneumoniae; identical to SEQ ID NO: 161827

SEQ ID NO: 246887 - DNA, 207 bp, Klebsiella pneumoniae
gtgaaatctttgtcttcaagtcgccgggaggtacttgtagattgttttcacgtccacgcctgtcacatcagccacctgctgccgggtagcgccgttctccagcattctgcggcactgctccaccacatcttcagtcattacccggcgacggccaccgactctccctggcacgtgcgcagcaccgaggagatcctcgccgcgttctga

SEQ ID NO: 246888 - DNA, 894 bp, Klebsiella pneumoniae
atgaacagcattgttttttttggagcaggggcaagtttcggaagtaacgcaactttgcctttctgtcctccacttgggaatcagcttttcgacgaattagaaaaaattggaggcgcggcaaaagacattccggacgatctaaaaaatatattcagagaaaattttgagactggaatgcgtgagtattataaaaggagaggtggtgatgcaatgtcatttcaaagagagatggctggttactttgctaaatttacaccactgaggaaaaacaactatctaaaattaattaaagaacttattgactgcgatgtaatatacagcagtttgaattatgatttgcttttcgaactttccgccaaaaaaatactatacaatgtcagctattcaaataaaaaaacaccacgcgatttaaatttacttaagattcatggctcctgcaacttttggccgagtatgaacggcgtatcacacaaagggtgcacatttgcagatggaagatcaggggctattcttagcccaatcacggtaaaatcgcaatcagaaaccattcatctcagtaggacggaagacagcattgctccgtcaatggctctttatgctgagggcaagcgtgtcagtgtttcaccttactttgtacaaaatcaatacaaaatgtggtgtgaaagtgtaaatttggcatcaaccatatttattattggcgtgcgagttcatcttgccgataaacatatctgggatgttatcggaagttcaaccgcggacatccattactttggatttaaatcagacagagagatgtttgatgtgtgggcatcatcctattcaagaaataatttatttttccatgaaaataatttcagtgaggccgtgcagataatacctcaaataataaaataa

SEQ ID NO: 246889 - DNA, 477 bp, Klebsiella pneumoniae
atgtatcatatgagaggcaacagagtatccccgatgcaagaagaagaaatagcttataaagctatcaacttttgtaacgcattcggcatcgccgccaccaaacgcaaacgtaaacgatacgatcttctctttgaaaagctctctacttacgggataaccttaagtgttatggatgataaacagtgggaatctctaacatatgatctcacaatcggtcattgtgaccccgcatctcttacaataacaataccaaataaaatttatgaaaatgcttgcttaggagaagaacacgctctcgcagttatctttcatgagttagggcatttgcttctcgggcataaaccagtgttgcatttctcgaccaaagaaccaactcgtgtggaggatgcagaatggcaagcggatacgtttgctgagatcattctggaaacaataggggttcgaacaagccaaatgtctttggatttctatatgtga

SEQ ID NO: 246890 - DNA, 360 bp, Klebsiella pneumoniae
atggcactcactgaattcggtaaggccgtcagaaaagcgaggatagatactggcagcacacttttaaccatgtcccaggaattggaaaccacccctgcatttttgagtggtttagagaccggtagtaagaaaatcccacagaagtgggtcaaaaaaatagacacctatttcaattccaaaggagttcacctcgaacatttggaagaacttgcggcggtcgcaaatgaaactgttccaattgatggactttcccaacagcagcagatgctggtggctggtttcgcaaaatcgcaatttacgccagagcaactcaaaagctttgctgaactgttacaaaagatcaacaacaatgaggtttga

SEQ ID NO: 246891 - DNA, 996 bp, Klebsiella pneumoniae
atggaaaatcatgacgtttatatatacacaggtgatattcatcgggatggttaccaagacctcaccaatgagataaagaaacgaaaagctaaacatggtttgagaaaagatgttatcttgtgtttagctacctatggtggggatcccaatgcgggttatcgcattgggagggcattacagcacaactacgacgaggttacgttgttagtagttgggccatgtaaaagtgctggtacattgatagccatcgcagccaacaaactcgtcattggggatatgggtgagttaggtccgctagacatacaactgaaaaaaaatgatgaaataggtgaaatgagctcaggtttagccatcatgaccgctctagatgcgttaaaagatcgctcaatttctgcgtttaactctcatctagtgaaaataagatacgaaaaccagataagtaccaagatgtctgctgatatcgcgactagacttactgaagcacttgtatcgcctatggctgcccagattgaccccattaaattgggagagcaccaaagagccatgagcatagctttcacctatggtcagcgacttacagctaagtccaatattctaaaagatggtgctttgggaaaattgattgcttcttatccttcacatggttttgtgatcgatcgtaaggaagcaaaggaactattcaaatgtgtagagagtcctagcggtttgaccgaaatgctctatgcattattttgcgataaaatccatgatggtgagatagcaacatacgggaaaccgacagttgtggatttcacccatgatacggataacaatgaggaagataccgatgccaaagaatctgaagccggagatggaaagactcaacagaatgttggaaagccagatccaggaaagccaagatctggcaagaaaagcagagcaaaacctagacgagatcaagcgccaattggagccgtaccagttcaacaacctgatggacagcaacctgaagcgtga

SEQ ID NO: 246892 - DNA, 489 bp, Klebsiella pneumoniae
atgcaggtggagcagcattatgcaactcaaacagtgggtttagatatatcatttgatattgaaacagccatattctttgccactcataagtttctttttaattcggatggcaaggcatatcatagcaaggttaaaaagggtgagcataacggtgttatttatggcttttgttttagagatccaccagtcaaaaaaaccgagtttttaattgaaaaatttgatttgtttaaaacatacagacctgagagggttataagacaaggctgtgctttaccattattttctgactatgaacgtaacatagcaatcactgatttggattttataatatatctcgataatgattttgactatgagggtaaaagagaacctcgctatatgttcccgaatataaaagaagatagattctatggaaaactgcttgagctaaaggataggtatccgcatttacttgctaatgttgtcgaatatgaaggtagtcgggattaa

SEQ ID NO: 246893 - DNA, 234 bp, Klebsiella pneumoniae
gtggggcggatttcggccaacatgatcctcccttatccgccgggggttccgctgctgatgccgggagagatgatcaccgaggaaagccgggcggtgctcgattttctgctgatgctttgctctatcggccgtcattacccgggctttgagaccgatattcacggcgccaagcgcgatgaggacggtgtgtatcgggtacgagtcttaaaaaatgacgaaaggcttgcgcgttaa

SEQ ID NO: 246894 - DNA, 675 bp, Klebsiella pneumoniae
  misc_feature (49)..(58): n is a, c, g, or t
atgggttcaattcatccatttatcaagatgatcgtgaagatagtttacnnnnnnnnnnaagtgataaatgatggtggagatttaagaaaaacgataaaatatatctcagaaataaaggatactatattcaaaattgcagcaagtgaagatgtaactatacatagagtcgatggcagatttaaaacatcgttatgtgaaaaaataaagtcgcagccagaaatattagaaagaataattaattggcttccacaagaccgtttactggtagaatatgcaagagatgttgaaaaagggaagttcgcctcaattgacagaggttctgcgggacagaaagccgctgcaattctcgcattcctgttaagtcatggagataatccaatagtagtcgatcaaccagaagatgatttagataatgctctaatcaataagttaatagtatctcaaatacatagcaataaaagaagaagacaaattataatcattacccacaacccaaacatagttgtaaatggagatgctgagtacataaatgttatgcattttaacggcggtcaggtgcaattactatctgcaggtggtttatgtgacactgatgtcagacttaatgtttgtgagataatggaaggtggaaaagaggccttcaacttaagatataatcgcttacttaaaatgtaa

SEQ ID NO: 246895 - DNA, 249 bp, Klebsiella pneumoniae
atggaaattaatgataatctttggtttggttcaggatatattgatgagtgtagaaaaacacttcaggtaagtaaagaaaaaacaatttataaattgaagatacaacatttgaatgggtttgttggcttttatttgtatgaagggagttctaatttccctttagagaaagggaaattagtcgtattccaattcaaagcggaagagttattacaaaaagaaagaatgttgattaatatagaattgtcatga

SEQ ID NO: 246896 - DNA, 414 bp, Klebsiella pneumoniae
atgttaatactgccaaagttatttattatagaagtttatggattgaaagatatttttgaaaaggaacctatttatattatttttagagagtcagatggtgtaattctcagccatgcctacgatcttcaaggagcatcttcgaaacttaaatctttattaaagaaaaacaactgcattcccgacgacgttataaataattgggcaaaaaaagaacacatggatgagatgttcagatttgttgttcctggatatgccacttactcatcaaagacaaataaagttaacttcaaaagcttttatttacaacaaaaaggaaatgaaagtattgctttatttttaaaacctctgatagagaaagagtcacttgcaaatattattatcaaaaaaagcaaagaagataatacaccatcatga

SEQ ID NO: 246897 - DNA, 867 bp, Klebsiella pneumoniae
atgcaaagaattattcctgataaaaattggtgggaaaaagagcgtattaatcgtaaagcatcatcaatatgcccatatgctagttcatacagatgtcctcgatactatcagagtgtagttttgctctcaagcatcaatatgatagctggtatggcaactaggaaagaaaaagagttgggcgaattttgggaaagaaccagtttctcatctttatgtgatgaagaagtccctacagttactacaaaagaatatggcggccttgcatcagttagtaatttttgcccagaaatatcatttagatatttacactactacgccgattatatgtgtaaatatgttgatgagatagatcaggacactggcaggcgtattgcggaaaaagataatttagaaaatgattggaaatatacatggatgtcagtcaatcctaaattttatttagattgcgatgtttttgaaagtgtcaaaaatttcaatgaagaattggctagtgattacttaaagagattgcacccaaatatcgttcagcaaatagatagaatgaataattgcttggataataatgacccggcaggtgcactgcacgcagcctctaatattttagaaactatggctaaggaaatcactcaaaatccgaatgtggcaaatgagtcattgggtggtttttttaaacagttcgaaaaaatgtcaaaattacctaagaatcttattgatgctgttaaagatatttatgatttacgcaacaaattacctactgctggacacggtagcttgaacaagcctgaattgactatggtagaagccataactattgcggcaatgacaaaggcgattttagaaattgaatatcgaagcaaagccatctaa

SEQ ID NO: 246898 - DNA, 927 bp, Klebsiella pneumoniae
atggacaataaacctttagaacacttggcagaagatcatataaaaacaatacttagccatgctaatatcaagtttcttaaaccaaattatgacgaaaatggttcagaccttgttttattgaatccaataaacaaacatcttgcaaagcaggtaattatccaatctaagggccggaatgtaactaccagtagcagcaatgtcactattccctccaaatatatagtgtcaaacttcatatgcttcatctatctgaaaatcgatgatgacttcaataattattgctatgttttttttcacgatgacatattgaattggaacttaaatgcagagagttatgctttgagtgtgccaaaaaaattcagagagtcagattatttcaataatcaccaattcaatccaaatgtgcacataccgaaaatcaaaaaaatgcttaaccaagcacctattctgaggcagagttatgtgcattttgaggatatggctttaaaagaaatattattcgaaatgtggaaaaaatatgactcatttccggacttaaatttggtaaaagccctttatgatgacttaagtagtttaacaagttctattcccttagatatttttttaatctgcacaatcgctaaacatctaaataaaatggaatatagaactcttgattcatttatgcaggatttgtatgacattagaaacatcaacaagccaatatctcaatcactgatcattcatgacatcgaaaacattaaaaggctcgatggaacttgggctatttcatatccaatcgtgaagtttggacaagtgaatgtcacttatgatgggatagattacaaaggactatattgtcatattggtgatagaaaagaccatgtagaagtaatgttatttgataatggagattatctttgctttggtcaaagattggatatttaa

SEQ ID NO: 246899 - DNA, 444 bp, Klebsiella pneumoniae
atgaatacacaaacatttcagttcgctgagcaggcagcaattacggcctcagtggtccctgacgagttacgaataggattctggccgcagcactttggctccatcccacaatggataacccttgaaccacgaattttcggctggatggatcgtctgtgtgctgattaccacggtggtatctggaacttttcgacgctcagtaacggtggcgcttttatggctcctgagtcagagcacgatgagaagtggacattgttcaacagcatgaacggcaacgacgcggaactcaccagtgaagcggcaggaatagtctcctgcctgatgacatacagctaccacgcctgccgtaccgagtgtgacgcgatgactgagcactattatcgcttacgtgacttcgcgctgaaccatccggaatgcagcgccattatgtatctcatcgactga

SEQ ID NO: 246900 - DNA, 900 bp, Klebsiella pneumoniae
atgaacaaacttgatgctctaaaatttttcatcatcgcctctgagaccttgaacttccgcgaagcagcaatcaagctgtcggtttcaccatcagtagtaagccgaacagtcgctgagttggagaaacaacttggtgaacctctattcaaacgcaatacgcgttcgatctttctcaccagtttcggtgaactatttttaccccaagcgaaacgactgctggaggattcagaaaaactatttcagacggcaaaagatgataatgaaatgaagggcattgttcgtatcacattacttcgacttccaaatcatgaacaaatcttgtatgaactattgactgcactacgtccctatcctgagttatttatcgactggcgtttagatatgatgaaacttgatactatcgagcatcgtattgatataggtatacgcgtagggcgagaacctaatccaaactttatcattaaaaatattgggcaagttgaacatattttagtcgcatcccctgaactcattgcgcgcctgggggcacctactgatttagaagatcttcgacagcgttatccatttagtggtttaattaatcctgagacgggaaaatcatttgagtttatgagtgacgcagtaaatacttttgtccctcgtcatattgaattttatactacagatccatatgccgaaattcaggccgcattggccggaaaaatggttgtacagtcaagcgactttatctgtagagagtacttagcaagcggccaacttgttcccccactgccagaattgcgacaggagaaatggcaattttatttataccggccttaccagctgattactccaaaaagggtgacggtcgttttctcgctattagaaaagatattacgcaaatatttcgaatcaaattaa

SEQ ID NO: 246901 - DNA, 573 bp, Klebsiella pneumoniae
atgtcaattcaaccagtagagttaaacaaagcctatcggctattacagatcgggccaacgacgatgatatcggctaaaaatgatggcattgaaaatgtcatggcagcggcctgggtgggattagtaggcaataacaaagtgatggcttttataggtccacaggcatttactcgcgggcttgtagaaaaaagcggatattacgttgtacagatcccagtagtaaatcagatggatatggtcttatatgctggaggccacagttattccgacacacccgataaaaacagtaaaattccactattttatcaaaaagagtttgatctgcctttagttgaaggttgcgctggctggttagtatgtaaggtcatacccaatgaagaaaatgaaaagcagcacaacttgttcatgggggaaattgtcggagcatggagtgatgaccgcgttttcagaaatgggcactggatttttgatgatgctccagatgaattacgtactgtccattacgtagctggcggacagttttacgccattggtaaaggtacaaaattcaattatggcccgggaaaagactaa

SEQ ID NO: 246902 - DNA, 954 bp, Klebsiella pneumoniae
atgaacaaagatagtatatttcctttcaatgagctttcgatattggacttagataagtctacgtgtgtaaaaaaatatttcaacagaattgtatcgtttaataaactacttaggaatgaccaaaagctaaaaattgcatatcattcttctgtgttaaggcaaccatgtaaagatggacaaactcttcttgaccatattaatgactctggccttgaagtggataatcaaggcgtattattagcgacaatacaagaaactccttttttggaagagttgcaagaacaggctttggagcatgaattatttttcaatgaagatcaatctattgggggagcatacgcttactcgctaaatcatgctctcttctcaatcccttcatcggatgaatgggataaattcaatatagagatgttaaaaaaagaattagataacaacggtgagtggagttcatcggctgtcgaagttctaaatcttggagagttagagacagaaaattacaaagattcttgggttgtcgaattaattgaaaatgatgatattttaactcctgagcagcttttggaacgacttgaaagtgattgtagttcagtaattttatcccaatgtgcaattgattttatactgagaacaggaagtaatttaggtatattaaataaaatttatgaaattactttatgtcttcatgattattgtgttaataattggagggttggtgaaataaggcgttcccatataatcgagaaaggtgtaatgctcaaagatgaatctaactcaactatgcaacaatatggagatgagagaatgtttaggaatcatgttggagcatcacaacaatataggctccattttaatataacggatagtattagaggctatattggtggtatttctgatgagcgtaagatcttcttggcatacttagggaatcacttacgcaccgtacgtttcaattag

SEQ ID NO: 246903 - DNA, 660 bp, Klebsiella pneumoniae
atgggcattctcacttttgatatgacctgccctcactgccttcgagagaaggccgtgcttgaaggatgggctgaaaatcgtgttaataacagtgaactagtgaatgttgcgttcagttgtcggagctgcctacaagccgggatagctgtcgttttgatgattaaaccgggtgggctcatgccattagctaaggcgaagcagaacagtaattataacgtcatcgtcccgggttctggggattatcaattgattgatgttttcccaaaagctatatctcatgccgcgcctgagaacacccctgccagggttgccgaagcgtttatagaggctaaggataacctgagccgtagtcgcttcgacacttcagttatgctttgccgtaaagtactggatattgcaactcgaatgcttttaggcaatgaatcaaaagatgaaacattagttaagcgcattgccatgcttcacgccaaaggactcatcactgatcaaatgaaagattgggctcacattgtccgtattgactcaaatggtgcagtgcattctgacgaagagttttcgcaaaacgatgcaagtgaaataattagttttactgaagtattccttctttactcatttactctgcctgaaatggtgaataacaaaaagcaaagcagggaatag

SEQ ID NO: 246904 - DNA, 510 bp, Klebsiella pneumoniae
atgaaaaagaccagaactttcagtgaaagattctgggaaaaggtcgttgttgcttctccagatgaatgctggatctggaatgcggctaagagaaagagtcctataggcggtgggaagtatttattttacgggcatttgaaagctggagttactgctggcgggcctggaaagatgattcttgcacacagagcttcatgggaactttgcaacggacctatcccagacggatatttgattgaccatacctgccataacactctttgcgtcaacccaaaacatcttcgaatagcaacaccaaaacaaaacgctgaaaacaggcatcgtcactcctctgcgtcaggatttcgtggcgttacttggaatcgggatatgaagaaatggtgtgctcactataaagagcatggtacccgtcatcaccttggttactttgactgtaagcatgaagccgctgcggttgcacgacgagcccgtaataaggtgtttacccataatgatgctgacagatattaa

SEQ ID NO: 246905 - DNA, 594 bp, Klebsiella pneumoniae
atgatgctgacagatattaagtttgttgtggttggccaccacacccggataggacatgcgcaacgtcttgctgagatgctggatgctcatctgctgattgatggcagtaaccacggcgcgaactggaatcattaccgcgcgctgcaatgggctgcagagcaaagctgtcgcgttgtggtgctggaggatgacgcgctgccggtagaagggtttcagacaatggtcactgaatggctgacccgcttcccggattccctcatcagcttctatctcggtactggtcgccctccgcagtatcagctggagatagccacaaagcttatcgccgctgaccgcgaaaggactgaccacatcaccatgcagcgcctggtgcatgctgtgtgctacagcgtacccacgaagttaatcccgaaggtggtgtcgcgctgggatgcgagcaagcctgctgattacgcgattggtgatgcctgcggcggcccggtgatatacccgtgttattcgctggtggatcatgctgatggcaagcctgtcgagaagcaccccgatggtcagcatcgcaatgaacggcgacgcgcatggaggttttatggctaa

SEQ ID NO: 246906 - DNA, 1935 bp, Klebsiella pneumoniae
atgacgcttaaacgcgcatgtaccctcatgacggtgaagtcggtgaacgaggatgagcggatcattaccggcatcgcctccacaccatcgccagatcgtgatggtgacatcatggagccagagggggcaaagttccgaagtgacacgccgttcctctggcagcatgaccgctcacaacctattggtacctgtaccccgaaaatggtgaagggcggtcttgaaatcacagcaaagctggttaaaccaaccccggatatgccttcacaacttgcagcgcgactcgatgaggcatgggcatccattaaagcaggccttgttcgcggactctcaattggtttccggcctattgagtattccttccttgatgaaggtggtattcgctttctttcctgggacctacttgaagtctcggcagtgactattcctgccaatgccgaatgttccatccagaccgttaaatctttcgatcgccagtttctcgccgcgtcaggcaatgagaaaccggtagtgaaaacctctaaaaccgctggcgctacagcattaaaaatcaataaaggaaacaacacgatgaatatctcagaacagattaagagctttgaagcgaagcgtgcagcgctggccgcatcactcgatgaagtgatgtcgaaagctgcggaagaggggcgtaccctggatgccgaagaagaagagagctacgacaatacctcagcagaaattaaatccgtcgatgctcaccttaagcgtctgcatgaaatggaaaacaatatggcatctaccgccaagccagtttctaaggccgcaaatggtgaagtggctgtcgtgaaagcaagtgctcccggcattattcgtgtcgagcagaagctggaaaaaggtatcgccttcgcgcgtttcgctaaagcactggccgctgcgaacggcagccgttccgaagcgctagagatcgcccgtaagcaatatccggatgatgccaaacttcatcacgttctcaaggcagctgttggggcaggaaccaccaccgatcctagctgggccggtgcactggtagaataccaggactacgcgcaggattttgtcgattttctgcgaccacagaccattgttggccgctttggtcagggatccattccggcccttcgccgtgtaccgtttaatatccgtattactgctcaaacctcaggcggttcggctaactgggttggccagggcaaggcaaagccgctcacccgttttgactttgagccgatcacttttagtttcgcaaaagtggctgccatcgcagtattaaccgatgagctgatccgtttttctaacccggctgccgatgaactggtgcgaaatgcccttgcagaggccgtaattgcccgtctggacacggactttatcaatccggctaaagcagaagtgccgaacgtatcgccggcgtctattaccaatggcattacggctatcccttctaccggaaacccggatgatgatgctgctgcagcctttggggtatttgttgctgcagatctgcagccgaatggcgccgtttggttaatgtccagcaccaatgcgctggcgctttcaatgcgtaagaacgctcttgggcagaaagaatatccggaaatgacattgttaggaggtactttccaaggcctcccggcgatcgtttcgcagtacgtaggtaaccagctggtgctggtgaatgcgccggatatttacctggcagatgatggcggagttgctgtcgacatgtcgcgtgaagcatctctggaaatggaaagcgctccgactggcgacagtgtcaccccgactggtacagaactggtgtccatgttccagaccaatagcgtggccatccgcgcagaacgctggatcaactggaaacgtcgccgcactgcagcagtagctgttatctccggtgtgaactacggcactggttccggcagctaa

SEQ ID NO: 246907 - DNA, 1350 bp, Klebsiella pneumoniae
atgtggaaccctttccggagaaaagagaagtcgttgcagcagcctgctgcccgcggactctggacctcactgataagctatgttcgtgagccgttcgccggcgcatggcagcgtaacatggagattaacgatcaaactgttctgtctttccatgctgtgtttgcctgcatatcgcttatcgcaagtgatatttctaaaatgcctttacgtcagatgcgaagggataaaaatggcatatggaaagaaactaatgccggcgccgcagcgaaaatttacaggcggcctaatgcctatcaaaacagaatgcagtttatcgaatgctggctcaattcgaaactcacccgcgggaataccattgttctaaaaatccggaacactcgtggagaaataattgagttacgtgtgctggactgggaaaaagtcaccccgcttgtagcggatgatgggtccatcttttatcagatcaatgccgacaacatggcgggtattgataccccggtaacggtgccggctcgggaggttatccatgatcgttttaactgtctctttcatcctctgattggattgtctccgatttacgctgctggcttggcagcaatgcagggccattctatccaggagaatgctgcattcttttttaaaaatggtggcaaacctagcggggtcattgaagtacccgggagcatcaccgaagaaaacgccaggatccttaaaaacaactgggacgcgggatatacgggagaaaatgccgggaaaacggccgttttgagcaacggtgcaaagtatattacgacggctatgactgcttcagatgctcaaatggtcgagcagctccaaatgacagccaaaatctgctgttcggtctaccacattcctgcatacaaagcagggataggtgacttcccctctaacgacaacattgaagcgctggaacagcagtattactcgcagtgcctgcaaacgtatatcgaatcgatagagctactgctggacgaagctttcgagcttgaaggcgatatcggtacagagttcgatgttaatgcgctgttgcgtatggatagcgaacgtcggatcaaaacgcttggggagggtgtaaaaaatacaatcctgacaccaaatgaggcgcgcaggagtgaaaatcttcctcctttacccggcggtgacgcgctgtatctccagcaacaaaacttcagccttgaagcgctggcacggcgtgatgcttctgatgatccatttgccaaatctggtgccagcagcgtaacggcaccagaggaatcgggcgggaaagccatgtctgaatctgaactgacggcggcaaaagcgatgctgcgaggattgttagctaaatga

SEQ ID NO: 246908 - DNA, 126 bp, Klebsiella pneumoniae
atggtcagcctgttgaacgatgggaagatggaaaaaccatttgggcggaagtgcgggggattagtggaagagaacttatgtcggcaggcgctgaaaaagcagaggctacagtcaggttatgggtaa

SEQ ID NO: 246909 - DNA, 450 bp, Klebsiella pneumoniae
atgattgacattaatctagatttttccggtttagaaaccatagcccgagacctgcaaaccctcagcaaagctgaaaacaataaagtcctccgggattcgacccgcaccggggctgaagtcctccggcaggaggtgattgagcgggctcctgagaaatccgggaagctgaagaaaaacattgttgtcgttactcagaaaagccgccgtcgcggtgaaatttcgtcgggggtgcatattcgtggtgtgaatccgcaaacggggaacagtgataacaccatgaaggccagcaacaggcggaatgcgttctactggcgatttgtagaactcggaacgtcgacagctccggcacatccctttgttcgtcctgcttttgatacccgacaggaagaagctgcacaggctgcaatgaaccgaatgaataaggcgattgatgaggtgctgagtaaatga

SEQ ID NO: 246910 - DNA, 453 bp, Klebsiella pneumoniae
atgtcatctttgtacgaaaaatcgcagaagactgtgattcaaatttctgaaggtccggttacgccggaaacactggaagcggcaatttttcaggatctaagttgcacgttaaagcaggttagtttcaccgctggccagaaacaggacattgatgccacagtgctttgttctgatgaagttgaaaatattaacggattacctcagccatccgagatttcaatgtccggcaacttttatcgtaaccccgcccaggacactcttcgggaagcctatgacaacgatggtatctatggcttcagggttgtgttcccatccggcaacggttatatgttccgtgccgaagtccgccagcatacctgggatacccagaccaacggtcttgtagccgcaaccttctcgctgcgcctgaaaggcaagccaatcaatattgatgcaattcaacccggtagctaa

SEQ ID NO: 246911 - DNA, 789 bp, Klebsiella pneumoniae
atgaaaagattaataactatttcagcccttattctgtttgctttgtcacaacccgccatggcaaagcaaataacatccaatctaaaaatggttggtggctattttgaaggaacgcttacagcgaatgatgatgagccaatatggtacggagatttacaattcaatctaatgggaaccatgcctatgacgtgccgcatggactcggttcatacttctggtgaaaaaccaaacagaacaacatctgtcagttaccggtgtcaaaatggattttccgtacaaataaataaaagcgaatcagaaaaatatgcaaaccttagccttcagaacataaattttaaaacaggcgaagaacatcatttggatagttttaaaatcacatcgtcaatttctttaactatgattgaaaacaataactacaacaatgagatgttcaataaaagggatgctaaaagagaggcgtggattaaagaaaatacagtcgacgtatctatggcttgtaatatcattatgtcatcgcatattcttgcctatcagatggtaaatactggcgcagctaatagtgtcgcgggtagaaaagaaatgacggaatctctatcgaaactatacccaaaaaatgcagaaacgatgacgcaggctatcatcaacttccactccaaagacaaagagccatttgggatgccagtgacctttggagtgaaagggcaacttgtccagatgtgcctttctgagccagcgagctacatccctgagttcggagatctggttatgtcaggtaagatttttaggtag

SEQ ID NO: 246912 - DNA, 504 bp, Klebsiella pneumoniae
atgacgccatcaatgaggaaaaaactgattggcgtgatcgccggcggtggtggcgccatagccattgcctctgcgctcatcaccggcccaaccggtaacgatggtcttgaaggtgtgcgatacaacccttatcaggatgtggtaggcgtctggactgtctgctatggccacactggcaaagacatcatgctcggcaagaagtacaccgaggctgaatgccgtgcgctgctcaataaagacctgaacaccgtcgcccgccagattgatccgtacatccagaagccgatccccgtaacaatgcgcggggccctctactcattcgcctataacgtcggtgctggtaacttccaggcctccacgctgctgcgcaaaatcaaccagggcgaccagaaaggtgcctgcgatcagctgcgccgctggacctatgccaagggcaaacagtggaaaggcctggtaactcgccgcgagattgagcgtgaagtttgtttgtgggggcagagatga

SEQ ID NO: 246913 - DNA, 339 bp, Klebsiella pneumoniae
atgaaaagactgctgatattgatccttctaggtttttcctgtgtatcacaagccaagtcagtaatgcgttgtgagggcgacaaagcggttgtcttcgacaaagaacgggcaactattgattatgaggggcgtgtttttgagaatgcataccagagaacgttgagtgggatggtcataatcgctggcactgacgatctaggctatgaaggcgaattgttgttttcgaaagtcaaaggcgttggcgcatggagcttcaatatcagcgaaagcgaggaaatgacccctccagaagctaagtcacggaaaacgattttatctatagattgcgctccgcagtag

SEQ ID NO: 246914 - DNA, 834 bp, Klebsiella pneumoniae
atgagttgggacgccgacctttccaaacttatgagtttatgttttctcttaatagaatcccaaaatggtgagcaactgcttcctggatgcgaatggaaaaatgatgctcaagttttgagcgtgaaaatttttaggcatatcgcaacagctcaacagattagtgcgggaattggctttgaatttggcgtggggcaggtcttttcccatatcgatcactcctcagtggcagtcgtcgtaagagctgccatcgaatcatacttggcctttaactatatatttgtgaatcaagacgaaagcttgtctatttatcgatataagctttggcgccgagccgggcttatagatagaagcaagttattagcaaatacttcagagagcaaaaatgttctctcacgggaatccgaggctataaaagaactttataatgatatagctcgcgacccgcactatcaaaaaagcaaccgcgaagaaaaaaaggaaattgaaaaaggaaattggaagccaaaggaaggctggcacgccatcactaacaagactgacattcaccaacgttacttcagtgatatttacaatcacttaagcggtcattctcatgcaagctttataagcgccctacaaattagagatgcaaggagtattgagcaacaagccatgctggcgggagctacgcgtcaaatactgtgcatggtgatttcgcactttatattttcctacgtaaagttgtttcccgctgcaaaaacagtaatggcttcaaatcctgaactaactgaaattgcagatagatggcacatacataaagaggaagtggctgcgatctatggtcctgttcagtga

SEQ ID NO: 246915 - DNA, 135 bp, Klebsiella pneumoniae
atgcttcgcctcaccctggccctctcccgggaggagagggaaccgtccggcggtcgtttccgcctcacaccgctcgctccctgcgccatgagagacctaacgcagaaaattatccggaagcgcaatgtgcgctga

SEQ ID NO: 246916 - DNA, 3171 bp, Klebsiella pneumoniae
atggatgaagcgccgcccaccagttgccccaccagtgccagtactgactgcagactcagcaacgttgaaccagtgaccgctatcgtcacatcctcagttgttccttcgctaaccgagaacttcgtggagttcgccgccagcagggagacatccaccgtattgagtaaggagacaccaagcagctggcttgcggttccggtcacgttgttaaggttgccctctacggtatcgatagccgccgtatgggtatcattatttgcctgcggttcggtatccgaatcggagtcggagtcactgtcggaatccgagtcactgtccgagtcggaatcactgtcggaatccgaatcgctgtcggagtcagagtcactgtcagagtcggaatcactgtcagagtccgagtcgctgtctgagtcggagtcgctgtcggagtcggagtcgctgtcagagtccgagtcgctgtcagaatccgagtcgctgtcagaatccgagtcgctgtcagaatccgagtcgctgtcagaatccgagtcgctgtcagagtcggagtcgctgtcagaatccgaatcgctgtccgaatccgagtcgctgtcagcatccgagtcgctgtccgaatccgagtcgctgtcggagtccgaatcgctgtccgagtcagagtcgctgtcggaatccgaatcgctgtcggagtcagagtcgctgtcggaatccgaatcactgtcagagtcggagtcgctgtccgagtccgaatcactgtcagcatccgagtcgctgtcggaatcggagtcggagtcagagtccgagtccgagtcgctgtcggagtccgaatcgctgtcagaatccgaatcgctgtcagaatccgagtcgctgtcagagtccgagtcactgtccgaatcggagtcgctgtcagagtccgaatcgctgtcagagtccgagtcactgtcggaatccgaatcgctgtcagagtccgagtcgctgtcagaatccgagtcgctgtcagaatccgagtcagagtcgctgtccgaatcggagtcgctgtcagagtcggagtcactgtcggagtcggaatcgctgtcggaatcagagtcggagtcgctgtcggaatccgagtcactatccgaatcggagtcgctgtcggaatccgagtcgctgtcggaatcggaatcgctgtcggagtcagagtcgctgtccgaatcggagtcgctgtcggagtcggaatcgctgtcggaatccgaatcgctgtcagagtcggaatcactgtcagagtcagagtcgctgtcggagtcagagtcgctgtccgaatcggagtcactgtcagagtccgaatcgctgtccgaatcggagtcactgtcggagtcggaatcgctgtcagagtcagagtcgctgtccgaatcggagtcactgtcagagtccgaatcgctgtcagcatccgagtcgctgtcagaatccgagtcactgtcagagtccgaatcactgtcggaatcggaatcgctgtcggagtccgaatcactgtccgaatccgaatcactgtcggagtccgaatcgctgtcagagtcggaatcactgtccgaatcggagtcgctgtcagagtccgagtcactgtcggaatccgaatcgctgtcagaatccgaatcactgtcggagtcagagtcgctgtcagagtcggaatcactgtcggaatccgaatcgctgtcagaatccgagtcactgtcagagtcggagtcgctgtcggagtccgagtcgctgtcagcatccgaatcgctgtcggaatcggagtcgctgtcagaatccgagtcactgtcagaatcggaatcgctgtcagcatccgaatcgctgtccgagtcggagtcggagtcagagtccgaatcgctgtcagaatccgaatcgctgtcagaatccgagtcactgtcagagtccgagtcgctgtcagaatccgagtcgctgtcagaatcggagtcactgtcggagtcggaatcgctgtcagagtccgaatcactgtcagcatccgaatcgctgtcggagtcagagtcgctgtccgaatcggagtcgctgtcagagtcggagtcactgtccgagtcagagtcgctgtcggaatcggagtcgctgtccgaatccgaatcgctgtcggagtcagagtcactgtcagagtccgaatcgctgtcggagtcggaatcgctgtcagagtccgagtcgctgtcggagtccgagtcgctgtcggagtccgagtcgctgtcggagtcagagtcgctgtcagaatccgagtcgctgtcagaatccgagtcgctgtcggaatccgaatcgctgtcagagtcggaatcactgtcggaatccgaatcactgtcggaatccgaatcgctgtccgaatcggagtcagagtcagagtcgctgtcggagtcgctgtccgaatccgagtcgctgtcggagtcggaatcgctgtcagaatccgagtcactgtcagaatccgaatcgctgtcggaatccgaatcactgtcggaatccgaatcgctgtcagaatccgaatcactgtcagaatccgagtcgctgtcggagtcggagtcgctgtcagaatcggagtcggagtcagagtcgctgtcggagtcagagtcgctgtccgaatcggagtcactgtcagaatccgaatcgctgtcagcatccgagtcactgtcagcatccgagtcgctgtcagaatccgagtcactgtcagaatccgagtcgctgtcagagtcggaatcactgtcagagtccgagtcgctgtccgagtccgaatcgctgtcagagtcggagtcgctgtcggagtcggaatcgctgtcagaatccgagtcgctgtcggagtccgaatcactgtcggagtccgaatcgctgtcagagtcagagtcggaatcgctgtccgagtccgaatcactgtcagagtccgaatcactgtcagagtccgaatcactgtcagagtcggaatcactgtcagagtcggagtcgctgtcagagtcggagtcgctgtcggagtccgagtcgctgtcagagtcggaatcgctgtcagaatccgagtcgctgtccgagtctgtatcagaatcggcatcggcatcactttcgctgccgccagggtcggtatcgctgtctgagtcagaatccgaatcactgtccgcatcagaatcagtatcatcgttcggagaatgcgacgaatga

SEQ ID NO: 246917 - DNA, 183 bp, Klebsiella pneumoniae
atggccaagaataccggagacggttatcgcaagggctctgttacagaccgcacacaggttcagaatccgcagaatggcaactacaccaaacgcgatacaacgacaggtcgctttatcgaccagaagcaggacggcactccctttaaaggtgtcgccaaagaagtcgatgaccgccggaaataa

SEQ ID NO: 246918 - DNA, 309 bp, Klebsiella pneumoniae
atgcaacatagtccattatttctactgttgactttactcatagggccacaggcctatgcctccccggaatccacccagctcgcccttgcgctgaaacaactcgatggcgtgaaaacctctatagaacgtgcccaaaccaccgccagcacggatccgcaggcgcgctactttttcgactatcagcaggcgcagcaggacatctccgccgttgaacaaggcatcaaccgctaccttgcccctacaagggcgcagccacgcgccgtccagcccctgagcaccagctaccagcgggagaaccctgatgactga

SEQ ID NO: 246919 - DNA, 861 bp, Klebsiella pneumoniae
atgactaagcataaacaatttgaagagtatctttttcatgatacttattatttttgccattgtgtgaaaaatatactttgcgatcaaacttcatatatgagaggtttgaatgattttcatggcgatggaagggtaacatccttttcaatagcatttccaaaatattcacatttccatgcgtttatagaatttatagtatctaatatatattatgaagaattggaatggagcaatatccaaaagctacataaaagattcacagagcttacccagtttgaactcgcaatgttatctaacagtgaaaatggtggtgtgttttctttctttaataagtatcaagaatatatggtttttttgtctagtgaaggtattgctttaagccaaagcgatgagtattcattgcaagcattcttagagcgtttcatgtcaaatgaggtttttgttaatcatttagaaaagactgtagatgaagtgttttatgtcttattcgctaatagattagtcgtccagctgttcaatgaaatgattgccagcgttagggaatatgataaagatgtatttgaagatgatagttgttgtaagtctaatggggtattgaaaaggaaaaatataccatcatgggtgaagaatgctgtttttcatagggataaaggagtttgtgttatatgtaaaaaagatttaactcatctaataaataattttaatgaagctaattatgatcatatcgttcctttatcaagatatggaataaatgatatatccaatattcaactgttatgtaaggagtgcaatcagattgataaaaattcaaaaggaaatgatagctcgtatgattatttcccttggtatcgcatgaattga

SEQ ID NO: 246920 - DNA, 279 bp, Klebsiella pneumoniae
atggttccgaaacgtctgaggattgcgagagagttagccgatatgtcgcaagaagaattggctattgcagtagggctttctgaagaaacgggctattcgagaatgtcccattacgaaaatggcaggcataaacctaaattcgagctggtttgtcgatttgctgaagttctcaatgtgcctgaaggctacttctatacgcaggatgatagctttgctgatgtaatgctgaagctttacgacgggaaacgggtccagtggaaaaagaggcgcttaagttaa

SEQ ID NO: 246921 - DNA, 423 bp, Klebsiella pneumoniae
atgaattacatcttgcagaatgaatatgacttaattctttcgcaacttaaaactatccagcaaaataatatcaagtctcgagatgttttagagaaactcaaagagtttactgctgagaaaaaaagaatgtctcttttgtttaataattacagtagtgtatcacaagaattatctgatctcaaaagaacatctctggcatacgttgttaaaatgatagatgcagatatttcatctgagaaaaaatgtgaagaatatttttatttaatacgtaacttcattgttcataatatgatttcattaaatgaagataataatgatgaattagaggaagttaatgagcatttaactaaggtcattccatcaattttatacacgtttaaaaaaagaaatcttcaagagcaaattacacaggaaggtgtgtga

SEQ ID NO: 246922 - DNA, 312 bp, Klebsiella pneumoniae
atggctgaataccagttaagttttgatggttttgttcgacttttttttgcaatggcaatcattatctgcggttacggctatgtaattattggtgtttttataagagatacgcttgcctatattttaatgttgtttgggcttacaggtctcagtgctttattttctttaatggtattcatggataaaaatatgtgggccggttctcctgatttgacgctatcagtaataacgggatttttttcagccacagtgatcttttatatgttttatgtcttgatttattactttgatcggatgggggcgggtgaatag

SEQ ID NO: 246923 - DNA, 687 bp, Klebsiella pneumoniae
atgaataggccagtacgctgtgaagattttaaagggttaaagctattcaaatatgttgaaaaaatagaatacgcctatgacctatgtaaaggagacgtatattttgggactttatcaaaatataggtcgatagaacaagctcaacgaggtgataaacatgaggggacttatcaagaagtggttaatttagagttcggggatagcgactcagaagaaaaaaaaagaatgcttcacaggttaggttataactttcatgcaacatcaggtgtcgtgatgaatgatatagtaaatacaataagccatgatgcttttattttctgtactgcgcttaaaccgttgggtgaggaacaaagatcagttttcggcaagtattgcattgaaatacaagatgctttcgaattctacaaatgtatcgatgagagtttcaatgatttttacaaaggactcccatatgaatccggatgcggcccaatagaatatgaagatagagaatcggaagcaaatcaaacagttttgaaagagcttgcgtttataaaaccaatatcattcagagaacaatttgaatttagatatctgctaagacctcgaactaatgtaaaaggcaaaattggatatattgaaggggatttattaccactcactcttcattgcaaggggctagaaggaatttgtaaattagtagagtga

SEQ ID NO: 246924 - DNA, 126 bp, Klebsiella pneumoniae
atgcgtttatatctcactttgctgactcgccaccgttctctgggtaaccctcttttccggctggtattaagcccgggaaacctggatgtctgccctttccactatcctgaaccggagtccccatga

SEQ ID NO: 246925 - DNA, 1650 bp, Klebsiella pneumoniae
atggctctcgaaaaggctttagctcatctttccattcaagttagagatgtcataaaaggcaatacagagcaacttgagttgatacaacgaagagcactcacagccttgtcttttgaactaccagtaggaaaagcttctcggagacctttccattggccgttagaatttccagaggtatttagtcttagtggtggttttgattgtattgtcggaaatccaccattcctaggtgggcaaaaaattacaggaaccatgggcgattgttatcgcgaatatctggtaaatacaatcgcatgtggtaagcgaggttctgctgatttagttgcatacttctttattaaagccaacgctttgctttgctctaatggtttctttggattgatagcggttaatacgatatcagaaggcaacactagagaaataggacttgatttgatacttcgttgtggctcggttatatttagggcatatccaaatttagtatggcctggaaaagcaaatgttgttacaagcagcgtttttgtttctaaatcaaattggaatgcccctttttatatctcaggtcaacaagtttctgtaatcagcgctgcattaactcaacgggaaaactggcaacccgtcaagttggaagagagttgtagttttgtttttcagggggttatcactctgggtgaaggatttttggttgataataaaacctatttgggttgggttgagaaaggcgataattcctgtgaggtcgtttttgattatctaatcggtaaagaggtaaatcagtcaccgacgcatacaccaaatagaaaaataataaacttttttgatcttgatgaacataaagcaagtaaatactcgtcagcatttgacatcgtcgaacaatttgtaaaaccagaaagacaacgtttaaaaaatggaaaatacgcgctgcgtagccctcttcctcaacgatggtggcaatatgctgaaaaaagacccgcattattccatgcggttgggagaggttctaattttgttaatcaccctaaagggtggaaaggtgatttcaaatcacttgagcgagttattgtttttgctactggggcgacaaagtatccctgcttcacttttgttccaaatacatatatttgtgggcattctctttgtattattgcaagtgaaagctatgcactttttacatgcctttcatcagatattcatgctgtttgggcttgggaacatggatctcgcatgaaacaagatttacgttatactcatggtgatatatttgagacattcccattcccagaaaacactttaaataatggtgataaatcgctatctaatttgggtgtgcaattttttgaagcgagagcatgttatatgattgaacaaaataaagggatgacgaaattctataatgacctacataatccgaatattaatactaataaaataaatgaattacgagatttacagacaaaaataaataatgaagtgctacgtgcatatggatttgatgaactggatttagaacaagattttcatgaagttgcatatcttccagaaggaaaaaatgttcgttttacaattagtgagcctgcaagagaggaattattgtgtcgtttggctactctgaataagaatcggtacgagggagaacaaaacaatgattaa

SEQ ID NO: 246926 - DNA, 1005 bp, Klebsiella pneumoniae
atgcaaagaaatatgactattgatgtaatgagagttatgggacttttactcattattcttgcccatgttaaccctccaggaatacttttccaatttaggacttttgatgtcccaatgatgatttttgtttcaggtgtgtcattttatttatcaaaagctagtaatgttagttttgcaacttattcgctttctcggtttcaacggcttgttttccccgtatgggcttttttgataatgttttttttcattctttatgtgtttaagcctttgaaatttatggatctgttgacggttaacaatatcacttcaacatttctactagatggttttggttatgtttggatcataaaggtttttttaataatttctattttatctccattttatgcttattgtataaaaaatctaaatggatatttgacgacgttgctagcacttttgcttctattgttgagcctttgtatattcgttattacgagtgatgattatcctggtgaccgatactccttcttgagcgatgtaattttgcctactatatcatatggcgccgtgtttattctgggttataaatttttgacatataataaaattcaaattttattttctttttttgtttttttagcagcatttattacatatgtaatatataactatcttgctcacgaagtggtgtatggaccgcaagtttacaaatatccacctactctttattatatatcttattcagtcgttatgactatagtggtcttctatgctattgagaaataccttcctgtcgcaagattgccatctattttatttagtatgtcatcaaatacaatttggatctatttgtggcatattccggtggtcgagtacttttaccgctataatcccagcgttaactttataattaaatatgtctttgcagttaccatagcgaccatacttgcattaacgcaaaagaaaattattagtaagttttttagcaaatacagaatcatgaaggttatatttactgggtga

SEQ ID NO: 246927 - DNA, 561 bp, Klebsiella pneumoniae
atgcggctcctgcaccagcagcatgccgatctcaaggaactgtttctggccatgggaaagcagccccgcctggcggtagcgttcgccgtcaagacgcagcaggcgcagcacctcattcagtcgatcgtcctgttcactgctcagccgggcgcgcaggctggcccacaccgatttatctcccttcatcgccagggcgagattttccgccaccgtcagcgcttcgaagaccgtcggcttctgaaacttgcgcccgatgccctggcgggcgatggccaccgggtcaagagtggtcagatccaccgactggtcatagagcgctttgccgctttgcggccgggtcttgccggtgatcacgtccatcagggtggtcttgcccgccccgttggggccgatcacgcagcgcagttcgccgacgcctatcgccagcgacagatccgtcagcgcccggaaaccgtcaaagctgacgttgatgttctccagctgcagcaccggatcggtttgttcgcgaaagcgatcgccgggcagctggcgggtaaacagtccttcatccggttgcattag

SEQ ID NO: 246928 - DNA, 1257 bp, Klebsiella pneumoniae
atgaccagcgccctgctggcgggtggcggcagcaaaggccatgcggaaggtacgacgcagtcggcggtatccgaggggactatcaccatccgtgacagggagaatcagaagcaggatgtggctgacctgagtcgcgatgcggaacacgccagcggcagtatcgggccgatatttgacaaggagaaggagcagcggcgtctgcaggaagtgcagctgacaggggagattggcagccaggcggcagatattgcgcgcacgcagggcgagatagcaaaacagaaggcgataaaagaccctgcagccctgacggcggcggaagcgaagctgaaggcagagggtaacagcagtccgacggcagaacagattgcggaccaggcgggtcgtaccgcgatggctgcatacggaaccggcagtgacctgcagcggggtatccaggcagccacggcagcgctgcagggactggcgggcggtgatatcgccggggcgctggcaggggcatcggcgccggagctggcgaatcttatcggtcacggttcagggctgagtgacggtgccgcggtggtggcgcacgccatcctgggcggtgcggtggcggcgctgcagggcaacagtgcggcggcgggcgcagcgggcgcggcagcaggtgaactggccgcgaaggcaatagcgggcatgctgtacccggatgtgacggatttgtccacactgacggaagcacagaagcagacggtcagtacgctggccactatttcagcgggaatggcaggcggtctggccggggacagtacggcgtcagccgtggcgggcgcgcaggccgggaagaacgcggcggagaataactcgctgagtaagaaagataagatcttcgatatcaacccgatgctgaagataggtattgaaggggctgatggcgatccgctgaaaggcggtggtgggattggtaagtttacgattaataaaggacaacagaacaaacacttacctggaactaatgagtataaaatagcatcggaagcaggtttgaataaaagtattcttactgtctcacctgatttatttttacccaaattgggaactggtcagcaggtaggtaataccccagtcggtacccctggttctaaggaacgaataaactatggtcaaaatattggaaactatattgaccctcagactggagtgtccacaccgacaacaaacggcatagttcactatggtaaaaatggtgtgcatattgttcctgcaagaccatcagagtaa

SEQ ID NO: 246929 - DNA, 720 bp, Klebsiella pneumoniae
atgttgactttgaatactggacagactccaatgtcccttcgtcaacaaatagaaatattataccttgattatttaaaaacaccgctagatggcattgtatttattcaagatatagaggataaaacagctgatgagatacatgagtataaatttaaagaaatagtagaaggattcaattcttatattacaagagatgagttaccaatagatagaaccgaccttctggaaaatatatctagcttagaaaagctctctagagaaaatacagatcaaaatctttttgaagaatttgcaactgcgttgaataatgtaataacacgatttgacgttttagctggtgatgccaacctagaagacagttttaaatccactaatggttctccattcggtatgaatataaagaaaatattcaaacgctcacaagcttatactggatttggagccgcagtaggaaagttaattgatctcgatgtaataacaacacttagtagtatttcagaaatcacgaatagatttaagttagataacccaatagaatttcttgagcgatttaatttaactttattagatatcacaaagaaaagcaaaaaaataggtaatgctcagcgagcttattttgtttgttattttagagaaattctaaatccgcaaagtgatagctaccttgatatgttggctgctgttgactctgcaaagcaaaaatatttttctctttactaa

SEQ ID NO: 246930 - DNA, 816 bp, Klebsiella pneumoniae
gtgcagaccaaagcgcacggcgtgcgcgttaccggcaagctggcgtttggcgaccacccaatgctggaggatttccgctatctgaaaagcatcagcggcgacgcgcagccgaagatgaccattcccagcccgagcgtgctccacttccgcggcggtcggaaagatattgatgccaccgtttacccggatctcagcgactacttcgacgacctggccaccacctggcgcgacgcgatccgcgcgttttatgacgccggctgccgctatctgcagctggacgataccgtctgggcctatctctgttccgatgcccagcgtcagcaggtgcgcgagcgcggcgacgatccggatgcgctggcgcgcatttatgcccgggtgctgaaccaggcgctggagggcaagccggccgatctgacggtgggcctgcacgtctgccggggcaacttccgctcaacctggatctcggagggcggttacgagccggtggccgaggtgctgtttggcggcgtcaatgtcgatgccttcttcctcgagtatgacaacgaccgctccggagatttcgcgccgctgcgctttattcgtcccggccatcagcaggtggtcctcgggctgatcaccaccaaaaacggcgagctggagaacccgcagggggtaaaagcgcgcctcgctgaggcggcgcaatatgttccgctcgagcagatctgcctgagtccgcagtgcggtttcgcctccacggaagagggtaacgccctcagcgaagaccagcagtggcaaaaagtccgtctggtgaccgccatcgccgccgacgtctggtaa

SEQ ID NO: 246931 - DNA, 1104 bp, Klebsiella pneumoniae
atgcaacgtcaacaggccccgttccgcgcagacatcgtcggcagttttttgcgcccggacagcatcaaacaggcgcgtcagcagctggctgaggggctcatcgacgccggtcagctgcgcgacattgagaataacgctatccgtcacctggttcagcagcagtgcgactgcggcctgcacgtggttaccgacggcgagtttcgtcgcgcatggtggcattttgatttcttcgacggcctgcaaggcgttgagcgttacgatgccgagcaggggatccagttcaacggcgtgcagaccaaagcgcacggcgtgcgcgttaccggcaagctggcgtttggcgaccacccaatgctggaggatttccgctatctgaaaagcatcagcggcgacgcgcagccgaagatgaccattcccagcccgagcgtgctccacttccgcggcggtcggaaagatattgatgccaccgtttacccggatctcagcgactacttcgacgacctggccaccacctggcgcgacgcgatccgcgcgttttatgacgccggctgccgctatctgcagctggacgataccgtctgggcctatctctgttccgatgcccagcgtcagcaggtgcgcgagcgcggcgacgatccggatgcgctggcgcgcatttatgcccgggtgctgaaccaggcgctggagggcaagccggccgatctgacggtgggcctgcacgtctgccggggcaacttccgctcaacctggatctcggagggcggttacgagccggtggccgaggtgctgtttggcggcgtcaatgtcgatgccttcttcctcgagtatgacaacgaccgctccggagatttcgcgccgctgcgctttattcgtcccggccatcagcaggtggtcctcgggctgatcaccaccaaaaacggcgagctggagaacccgcagggggtaaaagcgcgcctcgctgaggcggcgcaatatgttccgctcgagcagatctgcctgagtccgcagtgcggtttcgcctccacggaagagggtaacgccctcagcgaagaccagcagtggcaaaaagtccgtctggtgaccgccatcgccgccgacgtctggtaa

SEQ ID NO: 246932 - DNA, 816 bp, Klebsiella pneumoniae; identical to SEQ ID NO: 246930

SEQ ID NO: 246933 - DNA, 477 bp, Klebsiella pneumoniae
atgacaattcttgagcgactatatgccagcagcggatcggaggttattcacgatacgctgcagatatcagcaggcgatgataactactggctaaccagtggctgggatgacgtttcagtgacgctggaaaatggtcagccggtgacgtttgatgccagcgcgatagatatcgccttaccagccaggaacgccgatgggacacaggatttaaagtttgctatcagcaatattgacggacgggtttcagaggcgatcgataaaattctggatgaaatgaaatcagccacgctgacattccggcggtacatttcatccgatctgtctgctccggcatcatcaccgtatacgctcgatatcaaatccggctcctggaccccgacagcagttcaggtcacggcaggctatatgaatgtcctcaaaacagcctggccccgtaaacgttacaacctcgccgagcatccgggcttacgttactaa

SEQ ID NO: 246934 - DNA, 666 bp, Klebsiella pneumoniae
atgcgtgacgtccttcccttaaagcctagttatccacgaaagtttgacatgcttgtcattgatgaggcacacaacatagccccagtgggtagagctaactatgcaatggaaagccagcgtactcggtttattcgttcgataagcccacacttccaacaccgtttgtttttgacagcgactccacataatggctataccgagtctttcacttcgttgcttgagttgctggatgatcaacgttttgccagaaatgtacttccagatgagaagttgttgaatcaggtgatgatacgccgcctcaaaagtgatctggtcgattcagtgggcaatccactttacgctcaacgtaagctcaaagccttatccgtcgaatattcggctcaagagcgttctatccacaaaaaactggatgaatattgccatagccgggagcaaggagcagagaaagccagcaatacttttgggacgacctttgtcaaccagctacttaaaaaaagacttttttcatcaccagcagcctttgcatctactcttgaaaggcacatatcaactttgatgcatggcaaacggcctaatgataaaaatgccatggctgatcgtatccttcataaagcaatccttcgtctagaagaagattacgccgacgatcaagagaggctttgttga

SEQ ID NO: 246935 - DNA, 315 bp, Klebsiella pneumoniae
gtggccgagatcggcggcgaagcctcgcgggagggcgcgccgggcccggaagcctcgctggatctgcgtatagaggaagcgaaagcgcgggtgcagcaggagagccgcttttttcgttcgctgtcggtggcgctggtggtctgcgtgctgctggcgctgctcaaccggtacactaacccgcagtacacctggtccggctgggtcgccctgatctggggcgctctgctggcggtgagaggattacgcctgttcgtgttcggcgaatggatcaaaaactggcgccaggcgcgcctgcagcggctgctgcgtaaatag

SEQ ID NO: 246936 - DNA, 1158 bp, Klebsiella pneumoniae
atgattattacaacagcgctggctaatgaaattgtcgcccgggcaatggcgataattcatcataacgtgaatgtgattgaccatcatggacagatcattgcctcaggtgaacggcatcgtatcggcgaacagcatgaagtcgcccgggaggtaatacgcaccgggaaacgcatttgtattaacaacgccgcggaagccgcgcgttttcacaacgtgcatcctggtattaatcatcccattatctatgacgatcgcgtggtgatggtggtaggcatcagcggcgatcccgcggcgataagccgctatgctgaactggcggtgctcaccgccgaactgctggtccgccaggccatagagatgcgggaaaccaactggcggcaacgtctgcgtgacaccttgttttgtcagtatctggaacaaggggctacgcccgccgggcaagaagcgcttcatcgcctgctggaacttggtttcgattttgatacaccgcgggttccgatcgtagtgaccgtgcaggtcgaacagcatcagttaagcgacatactgagtacgctgttgcgggaattctcgcagctctccggcgtaagtgatgttattttgctgggcagccatgaaatattgatcctcaacgcgctaagcgaagcccaggaaaccctgctgcggggcattgagtttgtactgagtaatcagataagccattaccatatcgggattggcgtgcaggcggacagcgccccggacattcgcgaggccattcggttcgcccgctcggtgatcgaagtgggtagcaaagtgcagccgcagcggcagatctactactttcgcgaaatggcaatgctctgcctgttcagggtgctggaagacagctatatggtcaatttttttatcaataacgtacgccagctgcttgagcatgattccggcgaagtactgctggataccctgagcagctttattgccaataatgccgaaccgggcaaaacgtcgctgctgttggggattcatcgtaatacgctcacctatcggctgcagcaaattaaaaagcatatacagctcgatccgatggtcttcaccgacctgacgcagctggcggtgtcggtacactgttatcgccggctgaatccgcgccagagcgaatggattgatagcttaagctaa

SEQ ID NO: 246937 - DNA, 168 bp, Klebsiella pneumoniae
atgcaggtcgccctcgcctggctgctccagcgagcgccaaatattctgctgatccccggcacctcctcccgcacgcacctcgcggaaaatattgccgctgccgagctggtcctgcctgcggaagcgctgcgcaccctcgataatatcgccaccgccgcgcgccgctga

SEQ ID NO: 246938 - DNA, 459 bp, Klebsiella pneumoniae
atgagtcaggtgatcctcgatttacagctggcctgcgaagagaccagcggcctgccggacgaagcccttttccaacgctgggtcgacgccgtcattccgccgtttcaggaggagtcagagttaacgattcgtctggtcgacgttgcagaaagccatgagctgaacctgacctatcgcggcaaggataagccgaccaacgtcctctccttcccgtttgaagcaccgccgggaattgaaatgccgctgctcggcgatctgatcatctgccgtcaggtggtagagcaggaagccagcgagcaaggtaagccgctggaggcgcactgggcgcatatggtggtgcacggtagcctgcatctgctgggctacgatcatatcgaagacgacgaagcggaagagatggaaggccttgaaacagagataatgcttgctctgggctatgaggacccgtacatttcctag

SEQ ID NO: 246939 - DNA, 3771 bp, Klebsiella pneumoniae
atggcaactggcgaaagcgtaggctctatttattatgacattgaaattgagaccgctaagctgctcactggagccaaagtggctgagacggctctggatggtattaccagcacagccaatagcacaggcaaggcgcttgatggtttggataaagaatcaaagtcagcaggaagttcattaagcaaaattgccgggcatgcaaaatcagtcgatgactcgatgcaaatgcttaacacaaatgttagcgccgtagctatggctattaatcaggccaattccagcgcagtcgcgtccagcatgacattaacgcaaatgaacgttgcgttgcaggcgctagttgcttctacttctgcagtcagccagtcagtgcaagctacctccactgccaccagtaatgctgcaagggaattttctcgcgctgaagctatcattgaggggcttggaaaccagatagccattctagaagaggctatggagaatggagcaagaggtgcgaccgttcttgcggcacagttacgtgcaggttcggcagccacagaagaagaaaagaaaacgataggagatctggctgccgcgtttttcgatcttaaaactgcatctgatgaggctgaaaaatcagcatccgcagttgctgcaggctttcatcgagctgagtccgccatatctgggcttgaaaatgatgtatcaatacttagtgctgaaatgcagggaggtgctagatcagcggcaattctcgcagctcaactgaatgctgggtcaggcgctacacaagagcaaaaatccaagattgccgagctaacaggtactctctatgacatgagggaggcgcaaaaatcagcttcacgcaccgccgcagatgcagccaggcaactcgctcaggaagcaaacgaagcaacgcgcattgcctcaatcatttcagacctttctaaccagaccaagatattcagcactgagcaagaaagtggcgccaggagtgctgctatcttggcagctcagcttcgcgctggggatgctgctacgcaggaccagaaagcaaaaatcgccgatcttgtaggctccctctatgacatgaaggaagcacagagtgcagcgacaagagaggctgcagaggcatccaagcagctcgaccttgagtccagagaggcggaaagaatcagttcagtaactgacagtctttctcagcaaatatccatcctcaatgaacagcaaacaaatggcgcaaggagtgcagcaattcttgccgctcaactccgattgggggcgaaagccagcgacgaagaaaaacagaaggtcggtgagttaacaggccagttgttcgatatgcagagagcatctgcagcatcttccggaggaagcaagagctggaaatccagcatgcagcaggccggctatcaggtgcaagacttcattgttcaggttcagggcggccagtcggcgctggttgccttctctcagcaaggttcgcaactggcgggggcgtttggtccgggaggcgcaatcgtcggggcgttaatcgcgcttggaactgttgtcgcagggactttaatttcctctctcaatggcggaaaaagtgcaatggatgcgcttaaagatgccgccgagaggatgaatgatgttatctctgtttctactcagggtattgctgcactttctgacaaatatgcaaaccttgccagagtgaatgctaccgctgcaacattgctaaggaatcaggcgcttattgaatacaatcaagccatttcaaaaataccaaaggctatcggcgatgctgctgattccgttctatcttttggcgacaaagccatatcggcattaggtggcggatatgcatctgttgagggatttaatgatcgccttaaatcgctgaatataactactgatgattacagttcggcaatgaagcaagcgtatggcgctggaatgaatttcagagcaacggctgacactattggcaatactgtcggtgccgtagcctctaagttgggtatttctgaagaggcggcctttgggcttactaagcaactcgccgatctaagcgataatccatcacctcaggcactccagactttagcgttaagaattggcgatatgatttcgtcatcaaaaaacgccaagcctgagttggtagagctttataacaagatagtagacctctctacgggagcatctcaggcggcctttaactttgaattgctgaagaagtccacagataacctaactgccgggcaaaaaagcttaattcagcagtcagagaggaatctggcgctatctaaattacaaggtgccgcaagggcaaaattagcggctcaatatgcagctgaggacgcgggattctcgaaagacgatccgcataccaagcgaatgatggatgatgctgccgcgacttacgccaatctagattcgcataagaaactgacagcggagcagaagaaaggtgagagtcaggcagagagaaatgcaaaagttgttgaagagtacagccagaaagcgaaattggccgccgattcgacaagcgaactctcgcgcgagcaggcgatactggcagctaaacagaagttaacgaacgccaccccacaacaggttgctcaagttgaacgtgatgcagcggctgcatgggatacggcgaacgccatcaaagcccaggctgctgcacaaaaactcctccctgaaacaagagagaacgcctcttaccagcaggatatgaaggatctgaaaactgcgctcgatggcaagaggattacccagcagcagtacaaccaaaccagtgagcaactggaggctcagcaccaggttaatctggctaagatacgcgctcagcaaactgtaagccccatgcaggaagctcgggggcagattgaccctgtccaacagctggctaatcagcatgctcaggagttggctctcatccagcagttcgaaacgcagaaagggcaattaacccagcgcgggcttgaactgatgaatgccgctaacactcagtacgagcagcagcgtatcgcggctcagtgggcgatataccggaaccagagcctgggcaatgaggcgctggcagcatcgtttgatgctctcgccggcaacgcctcgaatgcccttacaggggtgataaccggtagcatgagcgctcaggaagctatgcagtcgttatccagtacggtgctgaacagcctgatcaactcattcgtccagatgggcgttgagtgggctaaaaatgccatcatgggcgcagcaacccagcaggcagctattgctgcaaccacatctgcacaagtggcagggattggtgtacaaactgcagctagtactaccgcagcagcagcaacaactgccgcatggactccagcggcgatgatgtcatccattgcatcacttggtggcgcagttgctatcggggtcggggcaatggcaggcattttggcattgtctgggaaacgtaaaaacggtggtccagtatctgctggttcaatgtatcaggtgggtgagggcggaaaaccagagatttaccaggccagcaccggcaagcagtacatgatccccggcgataacgggaaagtcatcagcaataaggatatgaatggcggacaggtccaggtaaacatccagttttatgaccagaccagtggcggacagcattcattccaggcacaggccagccaggaaggcggggttgtgacagtggaagcttttcttaccgatgttgatcgcaatgggccgatgtcatctgcaattcaaggcgcttttggcctcggaagaaaagcgcaaggtgcttactaa

SEQ ID NO: 246940 - DNA, 978 bp, Klebsiella pneumoniae
atggcattgagcgatttattacaacaggcttgctttcagtgcaaaccattaaaaacgaccgcattgcctgctgattatcctgggtgggtcatcttttttagcgtcagtgacggtaagcagcgtgcgcatgtccatgtttcgacagcagccagctttgatcaagcctggctagccggggccagagcgctgcaggagtggcgtaaaaagcaagataatgaaacccaatggttacgaattgatattgtcgatagcgtagaacagctaacgtgggaaactctattaaagaaactcaatatcaccaaacgcaattattttcgcttcggtatctcttttgatacacaatttacgcaagcgatccttgaacaggaaattgcggcgaatgctttactttatgatggggacaatggcgtagcggcgccaaatgacatcaatctggaaaattatggtcaacgccgatttaagcgcagtttgaactggccgagcgaacctcagcagatactatggcggtttaaaacgcgttcagtattctgcgatcgtaacggcgctaaactcatcgaacatactggccgcagttccggctaccgcgttatcggtgatgaatggcaaaaaaattatctgcccgaggttattaaaaaggggagcgattatctggctcgtcaggtcaaaaaagacggactctattattacggatggtttccctgctttgaccgtcctgtgcgatcctataatgctttacgccatgccagctcaacctattcgctgattgaggggtgggaggcgactaagcagccgcaccttcgtcaggcgatcgatcgggcgattgcttacctggtcaataaccttatttctgttcgtacgcttgctgatggacgacaggctgcgtttctttgtgatgtcgaaaatgaaattaaacttggcggtaatgccgtcagtattctggcgctggtgaaatacaccgaaacgacgggcgatcgataa

SEQ ID NO: 246941 - DNA, 267 bp, Klebsiella pneumoniae
atgaagattcgcctcacagtgacagttagcgcttatggccagggtgataaccctttgtttacgagattgatatttgtagataaagaccttactaatgcgcctccgatagaggtttttgtggaaagattacaaatggagttgcttcctgatttccaaaaagaaaacagtagcattgcaagcattgcggttgaatcaattgtgattattgacagcggaaaaagcgtcgcgcatacagtctggccgaagcctgataaaaaaggtgcataa

SEQ ID NO: 246942 - DNA, 1113 bp, Klebsiella pneumoniae
gtgtttaacggttctaatttgcgattggctcgtctgtatcatgagttatcactggagcaagtagctgagcgggtcgataagacccgccagtacattcagcggctggaatccggctcggctgtgcctactcctgagcttgcgaataaattagctgccgtattgctggttacgcctgaatttttcgcagtgcaagagcagtctccagtgaatgaagagctcgttcatttccgcaagcgtagttcaacacgcatggctactaagttgtcgacgctcgctaaagctgaattatatcgccgcctcattgaagtttttgaagattacttgaatttaccgccagtaagatttcctgaactgagagtaaatactcaagaggacatagaaagagccgctgagaaatgccggactgattggggattaggttttgggccgatcgacaacatgactcgacttgctgaaaagctgggagcatttgttacttctttcgattctgtctctgatgatgtggatgcgctttctgttcctttaagccggccattcattgtaagaaatacggctaaaaaatcgccttgccgtcagcgttttgatattgctcacgaagtagcacatttgattttgcatgaaggtatttcaacgggggatcgggtaactgaatctcaagccaaccgttttgcatcggcattgcttttaccccgttcggcgatggcaaaatatttccctcgcccaattggtggtcgtatcgactggcaagggctgagtcaatttaaattgacatggaaagtgagcaaggcagcaacaatttatagggcgcatcagctttctctcttaaccgatgcccaatataaaacggcattcttcggtttaaagcgcaagggggaagcaattgatgaaaaagaggattatttgattcctaatgaaaagcctgagctttttcataaggcaatgaagtttctcttaacggatctgtcagttgatgttgattacttagccaagcgtttgtgtattaccccgacgatgttagcagagttagcaaacgataatgcgttagattttgccccagaaatcgctaacgaaaatgtcgtttctctgtctgcataccgaatgaataccgcttaa

SEQ ID NO: 246943 - DNA, 594 bp, Klebsiella pneumoniae
atgcaaaattacccattaccttggacgtttcatccacagttaaccgaagaacgcttatctatcattgcggaggctctccttaaagtgcaggaagacacgcatgagcttttgtcttcttcgcttgatgataattatacccgagcaacatgtacttttgggcgccagaaaaatcgaatcgtcaaactgtgcatgtcaaaaaaatacgactggttggggctttctaatccgaataacgattacacaatcactattggtggtatcccaatccgttcttttagcgatgatccaactaatccgaaaaaggctaacttctttcgaaagaatagtgttgatcagctattcgcatcggaagatacaatccctacgatttggcgcttcgttgtagagaaacctgagttcgaaggtgagggtgggcgagtgcattttgcgggttataatgcgctggaagaaatgctctctttatggacgtatggcgaagaacgggtaactgtgctgcattctactgatgataccccgccagcacctgtcaagattgaactggatgatatcagcgcttctgttcctgaaaaggaaaagaaaagcgataacggataa

SEQ ID NO: 246944 - DNA, 1332 bp, Klebsiella pneumoniae
atgagcagcgataaagtacagattctggtcgttgatgatgacgtcagccactgcacgatcctgcaggcgctgctgcgcggctggggctatcaggtggggttggctcacaacggcctgcaggcactggagcagatccatcagcaggtcttcgacctggtgctgtgcgatatccgtatggcggagatggacggtatcgcaacgttaaaagagattaaggcctataacccggcgataccggtgctgatcatgacggcgttttccagcgtcggtacggcggtagaagctattaagtccggggcgctggattatctggttaaaccgctggattttgacaccctgcagcagacgctggttcaggcattggcgcacacccggcagagcgagagcgaccccagcgttgcgacggattcacggtggggcatgattggcgacagcccggcgatgcaggcgcttcttaacaatattacgctggtggccccttcggacgcgacggtgctgatttatggggagtcgggaaccggtaaggagctggtggcgcacgccatccacgcctgcagcgagcgtcgtgacaagccgttggttacgctcaactgcgcggcgttgaatgagtcactgctggaatccgagctgttcggtcatgaaaaaggggcgtttaccggggcggatcggcggcgggaaggacgctttgtcgaagcggatggcggcacgctgtttcttgatgagataggcgatatctcgccagtgatgcaggtccgcttgctgcgggcgattcaggagcgggaggtgcagcgggtcggcagcaaccagacgcttgccgttgatgtgcggcttatcgccgccacccatcgcaaccttgcggaagaggtgagcgccgggcgctttcgccaggatctctattaccgactcaacgtcgtgaccatcgagataccgccgctgcgccggcgacgggaagatattccgcagctggcgcagcattttctcaaacgctataccgaacgcaatcgtaagacggtaaaggggttcacgccacaggcgatggacctgctgatccactacccctggccgggcaatatacgcgagctggaaaacgcggtggagcgggcggtggtgctactgaccggaaactatatctctgagcgagagctgcccctggcgatcgccggtacgccgctgccatcaggcgggagcgaggaggggggaattcagccgttagtggaagtggagaaagaggtgattctggcggcgctggaaaaaacgggcggcaacaaaaccgaagccgcccgtcagttaggcattacgcgcaaaacactgctggcgaaacttagccgttag

SEQ ID NO: 246945 - DNA, 2103 bp, Klebsiella pneumoniae
atggagaaccagattaaaatcctgcgggcgtcactgggcggtgcctatattccgacgcgtatccttgatgctgccgggctggtcgaactgatgcgcgagctgataaacccggacccgcacgagatgtaccgcgtaccgtataagctggacccctatcaggatctgaactatcagtgtgtcgatgacagctttgatatgcaggtcaccgccggtcatctgaaaattggccgcctggggcgcgacgggaaagagtgcgtaacccgggtgacgagctaccatctggagagtgatccggaaatggccttcctctggacctccgcggataactacgccaacctgcttaacccggagctctccatctcctgcccctttgtcatcacgctgacgctgatggtggaggaccaggtgaagacccagaatgaagccaacatgaaattcatggacgtggagaagaaaagcaaaacctcctacgcgaagttttttccgaacgtgataaaggaaatgcaggagtggggcgatatccgccagcgactggcgaccaaccagacctccctggtgtcctacttctttaatatcaccacgtacaccgcagacagcacagaggcctctctcgccgctgaacagcaggtcctcaacagctaccgtaaaggcggtttccagctgatcccggcccgctaccatcacctgcgtaactttctggccatgatgccgttcaagtgtggtgagggcctgtttaaagagctgcaggcggcaggcgtggtgaagcgggcggagacgttccaggtggctaacctcctgccgatcgtcgctgacagcccgctggcgccggcgggactcctggcgcccacctaccgaaatcagctggcgttcatcgacctgttctacgagggaatgaacaataccaatttcaacatggcagtctgcgggacgtccggggcgggtaaaaccggtctgattcagcccctcattcgcagtgtgctcgactccggcgggtttgcctgggtgttcgacatgggcgatggctataagtccctgtgtgaaaacatggggggcgtatacctcgatggcgataccctcaagtttaacccgttcgccaacgtgctggatgatgctcactttgacatgtcagcagaacgtatacgcgatcagatgtcggtgatggccagtccgaacggcaacctcgatgaagtccatgaaggtctgcttctgcaggcagttcaggcggcctggttaagcaagcgtaatcatgcacgcgttgatgacgtagttcagtttttacaggacgcgaaggacagcgatgaatatgctgattccccgacaatccggggccgtctggacgagatgataatcctgctcgatcagtacacggtgaatgggatctacggggactatttcaactcagataaaccaacacttcacgatgacgcccggatggtggtactggagctcggtggcctggagtcgcggccctctctgcttatcgcggtgatgttctcattgattatttacatcgagaacaggatgtatcagtcaccgcgtggcctgaaaaaactgaacgtcatcgatgagggctggaagctccttgatttcaaaaatgaaaaagtgggtcagttcatcgagaaaggctaccgtaccgcgcgtcgacataccggcgcatacatcaccatcacgcaaaatatcgtggacttcgactccccgaccgcatcgagcgctgcacgcgctgcctgggggaactcgtcatacaaggccattctgaaacagtcagccaaagagtttgccaagtataaccagctgtacccggatcagttcagcaagctggagaaagacatgattaacggcttcggttcggccaaagagcagtggttctcctcttttatgctgcaggtggaagcgaactgctcctggcaccgcctgttcgttgacccgctcagccgggcgatgtactcctccaaaggcccggattttgagtacatgcaagcgcgccggcaggagggggtcgatatccacgatgcggtatacggactggcgtgccgcaactttaaagacgaaatggcagagcttgaatcccgaataccggtgaatgacatggaggataaacagtga

SEQ ID NO: 246946 - DNA, 2187 bp, Klebsiella pneumoniae
ttgcccctgacgctgcgaaactaccgcgtgtacatctcctgctgcgtgccccggaagaagaactccaccacgcaaatcgtggagctggagaatcagattaaagtgttacgggcatcgctcggcggggcttacatcccgacgcgtatcctcgatgcggccgggatggtcgaactgatgcgggagctgattaacccggatccgcatgagatgtaccgggtgccgtacaagctggacccgtatcaggacctgaactatcagtgcgtggatgacagctttgacatgcaggtcactgccggtcatctgaaaattggccgcctggggcgggacgggaaagagtgcgtgacccgggtgacgaactatcacctggagtgtgacccggaaatcgcctttctctggaccgctgcggacaactacgccaacctgctgaacccggagctctccatctcctgcccctttgtcatcacactgacgctgatggtggaggaccaggtgaagacccagaacgaagccaacctgaaattcatggacgtggagaagaaaagcaaaacctcctacgcgaagtactttccgaacgtgataaaggaaatgcaggagtggggcgatatccgccagcgactggcgaccaaccagacctctctggtgtcctacttctttaacatcaccacgtataccgccgataacgcagaggcctctctcgctaccgagcagcaggtgctcaacagttaccgtaagggtggcttccagcttatcccggcccgctatcatcacctgcgtaattttctggccatgatgccgttcaaatgcggcgaaggcctgttcaaagagctgcaggcggcaggtgtggtgaagcgggcggagacgttccaggtggccaaccttctgccgattgtcgctgacagtccgctggcgccggcaggactcctggcgcccacctaccgtaaccagctggcgttcatcgacctgttctacgagggaatgaacaataccaatttcaacatggcggtctgcggcacctccggggcgggcaaaaccggtctgattcagcccctcattcgtagcgtgctcgactccggcgggtttgcctgggtgttcgacatgggcgacggctacaagtccctgtgtgaaaacatgggcggcgtgtatctcgacggcgactcgctgaagtttaatccgttcgccaatattctcgacgacgctaactttgacctgtccgccgagcgtatccgcgaccagatgtcggtgatggccagtcccaacggcaacctggatgaagtgcacgaaggtcttctcctgcaggcggtccgggcggcctggctgagtaagcgcaacaaggcgcgtatcgatgatgtggtggcctttctccggagcgagaaagacagtgaggaatacgccgactcaccgggggtgcgcagccgtcttgatgacatgattatcctgctcgaccagtacacggtgaacgggctgtacggggagtacttcaactctgatgagccgtccctgcacgacgatgcccggatggtggtccttgagctgggcgggctggagtcgcgccagtccctgctggtcgcggtgatgttctcgctgattatctatatcgaaaaccggatgtaccagtctccccgcagcctgaaaaaactcaacgttatcgatgaaggctggcgactgctggacttcaaaaacgaaaaggtggggacctttatcgagaagggctaccggacggcgcgccggcataccggggcctatatcaccatcacccagaatatcgtggatttcgactccccgaccgcatcgagcgctgcacgcgctgcctgggggaactcctcgtacaaggccattctgaaacagtcagcgaaggaatttgccaagtataaccagctgtacccggatcagttcagcaagctggagaaagacatgattaacggcttcggttctgccaaagagcagtggttctcctcttttatgctgcaggtggaagcgaactgctcctggcaccgcctgttcgtcgacccgctcagccgggcgatgtactcctcaaaaggcccggattttgagtacatgaaagcgcgtcgggaagagggggtcgatatccacgatgcggtgtacggcctcgcgtgtcgcaactttaaagaagaaatggctgaacttgaatcccgaataccggtgaatgacatggaggataaacagtga

SEQ ID NO: 246947 - DNA, 252 bp, Klebsiella pneumoniae; identical to SEQ ID NO: 30842

SEQ ID NO: 246948 - DNA, 252 bp, Klebsiella pneumoniae; identical to SEQ ID NO: 30842

SEQ ID NO: 246949 - DNA, 276 bp, Klebsiella pneumoniae; identical to SEQ ID NO: 139610

SEQ ID NO: 246950 - DNA, 978 bp, Klebsiella pneumoniae; identical to SEQ ID NO: 246940

SEQ ID NO: 246951 - DNA, 306 bp, Klebsiella pneumoniae
atgttcttctaccggggccgggaagcgatcgatggccagctggtccaggtgattaaaaattttcgcgaaacctatggcctgagcgtgataccggtgtcggttgacggagtgattaaccccatgctgcccgacagccggacggaccagggccaggcagagcagcttggcgtgaagttcttccccgcgatgatgctggttaacccgaaaagtggccaggtgaagcctctcagttacggctttatcagtcaggacgacctggcgaaacagttcctctatgtctccagcgactttaaaccgaatttctaa

SEQ ID NO: 246952 - DNA, 618 bp, Klebsiella pneumoniae
atgcggcagctgcttctgaaagcgtggtcagaggggatggcaatgccggagtcgttgtcacatatcacgacggaatcacagtggagaagcctggtgctgaaatccggcggaaaatactggcatgtgtacatgtcgaagaagacagccggagggcggaatacggcacgctacctaggtcgttatctgaagaagccaccaatagcggcttcccgactggctcattacaacggaggggcaagcctgagcttccgttacctggaccacaaaacgggagaaacggcgacggaaacgctgacacagcgtgagctggtcgcgaggctgaaacagcacatcccggagaagttttttaagatggtgaggtacttcgggttccttgccaaccgtgtgtgtggagagaagctgccgcaggtgtaccgtgcactggggatggataaaccggaaccagtggcgaaagtgtgctatgcacaaatggtgaaacagttcctgagtcgtgacccgttcgaatgcgtgctgtgtggctgccggatggtataccgccgggccattgcggggctgaatgtatcagggctgaagaaaaacgcgcgggatatcagtctactgaggtatatgccggcctga

SEQ ID NO: 246953 - DNA, 501 bp, Klebsiella pneumoniae; identical to SEQ ID NO: 83644

SEQ ID NO: 246954 - DNA, 234 bp, Klebsiella pneumoniae
atggatttcaaaatcctgaacaaggcgctgtcagcggagaaaacgacggatatgggcgacccggccgatttgggggcaaaactgcgtatcggcggcagttaccagtctgacctgacgaacgccgggattcaccgaatgtctgcgttacacaatgtcgcgctgaccgatgatgaaattacgaaagccgccactcagtggacagcttgggctaaagctgtcgggttaacaatttaa

SEQ ID NO: 246955 - DNA, 978 bp, Klebsiella pneumoniae; identical to SEQ ID NO: 246940

SEQ ID NO: 246956 - DNA, 522 bp, Klebsiella pneumoniae; identical to SEQ ID NO: 244763

SEQ ID NO: 246957 - DNA, 2154 bp, Klebsiella pneumoniae
atggccgaacttaacccgcctttgggaacgacgacgcctgaaattttcctggataacgtcaagcgcgctgacgaactggtgaacggtccggccggaacggttaacgaccgcggcggtgaaccgctcgatacctggcgccagatgatggcgaaaaacgatgaggtcaggcagaacctgatcccgctcagtaagcaataccagacgctggcagaggcacaggctgatatcgcgaatatccctgctggctcgacaacgtatgttcgcagccatgacgacagcgcgctcgctgatgagtacatgaataacggcgggacgctgcaacctaccgggcggaaaatgccatctcagggagccatcacagcagtgatggcttacatctcatcgctcatatctactgatgattctggtgaccccctactgacgctgaatgatgaagcgggatttcgccttgcggcattcggccttaacgcgatacagaacaatgcaatgaatgcagaatatgacccggatgtatctggctttgtgttccgggacagcgtcggattcgttattcagcaaatagggactcctctgctcagctctgttgacagtgttcagcctgtcgttgagcagcagcgattggtgactgaggcattcagtgctgaatctgacgcggatatttctggttttgtatttcgcgacagtgtgggatttgtcctgatgaatctcaatggtgagcaaagcaatcagaataacgatggggtagatgacatttcacgcagaaatgcagcaaatcttgccgctgctgctgccgcacgagacgaaattaatacgcgtattgctcggccggtttacgattacaatattctgatcacagacggccagtcgctgagtaacgggactgagggatgggcagcactgagcaaggacattcgcgctactctgaacattaatatgctcggtgactccgtccggccaaaaaatgagaacggctcgacgtttacgccgcttaacggagctgaaatcagaccagcccgtgcagtagtgcaggatttaatcgcccctcctgatggcggaaacctcatgactgatgaggccgtggctgcgctgcctcgcggtgccaacaatttcggtgaaaccgtcgatatcggcgcgatgtggatgtggcgggaaatgcagttacagttccgggggctggcaacggatgagcgcaaaattgtggctgtgaactgcggtgtgggcgggcagattattgaacatctctctaaaggccattcctggggattctacaaccggatcatttcagccgttacccagattaaagccattgctgatgccgaaggtaaaacctgcggcgtggtgggttttttatatcttggcaatgaatataactatgacagcacaaaaggaggggcgacagaccgcgcagaatacagagcactcctgagaaagctcattgatgatgtcattaccgatactaccgctatcaccgggcagacagagccccccctgactgtgctgtatcagaccagcggcagctggacgcgcgacagcacgaatatgagcattggcgaggctcagctcgatatctgtgcagcagatgcaaacgtaatgatggcatcaccggcgtatgctgtcaccgacaagggtggccatcttgacgcgaacggctaccgctggctgggaatgcagttcggaaaagtgctccatcgtgcaattgatcgtcgccagaactggcgtccactgcaacccctgtcagtcacgcttagcggaacattcctgcgtgcggatttcctggtgtggagcccgccgcttcagtttcgagcgtgctacgtgggttcatctccgacgacgtatgccgcaaaaggattcagagtcactgacgacgccggggacgttccggtgacgcgggtcgacattgtagccgataccgtagttgatattacgctggggcgtgaaacgaccggcgatgtttatctatggtacgccagccagaccggaagtaacggtaacggaaatctgtttgacagcgacacaacggtcgctgttgcgaattacgaatttcatgaagggacagggcaatatccggaatcaaatattccagagctggtaaaccgtccatacccactgaataacccctgcgtggcattccgccgccaggcaatcattatctaa

SEQ ID NO: 246958 - DNA, 987 bp, Klebsiella pneumoniae; identical to SEQ ID NO: 99328

SEQ ID NO: 246959 - DNA, 720 bp, Klebsiella pneumoniae; identical to SEQ ID NO: 139640

SEQ ID NO: 246960 - DNA, 1002 bp, Klebsiella pneumoniae
atgcagttacagttccggggagtggcaacggatgagcgcaaaattgtggccgttaactgcggggtcggcggacagattattgagcgtctgtcaaaggggcactcctggggattctacaaccgaatcatttcagccgttacccagattaaagctattgctgacgccgtagggaaaacctgcggcgtggttggttttttatatcttggcaatgaatataactatgacagcacaaaaggaggggcgacagaccgcgcagaatacagagcactcctgagaaagctcattgatgatgtcattaccgatactaccgctatcaccgggcagacagagccccccctgactgtgctgtatcagaccagcggcagctggacgcgcgacagcacgaatatgagcattggcgaggctcagctcgatatctgtgcagcagatgcaaacgtcatgatggcagcaccggcgtatgccgtcaccgacaaaggcggacatctcgacgcgaatggctaccgctggctgggtatgcagttcgggaaaacgctgcatcgcgcgattgaccgtcgccagaactggcgtccactgcaacccctgtcagtcacgctgagcggaacactcctgcgtgctgatttcctggtgtggagtccgccacttcagttccggtcgtgctacgtggggtcatctccgacaacgtatgccgcaaaaggattcagagttactgacgacgccggggacgttccggtgacgcgtgtcgacattgtagccgataccgtagtcgatattacgctggggcgtaaaacgaccggcgatgtttatctatggtacgccagccagaccggaagtaacggtaacggaaatctgtttgacagcgacacaacggtcgctgttgcgaattacgaatttcacgaagggacagggcaatatccggaatcaaatattccagagctggtaaaccgtccatacccactaaataacccctgtgtggcatttcgtcgccaggcaatcgctatttaa

SEQ ID NO: 246961 - DNA, 231 bp, Klebsiella pneumoniae; identical to SEQ ID NO: 121864

SEQ ID NO: 246962 - DNA, 438 bp, Klebsiella pneumoniae
atgagtaaaattattgatttccctaccggaaaaaagagggagagaatggctaaagctatccgagcgcaacgtgataaagaagcgatgcagcggagcaaaattgctacctcccaattttggtgggctaataaaataaagttactcaccgttattaaacagtcggcgcgatttctcttaatgtatttagggttattagctaccgacatatttatctatctcgtatttattctaggaaagctcctaaaattctttgcgatgactggtatcatcgctgcgcttttatttctggttatggaatataggaatggttggcattatacgcaatcaacactccataccgcagcaatatttgtcggcctgatcgccctgcgtatcgggcatgacaaactactgaatggcctcataaggcttaaatcctatctatccagaaaagggtga

SEQ ID NO: 246963 - DNA, 288 bp, Klebsiella pneumoniae; identical to SEQ ID NO: 12619

SEQ ID NO: 246964 - DNA, 435 bp, Klebsiella pneumoniae
atgaaaaaagaccttttactggaacctcgcaatctcgctgcggctgtaagagcgcgtcttgatgagattgaaggtttgttagacaagggtattagtaggcaagaaattgctcaacttcttgatagtgaatacagcttttctgtgactgtgaaagcgttagatatggctttgtaccgggcaagattgaaacgcaaaaaaggtggattgcacaatccagaaagtacggtaaatactggatcgcacaatccaaaagagcaggagaaagcggaaccggtggaaactggattgcacaatccagaaccagaaaaattagttgaggatatgggcgggaacaaagaatttttatccgataccgattttaaaaaaattggtgatgaggcaaagaaagtcgcaacctcattcaaaggtagcgtaggtaataagaaaggtttctaa

SEQ ID NO: 246965 - DNA, 342 bp, Klebsiella pneumoniae
atggcaaaagttagatttgaaaactcacttaataagatgatatttgaaattcgtggttatgaatcattttccgaaatggaaacagcattactagatttttgtgatgaaactatgggggcaaaccatcctgatattgtggtggaatatccggtttattataagcattttaataatgataaaatttcatatgagcatataggttatgttaatttaggaatagatcaggatgatggttcttgctatacgattgaacatctgacattagaccgcaaaacacttaaaaaccactggcatcccttctatttttataaaggcgaatgtgagtacgggtttaaaaattaa

SEQ ID NO: 246966 - DNA, 291 bp, Klebsiella pneumoniae
atggcaaaccttcagcttgcagtaaacggtgagtatttcgacgcgatgaagcgaggcgagaaaatagaagagtatcgcctggttaattcgtactggtgccgtcgcattctggcgcggaaatatgatcgcctgatcatcacgcggggctacccgcgagcagacgaccacgaccgccgcattgatatcccgtatgacggctttgaaataaaaaccattactcacaaacatttcggcgaccagcctgtgaaggtattcgccatcaaggtgaatatcgaaggagtcaaccaatga

SEQ ID NO: 246967 - DNA, 573 bp, Klebsiella pneumoniae
atgtcattaattcgtccggcacttgtgctatttattctgttaaccctgctcactggcggcctgtatccgttgctgactaccgccttagggcagtggtggttcccgcagcaggctaacggctcgctgatccagatcgagggcgaggtgcgcggctccgctctgatcgggcagaactttaccgccgccggttatttccatggacgcccttccgcaacggcagaggtggcggataatccgctggcctctggcggcagtaacctggcggtcagcaatccggcgctggataaagcgattagcgagcgggtagaggcgttacgcgccgctaacccgcaagcgaattcgacggtgccggtcgagctggttaccgcgtcggccagcgggctggataacaacctgacccctgccgcggttctgtggcaggtaccgcgcgtcgccaaagcgcgcaatcttagcgatgcgcaggtgaaacagttagtggatcaggcgacgcaaaaaccgttgctcagttttctcggtcaacctgtggtaaatatactgcaactgaatatggcgctggatgccctgaaggattaa

SEQ ID NO: 246968 - DNA, 402 bp, Klebsiella pneumoniae
atggacagacaaaaagaaattgaaaaacgctcccgggatttaataagaaaggccgataaaaaagaaagggtggagctgaatttccttgacgtaaaatatgttatttctgtagtgaacacggggcttcttctttgtctgactgtaggggcggttatttcactggagtatgaagattttcgcgatatgcagcccgctacgcctgaacaactgcaaagtattattcatgacacaccttgcgcggctgaggcttttcggatggctcttcaagctaatactggcacttcgtcaatgttgttaacttttagtgacgccaaaaatatggcttcagaatgcaagaataaagaagaggttaaagcagtacgtgaaaaacaacttaacgcagtgaacgatatgagcaaataa

SEQ ID NO: 246969 - DNA, 423 bp, Klebsiella pneumoniae
atgaatagttacagcaaaccctgcccggaggattatgccgccgcgaaagcactcctgcactcccggaaacgccgcgaacaggaaaaactcgatttctgcttttattggttttttatttgtgccgtatccggtgtgtttctgtggtggggaacccaccactggtttgatctgatgatggataccatggggccagaaaaactggccggacgggctaagaatgtggtgaatctgtggaatgttctgatgtatttcgtgcccttcatctttttcgcactctctgcaggttgcttcgtggtggggcttactagcgctgtcatgatcgaagggctctaccggggcgaactgatgcttttgcgccgtcagttaaaaaaaccgtgggtgcaagaacgtgctgataaaggagagaacaatgcgcgtccgtaa

SEQ ID NO: 246970 - DNA, 1350 bp, Klebsiella pneumoniae
atggctaagcaatttggcggtttcttacaaagtctatcaaccattcgtgacgctaaaacagcacgtctttcaagctgggatcagacaggcaaaaaccaagactactggttaattggccctggtgaaacggtgaaattagcagatattcagggggcaggttgcattacccatatatggatgacgcaattctgtcgtcgcgtactcggtgccagcgttatcgacccaaaaatgggccagtggattgcaccggttaacgaaattcacaacgcgctgggtgtatgctgggaagttgccgatcctcactactaccgtaaagtattaatcaaaatgtactgggatggagctaaagaaccaagcgttgttgtacctttgggcgactttttctgtatcggtcactccatgccgggcaacattaatactatccctatcaatatatcaaccaaacctgaagagcgctataagtttgggggaagtgcctctttaaactgctacttccctatgccattcaatagcggcgctgtcattgaaattgaaaaccagaacgacattccttacggccaatacttctacatcgactatgaaatgtatgcgcaaaaacatgaggatgatattgcctacttccattcctgttggaagcgtgcaaatccgtgtgatggctgggggcccgagctgcaaaccaacagccctgaagtcaacatcccgaacctagacggtaaaggcaactatgaagttctgaacgtagaaggtgaaggccactatgttggctgtaacttatccgttgcccacttccagggtagctggtggggcgaaggggatgacatgatcttcattgatgaagatacctggccgcctagtattcatggcaccggaaccgaagactatttcaaccacgcgtggggcatgcaggataacgccggtatctacaacggtacggcgttgcatgaaagtatcgttcccggttttcagaccagctataaatttcatatcaacgatcccgttcattttaaaaagcgtatccgcgtaaccatcgagcatggccatgctaaccatctgagcgatgactgggcctcaacggcttactggtatcaaaaaacgccggttgccgtaaccatccagcctctggaagaacgtcttccaacgacacctggcgatattgaacgtcgcggcgtgggtgaatcaacctgcactttaaccaccgagcagcaaacgcagaaaaacatcgcaaagaatcgctttgatgagtttatgaaactacgtcaggaagagatcgaaacgaagctggaagcgacacgtaccaaagaaaaaggtaattcggttcacgccaatcacatttcacgtagcgtgaaataa

SEQ ID NO: 246971 - DNA, 1701 bp, Klebsiella pneumoniae
atgaaaaactttactataaaaaatgctcagggtataaccgttgaattttggctgcgtcagacaggactgcaggacaattcctccccaattctcactattaacagcgaaaatgcaactgtttataaagttcaggaaggtgctaatttcttcagtttttatcattatactcactatggcgacgcagatattacgttaagctatgattccagcatcacacaaatttcgctttgctattattatgataagtataccgtttatcagacaggcgtaacgtatctgattgatagcaatggccttaaatgctattcaaaaaaagacttatcgggctggtatgctaaagaatcattccgtccacaactacacttctctcccttcaagtcatggatgaacgatcccaatggcctatgcaagattggtgatttctatcatctattttatcaattccatcctaactccacggaatggggaccaatgcattggggacatgcaataagtcacgatttaatatcctggacccatctacccgtatttaatcaccctgaacataatctgccttctctcggtgcaacgggtggcgcattctccggcaccacgtttattgataaaaaaggccagccaactattttttatactgaacgtctaccggcttacgacctttacaaggattatatcgagattcaaaaaaaagctactatcgacagtaacggaattaaggcggtgaatatccagagtatactcgaccagaaaccagagttagttggctgtgattttcgggatcctaaagtatggtttgactgtgagtataattgttaccgtatgatactaggctcggtccacgatggacacccttcaatgctgcagtttgtttcacctgatagcgaaaactggaagtttaaaaacgttctgtataaagcaccggattacttcgcacaaaacagtggtcgctgtgtggaatgtccggactttttcgcacttggtgataaatgggttcttatttttggtatagttggttaccaggaaccagaaaccaaacgtcataatcttctgtacgcactagttggcacatttaaaaacaatgaatttcatccggaaggcgaaattcaggtattagattttgcaactgaatattatgcactacaaacttttaatgacggccagcgtcaacttggtattgcatggctatttaattgggccatgaggaaacctgttgcttccgtatataatggagagatgtcaattcccaaagagattaccataaatatcaataataaggttgcaatgcgtcccgttattgagctcgaacgatatgtagagaagtgcacagaggttcagctatctacagaaaaaagctatttagtagataatggtaaatcactacgcattaaaattcagcaagggttacattttggtgaagcattaattttggaaggtaatgacgatgagtggatctccatttcctaccgagacggctatgttctcattgaagacaccgttctcaataatgtgacataccacacaaaagtctcagccatcaacgatctcgatgttatttttgacgcgggaatcgtggagttgtttattaaccaaggagagacatgcgctaccagacgaagttataagttagcagattgtaaaaaaataaaaatggatgctatttcagaaaaaaaagtcattattgaaaccctgcgtaccagttggtaa

SEQ ID NO: 246972 - DNA, 1401 bp, Klebsiella pneumoniae
atgaacacagaaaaaaaagaacgtatgtcgatattagaacacgtggcatatggatcaggcgatatggcattaagcgtatcaatcatctctgcttctctgcttatttatgcattcatggtcagcgttgttggactctctccgattgatgcggggtgggtgctgcttgtcgttcgtttaattgatgcgatttccgatccgttaatgggatggctatcggtgagggtaaaaagtcgctgggggcgctatcgcccatggatattcttagggtcaattccatttgggatctccctagccttactgtttactgtagttggtgattcgtacaataccaaactagtctggacaaccgccacatacgtttttaatagtctggtattcactgtaatatcaattccatatatttctcttgttggagtaatgactaacgatcctgcggagcgtattaaagccaacacattccgttttccgatggctaaggcagccacacttatcgtaaccacctttgttccttactatgtcacctccggtattgatgctaaagatgcttacgctatgtcgttccttattctaggtattgccagcatagtggtattaatgttctgcacattttttgttaaagaaagggtggtgcttaatgtacggcaaaacatcccggctaaagatcagcttttcgctttaatgaaaaatgatcagtggctgctgctctgtattacaatgattttgcttctgatagcatttgctactcgcggtaacatcgcttttatctacggtagtgagttcgcaaaggctggcaacggctgggaaatcggtgtctttatgggaatgtggtccattggaggtatcgccggtgccctgatatccaaatggttgaccgaccgctataataaattggcagtatttcgcaggtcgttgtatgcctcagcactggtagctattgccatgtatttctctgttggcattggagatctctatctggcaatttttttctactttctatgctgcgcaatctcagagatcaattcgccaatcctttgggcttcaattgccgaagttggtttttatggagaaattaaaaccggcattaatacctcggggctgtcaattggctttgtcgcctttagccaaaagctgggcatgagtatctctggtcccatcactggctatgccttaacatatataggataccaggccggagctgaattatcattagaaaccttgtacggactttctgttgcgatgacttttatacctgcattcttcttcctgatcgcaggcctagtattcagacgctactttattagtaataattattttagaaaaatgatgtttgacaacaaactacctggagtgagttgtagccgccatgataaaatcacggtaacacaccaatctactgagtga

SEQ ID NO: 246973 - DNA, 1008 bp, Klebsiella pneumoniae
atggttaccataaaagatatcgctttagcactaggcatttctcattcaaccgtatcacgggcgctcaataactctgatcgggtacagtctaaaacccgagagatgatactcgcgaaggcaaaggagatgaactatatacccaatgcggcagcacgagatatgaaaaaatctcaacttcctattattggcgtcatcgctcttaacatgggaagaagcagctacggtagcgaaatgcttggttctattagccaaaaggccaaaaaaaaaggttatcagcttatttttattcatattgaggatacctcgcctagtgaaacagattttaatttgcttaaagaaaaaagaatatcaggcctgctttatatctcgcttgacccttgctctattgattaccatcctatctttgatgaggtaaaaactgtatttgtaaactgtaactgcggcgacattaataggtacacagcggtttgggcaaataatgaaaaaggcctatatgatattgctaacatagtgtttaatcaacctagctttaaacgtagtatgttcattaattttgatgaacattacattgcagcggaaaaacgtaagcaagggtatatgaaagcgctcaatgacaataacatcactttttttgatactgattatattacggttcccatccgctatgactttgatttttcaacattggattgtgatattcacagggctgttgaacgtggtgtgaatgttattttttgtgggcgtgatgaaattgcactagaggtttatttcactctgcatcgcttaggatttacaatcccggatgatgtctccgtaataggttttgataaccagagcatcatctcccagagagtatacccaaaattaacgacggtagaactaccttatgaaaaaatggctttaacaggctttgaccaagtcatctcagatgaaaagctaccggttaaagatattataatcaactgtgacccaataattagagagtcattacggaaggatattaaatga

SEQ ID NO: 246974 - DNA, 960 bp, Klebsiella pneumoniae
atgaaaatgaaaaaagtagcctgtgtgggtgaactattaatagattttgtttgctctgatattgatgccaatctatttgaagggaataacttcctaaaaaaagcaggtggggcgccggctaatgtggcttgtgcagtcagtcgtctgggcggtgaagcgaagctcgcggcaaaagtaggcaacgacccttttggacagttcctgattgataccgttaaaaatgaaaaagtcgatactacctcggtgatagttgacaataatctgcataccacattagcctttgttgctctggagcataatggcgagagagacttctcctttatatggggcgctcacgataagctacaatacgtcgaattaggcgaaagttttcttgatgatacctgtatcctccatctgggcgcggccttggttgacagcgatataattaatttatatcgtgaacttatcatcagtgctaaaaataaaaatatattaatctgttttgatccaaatttccgcgatgcactttggcatgaatcaaaacattccagatttatcgtccttagccgtgaatttatatcacatacagatattgtaaaacttagtgaagaggaggcactgatgatttcaggaaagacaactattgatgaggcagctgaaacgatagctgacttaggcgtgaagttagtattaattacgcttggttcctcaggaacactcatgcgtatcaacggtacgactagtataattccaacggtcaaaatcgatgcgatagattctactggtgccggtgatgcttttattggcggattgttgtatcaaattagccaggatagctctatcttaaattctacggataaacttaaagagtgcgttagattcgcgaataaagttggagctttgacttgcaataaaatgggggccatcagtgcactgccaactatagaacaggtttcatccttctacgaccaaatctga

SEQ ID NO: 246975 - DNA, 1533 bp, Klebsiella pneumoniae
atgcattcatacgaggaccggatccgggccgtcaaactctattaccggtacggaaagagagcctccgttgttgtcatggagttaggatatccttccacaaaacagttgagccgttgggttcggatttatgaagagaagggcgatttacccaggaaattaaagccaagagaacgctattcacgtgcacagaaaattgctgctgtcgagcattatcttactcacggtggttgcctgtcgtacactcgccgtgccatcggttatcccagtaacgaaattctgaagcgctggattgaagagttttacccgaatgcgcgtcctctggtcattcgctcaggcacaaacaaatgcttcagcccggaagagagatctcaggccgtccgggagctctgtaatcgatgcggaaccgcacgtaaagttgcacaaagcataggcgtcagcgtcccggtcctgtacaaatggaagaaagaccttatcagtgacgaggcttatcaatccatgcgtaaacgaaaggcaccccctcaggataaaaatcaggatgctttgctcggtgaaatccagcgactcagacagcaggttcatcagctgcaactcgaacgggacatactgaaaaaggcgaatgaactgataaaaaaagacctgggcatcagctttctgaccatgaaaaacagggagaaaacccagatagttgatgcccttaagaaaaagtaccccgtaactgagttgctaagcgttctgcaacttgcccgcagctgttacttttaccacaaagccagcaagcgcttgtgcgataagtatgcggaaatacgtgtgatcatggctgagatctttgaggagaattaccgctgttacggctaccggcgcattcacgcaatgcttcgctgtaacaacagggttatttctgaaaaggtcgtccgcagactgatggcagaagagcagctcgttgttaagcgcaccaggcgacgacgatacaactcttactgtggagaaatcggcccggcaccggaaaatctgctcgcccgggattttagttcctgcaggccaaatgagaagtggctgaccgatattacggagttccagcttccggctggaaaagtctatctgtcgccggttatcgactgctttgatggccaggtggtgagctggtcgataggaacacgcccggacgcgacgttggtgaatacgatgcttgatgacgcactcgatacgctcaacgaaaatgacaaaccggtgatacacagcgatcgtggtggccattatcgatggccgggctggctcgatcgtgtcaactcatccggacttataaggtccatgtcgcgtataggatgctcgtcggataatgctgcttgcgaaggcttcttcgggcgtgtcaaaaacgaaatgttctacggcagaaactgggcgggtatcacgctggaaaaatttatctgcctcctggacaggtacatacgctggtataacgagaagcgtatcaagatatcattaggtgcaatgagtcccgtgaagtaccgacagcatcttgggatcacaacataa

SEQ ID NO: 246976 - DNA, 285 bp, Klebsiella pneumoniae
atgaccagtaccgggccgacactgaatctcaactatgaccagctgcttgacgaaatcaaaggcatccttcgcgtactctgccggcacaacagtcatccccaggattacgcttccctcacggatgcctatgacaggggctgccgccacggcgccattgcgctctggtattcactggcattatcaatgagagcaccaggacggaactgtgaggaggaccgcaaacagcttgagctcatggccggtctgacccgcgaaaaccaggagccgtctgccgatggctgctga

SEQ ID NO: 246977 - DNA, 348 bp, Klebsiella pneumoniae
atgacagataaaaaagaaataatagatgttctaattgcatggatggaaaatcatattgatgaacgtctggatattgatactctggccaaaaaatccggctattcaaaatggcacctgcaaagacttttttttaaacacaccggcataaagataggtagttttataagagacatgaaattgtcgaaggcggctaaccttctgttggaaacagatgagccaataataaacctggcgctgcggcatggttatgaatcacaacaatccttcaccaggtcttttacccggaaatatggaattccaccctataaatacagaaggaatggtaatggaagtgtcaataaaaaatga

SEQ ID NO: 246978 - DNA, 177 bp, Klebsiella pneumoniae
atgcatgggataagttatgattccagcgtcactctcttcattttgcacagatccgaaaaataccagttccggttctgcttcagccccgccggcgcgcagcggcccggcaacacaagatgtagtggtattggcagcagtataagacgctatatgttgtgcccctcccctgccccgtga

SEQ ID NO: 246979 - DNA, 267 bp, Klebsiella pneumoniae
atgtttacatcatttcttttctggaaactagataaaagagtatctgaacttattaaagaggttgagagtgcactaattgaatttgaatccaatatcatgacaaataaataccaattgtttacaaatgacaagaataacatttcattatcttctagcttttcttcatcttggtcttttggaagatgttttagatacgcattttctattatggggtatattggatttattatgatttttttgcctttttttatcaacttgaaaatgtaa

SEQ ID NO: 246980 - DNA, 177 bp, Klebsiella pneumoniae
atgcctgtaaaacaacgagttataactcctgctaccgcgttgacaactgccctggatgataaattacgacagtatgaagcggacaagtggaagaaagataaccgcaaagctctggaagaacttaataactttcatgatgaacacggttgcttcagtgatgaatacaggactttttaa

SEQ ID NO: 246981 - DNA, 471 bp, Klebsiella pneumoniae; identical to SEQ ID NO: 23312

SEQ ID NO: 246982 - DNA, 837 bp, Klebsiella pneumoniae
gtgacgttcctgcagcgttccgtagagattgctgcgcaatacgggcggacagccattcttgacgtgatgcaatggattcagggagaagcggggccaacaggtcgcgataactacgccacccaactcgacgacctgttcacaacgattttaccagggttcaaggccgcgacggggcaagccgacaacgtgcaggtagcaatctggcaaaccaacatgagcaaagcggccagtggggagaattacgcatcacagggccaatgggacgtagccaacaaccgtgctgattgttttctcgcaggacctatgtaccagtttaagctcggtgatgagccaggcactggccccagcacagtccacactggcccagaggggcggttgatgttgggtgaaacttacgctgacgtgtatagcagtatcgtcgataaaggagcgtggaatccggtacagccggtatctgcggttctctccggaaatgttgtcgatattaattttgaaggtacgccgctggatgcctttggcgcaaaactcgccatcgacagcgactgggtacccgatacgcttaaccacggatttactttccccggcgcgaccatcacagccgttgaaataaccggggccaaaaccgttcgcctgacgctatctgccgtcccggcagtcagtaacagaacgctacgttacgcgattgacgcatttgacgatgtgacctactggccgacacgccgcggcaacctcatggtcgaaactgaccgccgctcctggtggaactcgcagggagtgaatatcccgcgcaacgttcgccactacgctattcgttttgaaatcactgttacggagtaa

SEQ ID NO: 246983 - DNA, 759 bp, Klebsiella pneumoniae
atgccaggaattgttgttgcacaaaattttaaaaataatgcgttgccagcgggggaaagtctggcatctgcgctgattgccgactcaggcgtaaaaaactggtttcaggccgatgcgaattctgtaaccctgagtggcaatgatattgcctcattcaatgaccggaaaggcaccgccagcaagttgacccgcgctgatgcagctaaaggtgcaaccctggtgagcaatgcattcgggccatactctggagcaagattcaacgcggcagaatccgacaggtctatgtttagcggcgatacgctcgatttaacgcagccgttcagttggtcaggcgttgccacgttaagatcactggctgcatccagtaacttatgcggcacttttacctcatcatcggttcgcgccattctcaacgtatcggtatccggtggtaatgcagggaaattaacgtttcagtttggtacggcgacatgtgttggcccgacactggatctgaatacgccgtttgcgttcgtttgtggttatgatgggacgaatattttcctgcgcgtgaatggtgtgatggcttctgttgctgctgctggaagtccttcttcttcggcattcgccctgggcgcattacctggtggttctcagttctgggatggtgacgtgtccgatctctttctgtgtaccgtcgcaatgaacaccagtgctggagcatcattgctcgcaaagctgacggcattttataaagacgtgtatggactgacgctgtaa

SEQ ID NO: 246984 - DNA, 231 bp, Klebsiella pneumoniae
atgcccatggcgcacgccgcgctgggcaatcacgtcgtcggcaaaatgctgtacctcggccatatcacctttcagcaccgcaatctccaggcagtcgtcatgactgatatgcacatgcagcgtggcgacggagagatcgtgatgatgatgctgggtggccaccagccggctcgccagttcgcgtttctcatgttcatacacgtacgacagaacggcatacccgcgccgtga

SEQ ID NO: 246985 - DNA, 360 bp, Klebsiella pneumoniae
atgatcaaacctaaaacgccaaactcaatggagattgccggccagcctgccgttatcaattacgtgcctgagctcaatgcattccgcggtaagttcctgggattatcaggatattgcgattttgtttccgatagtattcaagggttacaacaggagggcgagatatcattacaggagtatctcgcagattgtcatgaagcggggattgagccttatgctcacccggaaaagatgaaaaccttcacgctgcgctatcctgagtcatttggtgagcgtcttagctccgccgctgcggaggagcaggtttccgtaaatacctggatccttgagacgctcaatgaacgtctcaaacaggcttaa

SEQ ID NO: 246986 - DNA, 288 bp, Klebsiella pneumoniae
atgagcaaacaaacaggtggaccagccttcccggttgccgatggtgccgcgcatcggatagcaatgcagctggccggtgacgatgaagctaaatacattgccgaatcagcaaaagcactggccggaatgacgctgcgcgattacttcgctgctaaggcaatggcggcaattgtacgtagatgggacggacactcctttggtggagggacaaactctccgcagtacaaagaattatcagaagatgcgtatctaattgctgacgcaatgctaaaggctcgggaggagtga

SEQ ID NO: 246987 - DNA, 666 bp, Klebsiella pneumoniae
atgacaactgatatcatcgaactggcgcagagcctgaaagctgcagcagagaaggctactccgggtgaatgggtttattttccgaaaaataccagcattgagtatgacgtaggcagtgatgaatctcagggctcaatcctctatgtcgatagtggtgatttcacccaagctcagacagacaggaatggagagttcatcgccctggctaacccaaacaatgtcatcgcgctggtagaggcgctggagaaggcgcagcgctacatcgaggagttgcgggagtggaatgctggtctggcgcaggagtcatgcgagcgacagcagctgatttctgagcttgaacctatcagcgcagcagccgaaaaactggtccgctgtaaaggtcgctatcacagcgagcagaactatcgagcgctggcggcgctgtttggcgtgaaaaccccagacctgccgccgctggagcatgaaaacgtccattatgccgacgctgcagagatggagattgccgcactgcgccagcgaatctccgggctggagtcccgcaccgtcaccgtgaagctaccagagtcattcaagttggctaaatcatcgagcggattaaggtactactacgccgacgaggtcgatgcagcgattatcgccgctggcattaaggtggagactgagtga

SEQ ID NO: 246988 - DNA, 228 bp, Klebsiella pneumoniae
gtgagtgatatctacgcataccgcgatgacgctgctaactgcgtagttctcaaagatggcgaaaagcttttcacgttcacgcctgagcagtggtcagtaatctgcatggctgccgacgccgatatggaaaatcgtctctatgcactcgtacacggtgaaacattgcgtatcgaacgtgagatgaaatggaaagagaatcgcgaaaagggtggcaggaagaatggctaa

SEQ ID NO: 246989 - DNA, 312 bp, Klebsiella pneumoniae
atggaattagagaaaattgttgagcttcagagtaaatactatgagcataagcgtagtgcaactatcgggctgtatataatcctcgttggtgtaatcctaatagtggtgaatatacttggatggtcacatgaaactcaaattattcaaggcgttgttttgggtggcgggcttgtgtattgggggatgcacttcgaaaaatattcaaagttgtataagcaactagatatcctatgcctgcaaaggtatgggaaaggctatgaaaattctctatcagagatcgtctctgatagatatggaaaaaaagataggtga

SEQ ID NO: 246990 - DNA, 252 bp, Klebsiella pneumoniae; identical to SEQ ID NO: 223499

SEQ ID NO: 246991 - DNA, 294 bp, Klebsiella pneumoniae
atgaaattgagcgaaaaaatcaaagctatcaggatggctgaggggctaagtcaaaaccaactttgcgaaatcatcgacttacccaggagcacgctttccaaatatgaaagtgggctttttgaacccggcggcaacgcacttatcaagtacacaagccacccgcggttccaaaaatacaccctatggttgatgaccgataagactgcgccgcaggctggtcagatcgcaccggccctcgcacacattgggccagaatcaacggaatcagaccaatccgagaaacagactggttaa

SEQ ID NO: 246992 - DNA, 195 bp, Klebsiella pneumoniae
atgaaccgatcacctgaatacacgcagggcgcattagccgccctgcgtgaggcaaaggccgtcagcattaaaaacgcggcagcggtaggaactcttgaaggtgtagccatcggtcgtctgatgatccagatagcaatactgactttcgatccgcttatcgccaaatacctcgctatggaggtaaatcatgattaa

SEQ ID NO: 246993 - DNA, 867 bp, Klebsiella pneumoniae
atgattaagtcacccatcaaatgggcgggcggtaaaacccgcgtgatgccgcagctgctgaagcatctgccgaaagctgattgcctgattgagccattcgttggcagcggcaccgtatttatgaatacggaataccgccgttatgtcctttgcgacagcaatcgtgcgctgattaacttctttcgcgtattaacctccgacactgagcggctgattggcacttcacgcggaatgtttctgagtggcaacaacgaggagcagtattacaagcgccgggcactatttaactccatgcaatggagcgatacaggcaaagctgacgccgctttgctttacgccactttgtttctgtatctgaaccgccattgctttaacgggatatatcgcgtcaatcagattggtgaacataacgtcccgttcgggaaatatgccacaccttactttccagctgatgagatgcgccgctttgccgaaaaggccaacgacacaaaagccgttttcattgatggcgattttcgccacaccatccaatccggcgcgcaactggtatatgacgcggttatttactgcgacccccccctatatcccggtcagcaaaaccgccaacttcaccgcctacggcaagccgtttaccctggacgatcatcgcgctctggctgcaaccctgctcgatgctcatcgccagcacggcacccgctcggtgatatccaacagcgacaccccggaaacccgcgagatctattccgctttcaatctccatgccttcagcgttcgccgttctgtcagcgccaaaagccgcgatatggccggggaggtaattggcgtgcttcgtgtctgcgatggctgcggccgctctggcggtggtaa

SEQ ID NO: 246994 - DNA, 246 bp, Klebsiella pneumoniae
atggcgagtttagtgcagtttttagaggccgtcggcctagaaaacgttacctgtcagcccattcatcagtgtgtgacaggggctcaaatgagaaagggaggagagaccgaggttaagtttatgacccgcgagataaccccatcagatctaacgggaaagatgcgccgcactggattcatcgtatggatggatgcagaaaaatttgatgccgcactcaaggggattaacggaaatgaacacgattga

SEQ ID NO: 246995 - DNA, 174 bp, Klebsiella pneumoniae
atgaacacgattgatgccgttgtaacgcgcgttctggacgttcgtccatatcgccatttctggatcgtcgaggtggaagtgttgagctggggccgatacagcaacacgaccatcatccgcgatagcgaaaaagaagcccgccaggttaagtccggtgacacggtgacgatctga

SEQ ID NO: 246996 - DNA, 153 bp, Klebsiella pneumoniae
atgaacgaaaccaattaccgccagttctggcgcagcacagttatctatatcgccctctgctcgctgttgttctggcccctgatgggctatctcgcctttcgtgttttctctgtggtgtgggaggcgctgtggttgcttattacaacgaaatag

SEQ ID NO: 246997 - DNA, 996 bp, Klebsiella pneumoniae
gtggttgcttattacaacgaaatagaccttcacgcagcgcagcacctgcgcaaccttatcgacgccggccatattgcgccgggcgtcgttgatacccgttcaattgaggatgtaacccccaatgaccttatcggattcaatcagtgccatttcttcgctggcatcggcggatggtcgcttgccctgcgtcgcgcaggatggccagacagtcgcccggcatggacagcatcatgcccatgccagcctttcagccaggcaggcaagggacttgggtttgctgacgagcggcacttatggccctccgcacattggcttgtcggccagcgccgccctgtcgtggtctttggcgagcaatctggcagcgctgacgcaaacgactggatcgaccttgtacaaaatgacgtggaagccctgggttatgccttcggcgcggttgcgtttccgtctgcgagcgtcggcgcgccgcaccagcgagacagagcttattgggtggccgacgccgatcgccagcaatgggaggggcgcggggaatttcaaccgacaggggggggtaaaccttcagacagctgcgttattggctggctggtcaacaccgagcgcgaccgatggcgtgcgaggagggacggggatcacctcggggatgacgggcagcagccttacgcaaatggtgaaaatggcggcatggccgacaccgacggcaacggatggcaagggcggctatccgggcggcagagtacgggacgggaagttgtcaacggacaggctggacgtggcggcacagttagcgggcccggtccggttaacggcttctggcgagacgctgactggctgtactgccgggatggaaagtggaggccagttagatccggatcatgcccgttggctgatggggttcccgccagagtgggaagactgcgcacctacggaaacgctatcaacattgaagcggcgacagcgttcataaagtcctatatggcggcggtggattatgcctga

SEQ ID NO: 246998 - DNA, 420 bp, Klebsiella pneumoniae
atgaagcactcaggcatcaaaaccaagaagaaggtgaatcgggcgcagagaagaagggaaaaaagccagaacagggcgagagctgtcgtctgtaaacaccaacagccggggcgaacttatcttcagagcatcagcaaagagccaccggcactcaccctgccaggcatcccggcgggacgtgaaaaaatcggtggttgcgactggctggactggaatcaattgtcagcgctcggtcttatgatccgcattaacaccgaaatccttcacccacttgggctggcagttttccgcgatccagcttccggaatctcagcgggcgccatgattgcgccagatggaaaatgggcgtatgcgcctgatgttattgaggcggcgaaggcaagactctccgatcactccggcaaacacggtcactcttga

SEQ ID NO: 246999 - DNA, 189 bp, Klebsiella pneumoniae
atgctacacgatgatgatgaagaagagacactccgtcaggagtggtcgctaggcgattatgataatggcgaaaatggatgcccgcattgcgggcgccatcggctatgtatctgccagaacgggaagcacagatgcgaaaagtgcaattggtcaccagagcttaacgattacgtgccgatcgagtggtaa

SEQ ID NO: 247000 - DNA, 609 bp, Klebsiella pneumoniae
atgaataatacgcttcttcccccgtcttccagtgcgtggatgcgttgcgccgaagctgccacggcgaagctgtcagggataacggtagccattcgcactctgtggacgccgacggagtgtccggttgatttgcttccgtatctggcgtgggcgctgtctgtcgatcgatgggatagggactggccggcggagcgaaaaatagccgttatacagcgttcgtactggctgcaccgccgtaaaggcacccgtgcagcggtacggcgcgtgatcgaagatatggggttttctgcaacgttcgcggagtggttcgacgtcggagaccagccgggaaccttccggcttgaggtggatgttaacgaggtcggactgacgccgaagaccctggacgaattaaacaggctgattggcgatacaaagccagtgagtcgccatatatcacaaatgacgatatccacgaatgtatacggcaaggcttatataggggcggcggtagtggatggggaagtgacaactgtctacccggcgggatacaagccaagtgatgatattcattacaacggaaaaatatggtttgacgggaattatcattattcaggaaatagcaaatga

SEQ ID NO: 247001 - DNA, 2124 bp, Klebsiella pneumoniae
atgaaaataaatgaaaacccaacgtgggttcctgtcactcaattaagccgagctgatagggttgagggcggtatgacgggggctgcaaacactcaggctcgcgagctggcgtggcgcactaaatatcttcttgagcttgtcaaggccattccggattacagggagtatacattctataccacggaaagcgatccagacgggacgattcaggggatgaactcaacaaaagaaggtcaggcgtttcgcgttgggctcggtgaacgcatgggctttcgttattatattcatcacgaaggttcagcaattcttgtcggtgagagtgttagtccggaagacgttattaacgtgctcagcctgataaattatacggataatgatcaaccgttattaactctaaatgaccaggctggattcaggctggcggcaatgggtttaaatgaactcaaaaacaaggctataaatattgaatacaatgaaaacgttgatgggtttatttttcgtgatgaggctgggtttataatccagaaaattggcgttccgctcattagtgcggttgacagtgttcagccagtcattgagcaaaagagaattattaccgaggcgttcagcgcagaatatgacccggatgtatctggactggtgttccgggacagcgtcggtttcgtgctgctgaatctaaatggcgagcagggtaatcaggataacagtggtgcagatgacatttcgcgcagaaatgcagcaaatcttgctgttgcggcagcaatgcgggacgaaattaatacccgcattgctcgtcctgtatacgattacaacattctcattacggacggccagtcgctgagtaacggagtggaggggtgggccgcaatgagcaaagacattcgtcctgcgctgaacattaatatgctcggtgactccgtccggccaaaaaatgagaatggttcaacgtttacaccgctgaacggggctgaaatcaggccggcccgtgcagttgttcaggatttgattgcccctcctgacggcggaaacctcatgactgatgaggccgtggctgcgctgcctcgtggtgctaacaatttcggtgaaaccgtcgatatcggcgcgatgtggatgtggcgcgaaatgcagttgcagttccggggactggcaacggatgagcgcaagattgtggccgtcaactgcggtgttggcgggcagattattgaacgtctgtctaaagggcattcctggggattctacaaccggatcatttcagccgttacccagattaaagccattgctgacgctgaagggaaaacctgcggcgtggtgggttttttatatcttggcaatgaatataactatgacagcacaaaaggggggacgacagaccgcgcagaatacagagcactcctgagaaagctgattgatgatgtcattaccgatactaccgctatcaccgggcagacagagccccccctgactgtgctgtatcagaccagcggcagctggacgcgcgacagcacgaatatgagcattggcgaggctcagctcgatatctgtgcagcagatgcaaacgtcatgatggcatcaccggcatatgctgtcaccgacaaaggtggccatcttgatgcgaacggctaccgctggctgggaatgcagttcggaaaagtgatccatcgtgcgattgatcgtcgtcagaactggcgtccgctgcaacccctgtcagtcacgctgagcggaacactcctgcgtgctgattttctggtgtggagcccgccgcttcagttccattcgtgctacgtgggttccgtgccaacgctgtacgccgcaagagggtttcgggtcactgatgattcgggagacgttccggttgcgcgggttgagattgttgccgatacggtagtcgacatcacgctgggccgggaaacgagcggcgatgtttatctctggtacgccagccagaccgccagtaacggtaacggaaacttgtttgacagcgatgcaacggtcgctgttgcgaattacgaatatcacgacggtacagggcaatatccggaatcaaatattcctgaactggtaaaccgtccgtaccccctgaataacccctgcgtggcattccgccgcaaggcaatcattatctaa

SEQ ID NO: 247002 - DNA, 741 bp, Klebsiella pneumoniae
atgggtggttctagaattactgttccagggtatgtaggtgatatggggctaggttttgatcctgtagtcagaatgggattgaaatttcttaattttttcggcgagtcagccgataaaaccggtcgaaatcttgctccggggggagccgcagcaaccgtactaggttcgcccgttttgcagaccaatggcgtgcagtttacacctgccggcaccttacttgatacaggcattctgcaatctgctgatttcacatttttcacaatcttcaactgtccgacactgtcacaaattctgctgctgagtaattttaatggcccccgacagtcaggctcaggtacaacgcagggcgtagtgctcagaacgcagcccggatctaacagcatgaccctgaacttttcggtaaacactataaacggtaacacatcgacgcaacgcacagtcgcgctcggtgggttgcaggcaaacacaaactatttgttggctgcgcgttttaaatcgggacaaaaaatggactttcaaatcctgaacaaagcgctgtcagcagagaaaacaacagatatgggcgacccggcggatttgggggcaaaactacgtatcggtggcagttatcagcctgacttgactaacgccgggattcaccgaatgtctgctctccacaatatcgcacttactgatgatgaaatttcaaaagccggtgcgcagtggtcagcatgggccaatgctgtgggtctggcgctttag

SEQ ID NO: 247003 - DNA, 1113 bp, Klebsiella pneumoniae
atgatgcagcagtatagtgcgttactgactgaggcagggaaaaaccgtgtagcttcagcagccattaccggtcagaccgtaggatttcattacatgggggtaggggatgggattcgcgatgcatcatctccggaaggggcgggagataccctgattagcgaaagataccgcgcgccattaaacagagtggtaattgcagatcagtcagcaaatgttattcgcaccgaaatgatcatacttccgcaggttggcggattttggttgcgtgaggctgcactctatgacgatgaaggggtgtgtctggcggtagccagtctgccgccatcctacaaaccgcaacttgaggaaggctcagggcggttacagtctgttaatctttggattgcagtcagcaatactgaaagcgtggaattgaaaactgatccatccgttattctggcaaccgttgaagaggtcactcgcgcaaaagatgaggcaaaggattacacggacgagctgatcggagaactgggggaaagcatcgatcaggctgtaaatgagctggataaaaacatccaaaaggccatcgacgatgctgtgaaaaaagcagtcagtgacgcctgggagctggataatcctgtcggtaccacccgattttttaatcagaacctgaatccaaataatcgctggccctggtcacaatgggtgtacaccggcgaaaataaaacaattcgcgtcggcaaagctgatggctcaaatgtcgggcaggccggcggcagcgataacgtcacgctacagcgggccaacctgccagccgttcggattgacgtcaacggcgaaaccagcgagttacctgcacatgagttaacaaccaggggcgccggtaggcacaaacatcaggggggaatggcggcgccgggtgaggcatgggacggggattatattgtcggctccgataatgacagccaccgcacccgcaataacaccagtgaggctgacgatcatacccatatcgttgacgtccaggcccacaaacacaataccaccggtaaaaccgataacctcggcgagggtgcatcgttcagcgtggtggaagctcacaccctgctgatgtgctggtcgcgggtggcgtga

SEQ ID NO: 247004 - DNA, 657 bp, Klebsiella pneumoniae
atgaggaagagttgtttatttcttgcgaccctcttcggtgcgctcatttctttgggtggtcacgcgcaagaaaagccgaaaccaaagacagaagaaagccccgcaataagtaaagatgatttggcaaagtgccagagcgaggaaaacggtacaaaaaggcttggttgctacgatcagttattgcctccaaatgagaccaagggccctgaggaaaaaaacaatgctgggaagtggcaagtatcaacggtcgaatcagatattgatgactcgacaaatgtttttacaatgctgacagcagatctacctatctcatcaaactttggaagaactaccacccccgtgctttttattacatgtagagagaagaagactgagttattcattaactgggatgtctatttggggcttggtgaaacctctatgcttcacaggcttgataagcaaaaggcggcctcaagagtgtgggatatatcaggtaacacaaaggcagttttctacaggggtaggacaattgattttatcaagagtcttgagaagtcggagaaaatgttggtgcagataaccccttataatgaaaattcagctaccacaaccttcgatctcaagggactttctgaggccattaagccgctacagaagtcatgcgggtggaagtga

SEQ ID NO: 247005 - DNA, 1767 bp, Klebsiella pneumoniae
atggccgacgatccgctcaatcatgtgctcgacggttatcaccgcttccgccgatacgctccacgcatgttgcgcctgctcgatctgcgagctgcgcccgttgcactgccgcttctggaagcggtgacggcccttcgtaccggtttgaacgatgccgcgatgaccagcttcttgcggcccagctcgaaatggcatcgccaccttcgggcccagagggctggcgacgctcgcctatgggagatcgcggtgctgttccatctgcgcgatgcgttccgctccggagatgtctggcttactaggtcccggcgctatggcgatctgaaacacgcactcgttccggcacaagccatcgcggaaggcggtcgtctcgctgtgccattgcggccggaggaatggctggcagaccggcaagctcgcctcgacatgcggttgcgcgagcttggccgtgccgctcgcgcaggcacgatcccgggcgggtcgattgaaaacggcgttctgcatatcgagaaactcgaagccgccgcgccgacaggcgccgaagatctggtgctcgatctctacaagcagatcccgcccacgcgcatcaccgatctcctgctggaggtggatgcggcgaccggcttcaccgaagcgttcacccatctgcgcacaggagcaccctgcgctgaccggatcgggctaatgaacgttatcttggcggaagggatcaacctcggcttgcgcaaaatggcggatgcgacaaacacccacaccttctgggaattgatccgcattggacggtggcatgtcgagggcgaagcctatgaccgggcgctggccatggtggtcgaggcacaggcagcgttacccatggcccggttctggggcatgggcacgtcggcttcgagcgacggacagttcttcgtcgctacagagcaaggtgaggccatgaacctggtcaacgcgaaatatggcaataccccgggcctgaaagcctatagccacgtctccgaccaatatgcgccgttcgcaacccaggtgattcctgcaacggcaagcgaagcgccttacatcctcgatggcctgctgatgaacgatgctggacgccatatccgcgagcagttcaccgacacgggcggcttcaccgatcacgtctttgccgcatgtgccattctcggctaccggttcgctccgcgcatccgcgacctgccatccaaacggctctacgcgttcaatccgtcggccgccccggcgcacctgcgagcgttgatcggcggaaaggtcaaccaagccatgatcgagcgcaattggcccgacatcctgcgcatcgccgccaccattgctgccgggaccgtcgcgccaagccagattctgcggaaactcgcctcctatccgcggcagaacgagctcgcgacagccctgcgggaagtcggtcgcgtcgagcgcaccctgttcatgatcgactggattctggatgccgaactccaacggcgtgcccagatcgggctcaacaaaggcgaagctcatcatgcgctgaagcgggcaatcagcttccaccgccgcggtgaaatccgcgaccgttccgccgaaggccagcattaccgcatcgccggcatgaatctgctcgccgccatcatcatcttctggaacaccatgaagctcggcgaggtcgttgcaaaccagaaacgcgatggaaagctgctatcgcccgatctcttggcccatgtttcgccgctcggatgggaacacatcaatctcaccggagaatatcgctggccaaagccttag

SEQ ID NO: 247006 - DNA, 1077 bp, Klebsiella pneumoniae; identical to SEQ ID NO: 23497

SEQ ID NO: 247007 - DNA, 528 bp, Klebsiella pneumoniae
atgtggaagaaaacaaattccaggttacaatatcttttaatttggagtcaattgatgagcaaaatactaatcattgaagatgatgatgataaattatcaactctaattcactttattgaagaagaattcccaacattatcagttgataccgctaaatcttttagtagcgggctaagggctctaattaataaatctaatgaatacattggcattttgttagatatgagtatgcctaactatgatagcacagcatctgaacctgggggggggaaacctgaaagttatgcaggttctgatcttttagctcagatgaaattaaggaaaataaatattcctacaatagttgtgactatgtttgataaacatggtgaagaacctaacaggatttcactacaacagctaactagccaacttcataaccaatactcacctatatttaaagatctaacttattatagtctatcagaaggtggttggcgtaaatcactgatagcccagatcaaaaaagaaataattggaaatgactaa

SEQ ID NO: 247008 - DNA, 495 bp, Klebsiella pneumoniae
atgaaagaaaatgagttacgtgatttagtctgtgagagaatggatgtttttggtgaggatttaattcttcttgataaggaaaaatatataccaaataaacttggcactaaaagttttattgatatatacgcaaaggataaacaaaataatcatgtgttaatagaattgaaacgaagtaatcaagcggcaaggcaagcattgcatgaggttatgaaatacgccgaaggtgttaaatcatactttggagctaacgacgatgagattagaattatcattgcttcaactgaatggagtgagttactagttcctttttcaagtcttgttcatagtattcaatttccattaaaaggggttgatattaaactggacggccgtgatatttccgtggaaaccattcaaccgctaaaatataacaagggtaggtttatttctccagcctatgatgtgttttggtataaggatgagattaatttaaatgagggggggcatcgataa

SEQ ID NO: 247009 - DNA, 1500 bp, Klebsiella pneumoniae
atgaataagttagaggcgattgattcggatgcggaattgttttcttatatagtattcctttccgttcaagctatgtccgctagcgaacatctggatataataaaaaaaacaaaaccaaacgaagtagttgaggaagtgaaggaaactattgaagaactcgaggaagaagaacagattgagtatctgcgaaattattcttttgatctcgaaaatatagaaagtgactattatgaaattggaaatcctgcaaagttcatgctttattttaatactcatggaataaagctccataagttaattagaaaaggtttctttgagctaaatgaaaacttaactaacgatatcatccttgcagagttgaagggaaccaaaggtaactcagcacaaaatcttcaggcaaatattagtattaactgcaaacaaaagctaagtaatttgaaagaggcagtccaagatttattggatgcaaatctagcatggcagagtcagatactgcaaattttagccgaaatccaacagaaatatcctgactcaactattgagttgaatatttatcacccaagattgggcttgttttcactttattatacctttaaagaatttgaaaataaggaaagctatctcccatgttattcaatctatgtaaagaacacaagcactaaggttgtaaaaatatatttcgggtgtttgcagggaaacaccaaaagcttgtctttttatgaagtgattgataagtattatagtggtaatattcaagagttaatgcttacaatgatttggggtggtcgagaatatcgagatgatgaaatattagatgatctagggatgtcctatatgagcttttgttgggatattgaaacaggtaaaaagtttactttaataaataacaaatggcgtgaggatgatgttaagtctgtttatggttatttttgcgaatatattgagataaatgaaggtttgatgttcgatattctaaacgagatatctttttatgatcagggagataagttttgcacgccgattattgatacccatataataattgaaagaaaacaaattgaaaatcttgacacatctaagcttcatgatttttttaagtatttaacatcttcacgctcggctatgaaatacttccaaggcaagatagatatttcaataaatggatatgatgctgatggtgaattgtacaacatcgtagatgtcagaaaatacttaataaaagtaagcgaagagataaggttcctattttttttcattaatcccaatgggtttagccaaatcctaagacatttctttttagcctatgcagaagttaaatctgagaccattacttcagaggggaatattaaaattgagctagatacttcaaatgtcggctcgttttttgaacatcagttctcaggtttgaacgaacttaccgatttttgtggcatgagtatagatgaaaataaagctattactgatgctgttatgagctgtataaatgttttttattcatga

SEQ ID NO: 247010 - DNA, 519 bp, Klebsiella pneumoniae
atggcggccaaaaaatttgctattgtcctcgttgagggggaaacggaaaaggcattattcagtgatttcaaaacatcgcttgggtaccctataaaaaaaatagtgattgcaaacttatggaatgttagcataaaaaaaatcatgccagctttgactgaagttagtgagatcgtagtggtttttgatactgaccgaattgagaacatagaacgatttaaaaccaacataagtcttctaaaggccaagaagcatacaatctacttatttcaacaaacaaaaaattttgaagatgagattgctaaagcgtgcaacataaacaaccgtgctttgtattcttctttttgctcaaaaattgtttcctcagataatttcaaaaatgagtttattgctttacacaacagaatgccaaagctcgacggtctcaacattaacaaaagcttactatggagcagaggcataattccacaattgaatgattattcttcacatacctcatcccatgatgcttatttttcatag

SEQ ID NO: 247011 - DNA, 1200 bp, Klebsiella pneumoniae
atggcttttactaaaatcagaatcgacaatcttttttgctttgaaaacagtgtccttgacctgagtttcacaagaaccccagttaatagctcactggaaggtgagtacattgaggggtatgaaaagttttacttcaaaaaagtgtgcattgtatctggcgcaaatgcatcaggaaaaacatcacttggccgggtaatgatctccgtactacgatttcttagcaccggggtttttaatccggaaccattaaaattaatggacaaaacgaaacctgcttatattgaaatggacttctttcaggcccatttgaaatctttattcaggactggtatttggcttaaagctacagacgactctgtcactgtagagaaaattgctatggcatcagttgatttacgcaagtccgattcttgtgcaaaaacgactaaaagattagacattgtctggaatgatcaaaaattcgaactaaatggaccaaacaaatatttctctactgagaatgctaatccaaaggagttttctcaatatctagataatttagggtttgttctaggatggcattttatactttctgaaaaccaagaaaatacgaataagatatctcgtattggaagcaatattctaaagagtatacttaaaacctttgacaatacagttaaatccgtttctggactaattgttaaagatgatgaaggcaatcaaaatctgcaagggtactctgtgattttcaataatggtgataaagtcattattgacatggagggggagataactaacaaagatagattatcccgagggacttatgatgctgtaaaaatatcgcacctcctttcagggatacttgaagataaaactgaagaaactgatatgaatttcccatgtagtggcctttattttttggatgagaaaatggccttcacccatacagagttagaaaaaataatggtcactttgataatatctaaactctgcagatatggtcagtttatatatacaactcataattacgatatattgagtttagatttaccgactcactcgtttacatttactaaaaaaataaacgggtcaaccacatttattgaagcgacctctcagcataaaaagaatgaccgaaatcttttaaataaagttaaaaacgattgtttcgcgaccatccctgatgtttcattaattgaagaaatgctttttgaggattga

SEQ ID NO: 247012 - DNA, 2328 bp, Klebsiella pneumoniae
atggcatttaatttaactcgaatgactgtttatgcacttctttgtgcattagaagaagatcttcgtttaatagtaataaactatatcctaaagcctgaaaatatcagtaaaaaattacctattgaacttttagagaaagctaagcgaaggttggagaaagatattggtacagtcatggatggtgttgagtatattgatttagttgattatttcgatttgggtgatacatatcaagttataaactctaatggcaaagatattcctgaacatatttttaagtttgtgaaatcaatcaccaaggatttagatactctagtcttaataagaaatagagtgatgcatataagacctttagatgttgaagattatcctactatagtcacgatttgtgataagatcataaagtcagagataaattgttgggggaatctgagggaggttgtagaaaaagtaaatagtaacccgagctttttactttcgatggaaattaaaaactatgatgaagaaaaaaataatcacaacttgccacttcctgattttgatgaaacaggattaattggaaggcaagagcaggttataaaagtaaagcaactatgttatggagcgtttcctgtaatttctattgtgggtgagggaggggtcgggaaaacagctttagctctgaaggttgcatatgaaatattggaggatgataacaatccttttgatgcaatagtatgggtttcatcaaaaaccacacaaataacagttaatgaaataaaagagatcaaagatgcgatttctgattcaattggagttattcaagaaatatcaaatcagctcataggtgtgaattcacatcagtcaaattttaatgagataattgagtatttaacaacctttagaattattttgtttatagataatcttgaaacaattctagatgataatatacgtgattttgttggtgcgcttcctcagggaagcaagatagtgataacttcaagaattggtctcggtgcatttgaatatcctgttaagctgcagggtattgatgagtctcatgcttctcagcttatgaggattttgtctaaaataagaggggttagctcgctggagaaagttgaagagaaggtaatgagaagttatgtaaatcggatgtcacgaaatccaagttacattaagtggttcgtcagttcagtgcagacaggtctaagccctgaaactgttcttcaaaactcaaatatgtttctagatttctgtatgtcgaatgtgtatgagtatctatcacccgatgcccggattctgacagcagctttgcagtgtgcacctgggttaaaagatgtacctgagttatcatatcttacaggatttgactctctccaaacgcaccaatctattcaagagttgatggcaacaaatatgttgtctcagtcatctaaaacaaaaggtgcaagtgttaaaacgacttatcaattatctgaacttgcccggttatacttaggtaagaatcataagccatctcaaacttaccaaagaagtatacatgagaaaaggaataaattaaatgctctttttgagcagcaattaatgttaagaagtgaggataaatataatcctcttaacattaagttcagagataaaactgatagagtaattgttaaaatgcttagggactctcagtcatttataaggaatggccatcatgataaggcatttgagttacttactgaagctcataagttatcacctgactattttgaggttgcacgagttatggcctatctgcaccagcagaatggtgcaataagtgatgctagagagcagtatgaattagctatagtactatcgcctaatactccgcaacttcattactggtttgcgaagtttttattgcgagaagaagataatattgatgacgctttggttcaaataaagttggctcatgacttagatcctaattcaattgaagtatcactgacattagctagggtttatatgtttcaacatggatacgatgaatcggaggagacattaatggcaatagctgaggatattggtcagtccagtgagcataatataaaaatatttaaggatactcaaattcaaattgcttatcgaagggcagacgacttcgctcaaaaaggtgaatacacagatgcaatgaattttcttgaggaaatgcgtaatctttttgatgaactccctgatttttacaaagatattcatattaggaaaaaattatcgaaatgcgattttttattgaaaactatatcgcgtagcgcggatcagttaattattcgtcgaattgatgattttaaaacatggctcaagcaggagtgtgcatag

SEQ ID NO: 247013 - DNA, 378 bp, Klebsiella pneumoniae
atggcggaagagtggattctggagaacgcgcatctgcggatgtgcgtctcttctctgggcggcaaagtgcaaagtttattctcgcggcaatatcaagcgccggtgctatatgaaaatcccgccggcggcatgtttccgatgctgccattggccaatcgcgtcgccggcaaccgttttatttttcatgggcaggagattgtcctgcctcgccaccatgccgacgagtatttctttcttcacggtgacggctggttacacagcgctgggatattattgagtgcggcgccgagtattgtgtattacagctgcgtcggcagcatgcctgcggtttcgattatctggcgcagctccgctaccagttgctgcgtaaccagctga

SEQ ID NO: 247014 - DNA, 606 bp, Klebsiella pneumoniae
atgttaatccagaaagcctataaattcagacttaatccaaccgatgttcaggcgcagagattgcgccagttgtgcggttgcgcccgttttgtctggaattatggcctggcagagacgcagcgtattcttgagaccggacaaaaactcccttccgcctttgagctgaataaaatgctgacaggatggaagaaattacctgacctggcgtttttatctgatgcctacaccgacaaccttcagcagaaactgaaagacctgcatggggcctggaaacggtgctttgataaaaagctggcagcgaaagcgcccgtgttcaaacgtaaaagccacggcaatgactctgttcgtttcgtcaattttgacaaatactgccagcttgagtacagacgcgttaagttaccctcggggctgggctgggtgacattccgtcagtcccgcgacattgtgggcaaaatcaaaaacgcaacagtcagccagcacgctggtagctggtataggggtctgacgctcagtggaacgaaaactcacgttaagcaacgttttctgcctctgacgcctcttttaatggtctcagatgacctttggtcaccagttctgccagcgtga

SEQ ID NO: 247015 - DNA, 195 bp, Klebsiella pneumoniae; identical to SEQ ID NO: 100607

SEQ ID NO: 247016 - DNA, 501 bp, Klebsiella pneumoniae; identical to SEQ ID NO: 100608

SEQ ID NO: 247017 - DNA, 1080 bp, Klebsiella pneumoniae
atggaaagcgagcagcattcttaccggtgtttgcctttgcctcctcaggctgctctggggagtgccgtgcacagattggctgacacgttgcaaaaaagtggcgagaataatcctgaatcaatcatacagaggcttgaaaacgactttgtggcgaccttgataaagactcagcaaggagcactggcgctatgggtctgggaacgctatggcattgctggattagtatcgcgtcaggcgttgatcaaatacattcgttacaccaaatctcttgttactccggttactgaacgggttggacatttgccagatatgataaaaatgcgggaaagtgttattccgataggtcgggaaaaactgctgaaaagtacttgtttcgatatgcagggacgtgccgatctcatttaccgaaaagaaaccgggcagatacgggttgttgactttaaaaccggcgaagtgagagacgaaaaaaatcagccgaaagaagaatatttgttacaaatagcggcatatggcatgatggtaaaagagttagctcctgaaatcaatattgaactggaactagccggagtaggggggagctggaccggtgtattggataacagcctgcaagaatgcgtcaatcgtgttcttgtttcatttaatgaaatattacctcgtaatacttctttttctgcgcttaatatagctcggccgggtagacattgtattcagtgtgctggccgttgctcgtgcccgatttactcaaaaaattcatgtcatttcaggcaacaattctaccctgacgatcgtcattttagcatcgatattcatgggcgattactggaggttgagatggatgataattttacgactctacgactcctacttcctgatggttatatggcaaaagtatttcatattccgactcgatttattcctgagtctaatgagatgataggttgcgacgttactctgtatggattgaaggtctttggcgttagttcggagaaaaaaatccctcgaaatttttatgttgtggatactcaggaacccagaagatcggcatttcagtttttcctgcaatggaagaaaaaccaataa

SEQ ID NO: 247018 - DNA, 5997 bp, Klebsiella pneumoniae
atgaataacccactggaatcatttgaatcaataagggatttttacatcacctatcttgaaactgcttttcgtataggttcgcccgatattcaggcataccgacgtagcttactggaacagcaaggtacattatgtgcagatctttttctggaaccaatgccaagatatcaggattatggtttaaccatcagtgatttacgtaatgtggctgaaggtgaggaatggttgccagggtttaccgagcaacaaagggacgcatttatcgatctttgtctgggagggcttttgcctcgcgataaatccgactccaccaaaggacgttttaaactttatacccaccagctagacatgctgaaaagaggggtacagcccgcaatgccgggcatcgttacatcaggaacagggtcaggtaaaacagaatcttttctgctgccagttctggctcaaattgtgaaagaagcgagtggttggccgaaaagtccctcgcttaaatgctggcagccgtggtggcataatggagtaaatactcagcctacgtttatgcgtgaggcagaagcatcagcacggccaaaagccgtgcgagcgctaattttgtatccaatgaacgcactggttgaagatcaaatggtgcgtatgcgtcgggcgcttgattcccgagaagcacatgaagcgatggatttacacttgggtggcaaccgtatcttttttggtcgttatactggcgcaacgaaagtcactggatggttaaaccatccccgaccggggagcgaggaaaaagagaaaaaagagaaaaaacgggtcgctggtaaaatcactgaattgcgcgaatatcttcaatccgtggaagacacgcatcgggaagctgtgcggcaggggattcgggatcatgatgataacctgcaattcaatttccctggtgtatcaggcggagaaatgcttagccgctgggaaatgcaaaaatcacctccggatatactgattactaacaccagtatgctttccacgatgttggtacgagagattgacgatcctatttttgaccaaacccgagaatggattgaacacgatcctgatgcctatttttatcttgtccttgacgaactgcatcttcagcgcggtacagcagggaccgaagtcagttatttgctcaaacatctcataaaccgtctggggctggatcaagaacagcaccgacataagctgcgtattctggcatccagtgcctcactgcccgttgatggccctgaaggtaagaaaagcgttgagtacttatgggggatgttcggtcagcgaggactgcctgtgagtgcagcagccaaagactgggcagattgcgtggtgaatggtgccatggttgctccagcacaggataatacgttgcatttccacggtgacctcaaccacttctgcaatacggtaaaacagctacagggatcctcactgccatctttgcaacactggtcaaacgttgcccgaagtatggggggctatcatgacgagcagtgtatagaaaaactggctcaatgggttgttgtgcaggccgcctgtatgcttgaaaaaggttgctatacatgtgaaaagtctctgcgtgctacatcaataaatactctggcagcgcgtatatttccctcccattccacaggacgtgaggggattcgtgcattaatatggttacgtgctgctacagatagctggcctgagtggttttcacatccctttcccgacgatattccattgccacgttttcgcgcccatgcttttttacgggcgctggaaggattatatgcagcaccgctaccttccccgtcaagtgcatcaacagaagaaagagagcagcacttttttgccgatctgacggttgagtctggcctgcgttatggcgagcgtcactatgacaacaaaaaatcacgacgcgtagaattactctactgtgagtgttgcgccacactattttttggcggcaaaccctcttctttctcagcaacggatagccgcgtagagcttttacccaacgatcccgatattgatcaactacctgaacatgctaaatcggttatggttgaacgacgttccgccgaagaatatgcgttgtttatgccgtccgtcgatcgattctggcctagaggagaaggaactccagccgatgaggactcttttgggaagtggattaaggctggttacgatccgtttactgcggcgattcaacacacgttatcgcctataagatcgattgaacaaacacatattgcaggctggttctattatgtcccatcgggtgatttttcctctaggaaaagaggccagtcgtccagccagtcaccggggagtgcgctgcctttccagtgtccggcatgtggtacatcatataaatacggtaaaggtaaactatcacctattcgcagttttcgagtcggctttgcgaaaaccacgcagctcctggccagtacgttgatggcggaattacaacgctctggcgatcgggaacggctggtcacattttctgacagtcggcaggatgctgccaatgcggcgctcgatttggagtcaggtcaccatgatgatgttcgccgtgagattgttgtgcgctcgctgaaggaactgtcagcgagtcagtgctcccataaacaagtgaccatacagttagaacaacttaataaacgcagaaaagaactaattagcaaagagattaaagaggggcagctctctgcggatgaagacaaagaattaggacagctttttggcgaaaaacagcggctgagtgacttattgctactgccacaggcagacagcgtatcgctgagcagtatactggagcctgaagcaccaatcgcaggcaacgtccttaatcctctgttggcaacattagttgaagcgggtattcatcctaccgatcgaacggggatatctcctgttcctgagccttcaaaacaaaaacatgatgaagaaactatcacttttgcatggcagcaattatttgaaaaaaacaaacagaccaaatggtgttggaagaaacatccttcctatgaggataatctggacgttgcccggaaggaaatctcccgcgacctaaaacaactggtcggggaaagcgtgttcagtaaaacctattttgcgctggaagaagcaggatggggttatccctgccttcctctggctaacagctgcacgcgtgaacagttggctgtctatgacgctatgcttcgcgtattggcggatgcctatcgagtcgcaccgtcccagtacacaacaacagaaacgcgctggcatgttgcagacgatgtgaagcctaaaaatcggttgcgccgttttagcgatgagctttgtaaccactccagagccaagacattattgctgattggggactttctggtacacctcaaacgctctggtcatcagggcggcattattgacattggaaaagtgcactttcgtttagtagaggctactgctcctttctggcgctgtagtcactgtggtcgcgtgcatttgcacaaaggggcaaaactttgcacccgctgttatgcgccactacctgaaacatcttctggtaacgcgggggaattacaaacccaaaactatctcggtaaacgtatatcgtatgcttcccgtatcagtagaatgcgttctgaagaactcacgggcatgacggggaatccggcagcgagattacgccgttttaaaagtatcctgattgctgatgatgatgacatattgccaaaagggctggaggacttcgaacctcatcctgagttggatagagccgccagagaggtggatgtactctctgttaccaccacgatggaagtgggggttgatattggcgatctacgcgcagtttttcaggccaacatgccgccgcaacgttttaattaccagcaacgcgtagggcgagcgggacgacgtgggcaggcttttgcatttgtattaacggcatgtcgcagcaagagccatgatttattttacttccgtaacccggaaaagatcaccggcgatctccctccgccacctttcttaactactaaactggaaatgatctgccagcgcttagtgcgcaaaatatggctggtggccgcttttaagtggctcagagagcatgtagtggattcggggcagtcgtggcctgttgatggtgacaaacataaacccgacaatcacggagagttttttcaggttcattggctaaaagaaaatcaggcaaactggttgccgcgcattcgtaacgcgctgaaagaaaccatcaacgcgcgtgatgagtttgctcaagcgtgtatgcaacaggatgaaatattctaccgcacaataatccaccctctgacgccggaatgtctaatacaagatattaaatcagtactggacgacgatgctatggcaggaaagggactggcggaagcgttggccgaacagggaaaattccctatgtacggtatgccaactcgaacacgacttctgctgacaaggccggttagtacggacgaacatgatgtacagttcgccagcatggatcgcgatctggatattgcgattcaggaatttgcgccgggaaaatatctggtacaggacaaacgccgttactttaccgcaggctatgccggaatgctgaagcaaagctacaaaaacccggccgaatttttcactgaagctgacgaaccgggagagtgcagggcgatgaccgtttgcccggtgtgcaaagtctgggtactggtgggctcgatgaccgctgtatgcagcgcctgcggtggggtcatggatggtgctgagcaatattcgtgttacgtacccaacggatttattaccactcttgaagataaatctgcaaaagaagactttgaccaaaccctgacggtggccagcagagtatctattgctgaagcttactcaattgagaatgcagtatctgtacctgactctaatgttgccatccagctaaaatcccaaacctgccttaacaggttaaatcgtggtgtttatgcggataaaaaatggagtggtttcaatgcgatacaaggaaatttacgggttccattcagaaaggcgggagtatatcagccgctatgggcaaaccacgtatggatagacagtaaccttcttgaggctgatttatcacttaaaaaccgctttacccctatgcaggaaagccgaaaatcgttttatctctcggcacctaaagtaaccgatttactggcgttgatgttggtggatactccggcggatctccagttacagtacttgcaaggcgcactgactcctgcatttcgggcggccgcgctatctgcttcttttatcatcgtcaactatgcttcgaaagagctacttgatactgatccggaagaaattgaaattctggagcctcgcgtacaaattttaaaaaacggtatttctgcaccgatattacaaatggccgatcgtctggttaatggttctggattatgtgagcgactacagcagatcgggagctctggctctccgattgttcttgaagtgatgaatgagattatcaatgacgaaggatcctatccactgaaagagtttttagaaccacagcatcgcgacgtatgttttcaagcatgttattactgcctgcatcggtacggtaatcaggcttatcatggcttgctcgactggcgtctgggactggatgtcattcaactgcttttggataaaacctatgatgccggactacgtggagatttttcatcccccggcatcattgactggacggttaatgccaaacgactggccgaagaagcatcgtctttatttaaggggagtgaagtaaaaatcgtgggaaatatcccgctgataggtattagcccacaacgctgggcggcagtactgcatcctttctggagttatgacggggtttttaaagctaatcctgaacttgaggtgctctcgcttgaggaagatatagtatttacaaatacctttgagctttctcgccgtatgggaactgtgatggcaaaactgtgcacaacacctcgttcgagcgaaaaatga

SEQ ID NO: 247019 - DNA, 2814 bp, Klebsiella pneumoniae
gtgtctaaaaaacaacatatcattaaagaaagattgaggcagatgtatctctttggtgcagagccttttgagttgatgaactgcctgaaagaatcgcagcaaaagctgattatggctggtgctaaagcggacaatttgccaaaggttccgaacaagattttacattttttgagtgcattaccacctaaggcccattccattgtgttaacgtggtttcgtactcacgtacaatttccagaacaaggcgatccccaaaaaatcattcatgagattctgctcgcagaaaataacgataaagatatctcatcaccaaaaccgctatggcgcgcaattcttgggttctacgtcactcagccttgccctgacatcgtcgcacaatttcttcgcggtgaagaaattacactactccataatgatgaccctgatgggtccagcgatagtttacctgagcagtcaacgattagtgttactgatgaagatatcgagcagtgtctattcgtaagtcagggacgtgacatatcgccttcagatcgaataattccggcgttcgttgctgggcttgttgctatgttgaagggggaaacggaagttgcaggtcagtgggtgtcacagttatccaatcacccactgcctttggggcaaaaatttggtaggctcatctcaacgtttggcgtcgttcgtcctcaggaagaggctgacaacggaatagtattattggcagagcctgttgcgccagacgagatcaatggcgatatcgatggagtgtcctttgtcggtaaagtgacgaaagtgcttccctctggcgtattctttgtttcgcccgttggcctgtttattgacgatgaactgcgggatctttcagatgctcacagccatatgctctatcccgatcgtggcgaagttataggatttttaaatcattttacaaataatgtgacccatggggaattaggcatatggcaagcgagacacaagccatccgataaaacggcccagtgtgcattgactgactaccagtctcgcgtatattccgttgtcaaaatcccctatgattccggcgaaccggatgcgattcgtgaatggctattaacctgttaccaacctcaagataaatctcctactatcttcttcttaaccgatggtctggcgctaagattacctggagacattcttgatcctaaaaaatatgattttgacgtacctctggattcttatcgggaactaagttgtgtggaactgcgctctcagtcaatcactatagtgcctcaactccccggattgagcgaaaaatatgattgtgcgcctgccattacatggataaaacggctgttaaagttagactattcatcgacagattttcctgtttttagcaaatcacacttacagcgtttagctcactttatggctgaatatgagtcagataatcgaagtgcgtatttacgtgcattgacgcaacttgagaaggttgcggtttcaagagaatttctggacggtagcattcaacaactgttgacgttgccgacaataaagacgcaaatctgcgcagagaagcaagtaatactggctcagtatgaaagtgagcaggaacaactcagacagacgattgcatcactgatggataagaaggtgcagttggatgcagaaattaaccgacaggaaaagacgctaaaaagcgaaacaaaccgtataaaaaaagcgctacgccagcaggaagctgagctggattcacgaatcaggcaaacctttgagcaagcgtctcaggcgggtatagaaacgttggcacagacggcgttgttgcgaacgatgatcgctggttcggccacacccacacccgttataccatcagaacgaatcaccgaacccgcctcgagccttccgttacctcagtctttactaccgccggaagtaaatgaaataaaaagcaaaagagtgctacaggctgcgatcgaagaacaggcagcgattaccggactaagcgaaaatctgttgttcagtttgattgctgccgcaaatgttgtatcagttgtcggattaacaggaaaatacgcccagaaaacggtcgtttctttagccaatattctgtcgggaagcatatggggggaggtctctattcatggtgatctttttagtatcagcgacttaatgaaatcacctgtgctaatcaggagtacaaatagcacgagctctatgacgctgggtgacttcttggagcaccaacaatcaagcgggttaatgactatagtaaaactacgcgggtttaaccggatgccgccggaaacattacttcccgaacttaacgaatgcctgtttagcagtgaatattctgcgggattatgctggaaggatcaaaatcataccttgcggcacctttcgttaagttaccctgtattgtttgtattgacgtttgccgttggtaaaagtacgttcccattacaggggccggttgcccaccagttgcccgtatttatggccgaatatagcagtacacaggttgagcagactgaatactcaccagccgaatatacttcagatattgctcccgcgtgcgtggcctccaaattatggtcttcgttatacgccgatgctcaccctaaagataatcagcagcaaactatgcgggcggtgttaaacgcattgggttattccgacgaaaaatctcaggcgctggcaatgctggctttcactattgggcgcagtaccacagaaaaaataaccgcagaaattgagccattggctcctgcattgataccttatgttcaggaaatcactcacggtgcatctgtaaccgtgcttgatcatctgttccagctataa

SEQ ID NO: 247020 - DNA, 2778 bp, Klebsiella pneumoniae
atgagtatatctttccctatttctttagaagagtggaatgcagcactagttaacgccgttttttttgagccttcccgtgcagatgtatttttgagtcgaatcgatactactggaagaatttttgagcaattggctggttctcgtagtaaagaagaagctaagcaaagctttcttgattcatttggtaaggatgaaagaaaaatacaacgttatctcagagatgattcaacgcttgatagtctgactcgaataaaaggcatcccacctcatttttctattctatatttaacgttacttgccgccagtgctgataatgaaactcatgatgaaggagactttagggttaggttttctgtattattgggactgaatagaaataagaaatttatttttagagatttgcctagcttatggcggagagttgaacaatggagtcagagtaaacagggttgttctcggttatttttacccgatccccaaaatgaaaagttgattgggtattctaaaaggctttcttttccttgttatagagatgaagttcgtttgcgagccatattggttcgtaataatctggacagccattcaacatttgagtctgttaataaagtaatacaccagagaattgatggttttagtgaagtattcgtcagtgaattcaatgaattttatacgctattatcaactgcagccatgcagcaggcatatagtagcccgttctggggggctgtgagggatattacgcggcatgaagaaaatcaacaagccagagagaatgggcttttctgcattcacttagacgctaccgatccgcaacttccagaaatttatctgttaatggatgatgttggtgctcagactttggataccgttaaaattgaatcgttaccagaaaaattggagagttacagtagcatttattatcagaccaacgttaatgctacattaacgagtttactttcatttctacaaaaaagaaaaaaaggcttaattggatcgcgggttggcatggcgctacatgctgggtgtttaccccttttcagggatgattctgggtttatcagttcggatggtcattattttgacgatggcctggtttgtttgattattcgtcgtgaatatgctgtacatatccgcactaggtttgaacatactggcctgactgttatgacgctaggaaaaaatacagattctgaagattgggaagttctagtctttgacacgatgagtaggcaggaattaaccgaacttgccaaattacttcctggtgctgctcgtagatttatggttcagagttggatacctgctcgaccttatatcacaggtgcagcccgttttggacagtcaatattacttaacccagccagtacgccggttattcatatggtgggtgccattggcggggaatatgtaatcagagattccaatcatatagaactggtcagcggcatactaacaccaacacaaggcggtgaaggactatttatttctccggaaaaactcacttcattatcaggacaggcgttttgtcgctatcggttaacgcttgagaaacatgttgaaccgttggtttttgacattcacgtcctcgatcatgcgccggatgctccgtatcgtaaagttgccgaacagcatgactggcttattgatggtcaacggggaacattagtgccattaaacaatgttgagtcaatggagtgtctgaaaaaccaaaaaactacctcactaggcggatcatggtcgctatggcgacgtgatgaacgtgtgcctgtagagagtaaacagtttgatttgcacatgcttcctgccgcatttgactggttagctgaagcactggcactgcgttttcaaaaacgcagtacgctaccatttgatgagcttaatacacatataacgcccgtatcactagcgacaggtattcctgcatggcggttgcgccggttgctttttgcctcaggctggctttgcgtaatagaaagacgacatgcgccgtatccggtggtatcactggcaaaacgtacattatctgtttgtgagacggtacaaggactcactgcccgagtaagcggtatgttgacgaaaagcgagcgtcatcatctgcaaggtttgttgaaagagagtgaacgggtaagacgttggtcaacagtggataataattttgcacttggcagtattgaattgattttgtcaggagccgatcgcgtaaaagatttgcttgaacgattcaattggcagcttctagtcagaaaagatttttctgttggcccattaagtggcgtgctgttatccatgactcaaataaagcaagttccagctttgccacctgatatttatgtggcgttctggcagacaaaaaagaaccaatggtcagaggaaatccagccaacaaatagcgacctgttaatgcgctgtcgggaaaaacaacgtaatcgttattttattcgggcggatacggggtactggcaaactgatagctttgcctgggcgttaatggctcacatcatgaggtcggaaaaaacgcttggcactcaaagtcactatggcgatctcttctggtctaaatcactaattactttaccgatttctgtcactcagtggtggttacatttcgccggtggttgttgtaccgtcagtgatgacggaaggataatatttgctggtagaggggatgaattgtggggaggcgttgagtgtgatgataatgctgttttcccggttaaccgagcggtcactcggcgggcgagagctttggcgctacgcaggataagcagcataaattaa

SEQ ID NO: 247021 - DNA, 1086 bp, Klebsiella pneumoniae
atgaatagtatttttgcaagagaaggagatgaaatccgggttctttcactgttttcgggctgtggagggatggactttggtattgaatctgccggaggaaagattgtttttgctaacgatatcgttgaaaacgcgtgtaaaacattagcgaagtattttcctgatactgatgttaagcatggcgatatctctcaaattcaaacttttccatctgtggatgttgtcgttggtggctacccatgccagtcattttcgatggctggtaacagaaagcccagcgacgatgcgcggaccaatctttataagcaatttcttcgggtattgaatatcgttcgacctaagtattttgtggctgaaaacgtttcaggattacagcagttgggcgcaggtagctttttagaacaacaagttaacgcctatcgggctgcaggatatcaagttagtcaccatcttgttaatgcaaaatcttacggtgttccacagtcacgcaagcgcctgtttattattggtgtcagaaacgatctggggcaatattttgaatttccggcagcaacgcatggtaaagcgaccttaaagaacccgcacttaaaaccttatgtttcccatggtgaggctatccgcgatttgccattatggccagagggtgagttttacgaacgacctcacgatcccgaggggcacttctcatggtactttatgtccagaaatcgtaaggccaaatgggatagtcctgcttataccgtcgtagcgaactggcgacatgtgacgttgcatccagccagcccaatgatgaagttaacatggtcaaatcttgaggacggctggaagcagcgctgggatttttctgaagaatatgaacatgttgctattgattcaacccggcctaagctggaacaggctaggcgtttgtcatggcgggaatgtgccagaatacagacgtttcgtcatgattttgagcctattggtgatattgaatctcgatttactcagataggcaatgcagttcctccgttactggccgaaatcatttttcaacatctattttctggtgatgggttgaaaatgaatttgaggaagggcgaataa

SEQ ID NO: 247022 - DNA, 444 bp, Klebsiella pneumoniae
atggtgtgcggcaggcgcttccggaccttcaacgtggtggatgattttaaccgcgaagcgctggcgatcgaaattgacctgaatatcccggcgcagcgggtcatgagagtgctggacaggaacgtggcaaaccgcggatatccgctgaaaatgcagatggataacggcctagagctggtcttgcgtattctggcacaatgggcaaaagagcatggcgtgatgctgggatttatcaggcccggcaagcccacgcagaatgcctttatcgaacggtccaaccggacgtactggacagaaatgctgaatttttatctattcagaaccctgaatgaagcacgggaaattacagagcgatggctggctgaatataacggcgagcgcccttacgagtccatgaataacctgacaccggaagagtaccggctgatggctgaaatcccataa

SEQ ID NO: 247023 - DNA, 1164 bp, Klebsiella pneumoniae
atgagcgacatgaatgattttgaaacattagtaaatgctatcttatcggctaaaattgaagtcgatagcggctatatgttgctcgaatttgaaggccaatcaattgatattaacataatatctaatttaatcaaagattatggtttagccgtagaacctgaagttgaaagtaaagagattatttttccgttgtcttctggggcatttcgagatgattcaaatatatatagtacgctagattcctttttaagaacatgtatttctttaggttatgttcctaataaatacattattctcactgagaagatttcttcactattagttgatgataaaattggtagtattgatgtttacttaaaatggatttcagtattatccagtgttgctaatcatcaaattggaggtaagtttatactctatataccaagtgataatggtggtaaggagttagttattaattcttacgaaagattggactatattataaaagctccctatagcaaggtaattatagactcagttgataaaataataaaggtacttggtgtcgaggatgctcagtctcccgaaagaaaatctattattcgtactgctatatatgatttgattaataacattgagagtaaagatatttcagcgctaatcacaataagcgagagagtttttaaccggtataacgatcttttggagttatatacaaatagattctccgttaacaaattattgtctgaattggaacaaaaaaaccttgagtatacaaccaaaataaatgattttgtttcatctagccaggcaaaagcttttgcaattcctggggccctgattgcggtcggtggattagctaaagccagtggcttctgggattctttattgatttttataggtctatttcttgtgtattacataacttctatgtccaatcaagttttatatgaatcctatataactttaaaaaatagtcttaatgactctttttcaaggtattctaaatttgatgaaggggtggaagttagggatgcagccaaaaaaatctcattagagctttatcataaaatagataatgcaaaagaacggttggaaaaagttaatagtattgcaaaatggatgctttggataggtggggggtatctagtcttaaaaatgatatttattgatggtaaataa

SEQ ID NO: 247024 - DNA, 1188 bp, Klebsiella pneumoniae
atggctgatagtaatgaaaatttaaataataattgcccctcatgcggtagcaagcttgattctgatgaagtatgtgcttgtggctatgacccaagcttggatgtgcaggaggaaagttatgtcccgcagtttgcattgacggcaactctggataaagtgtcaggggactccggccctatttttaaagagtctttaggtgaagtttggacattagatacagaagacgttcagctttttattaaacaaatcgagaaaaaatttaaacttaaaaggaaacttcatggtgtaatcgatgaaaataaaatgccattaagtgcacctatttctttcagtaaatatctaaatcaaaatatagattttaaatcatttgttcagtcaatgatggatagaatgagaggtgaagcgaataatgataaatcaaggctttctggtggggctataatatttattcattacaatgtagataatgataaagaaagtagtggtcgcctttttattatcatggtggatagaaaaggagtctttaattttgataggaatcttattccagagaaattaccatctatagatatagattccttgcgacaagctgtccttgttgatttgactttattcaaagcaagctacccagaaaataatggcgacccttatctgcactttatatctggtcgatctagtagcgaattctttaagcgagcattgggttgtaacccaaaaattgataataatagaagtattgatgaaacaaatagagctgttgatgattttgttaaggtaatgaagttaaagcacatagatagagttaaagtaaagaaagcagtcgaagctttgatgaaatcaaaagcaaaagatcccactgatagaaaattaacgattgaagatatagggaattgtatagagaaaacccttcctgaaaataaagaattaaaagggaagtttgtacagttcgcggatgttaatgaatatgttattgatgattttttcgaaccaagcagattttctggaagtagctttggggaaataaagatttctgatgcggaacaggaatatgaatgtaaaatatctgttgatgcaattagcgaggatgatacatcaaatgcaaaagttatatatgatagagctaatggtcaattaataatacgattgtcgcataatgcagtaactgaaatcgagaaaatagttggttaa

SEQ ID NO: 247025 - DNA, 2346 bp, Klebsiella pneumoniae
atgacaaccgaaaccgcacctgaaaaaatttctctcgacgaactgaaaagctggctctggggcagtgccaacatcatgcgtggcaccgtcgacagcagtgacttcaaaaactacatttttggcctgatcttcctcaaacgcctctctgatgtctttgatgagcgtgttgctgccatcatgaaagacgaaaaatgttcggaaacgttagcgatggcgcttatcaaagaagataaccctgagcagtttgttcccgaacaagctcgttggtcgaatctcgttaagaaaactgaaaacgtaggcgaaagcatcgacgaagcctttgcagaaatagaacgtcagaatccgtcactcgagaaggtactgactgccattcagttcggcgacaaagacaaactcagcaacgaactgctgatgcgtttattacgccactttaaccgtcataaactgggcaataaaaacctttataaagctgatttgctgggcgatgcctatgaatacctgatcggtatgtttgctgacgatgcgggtaaaaaaggcggagagttctacactccacatggtgtggtagagctgattgtaaaactgattgaccctaaacctggccacgagatctatgatccaacctgtggctgtggcggcatgctggtcgaagccgcaaactacattcgggatacctatcctgatgatggcgtcgtaatgggtaaacccaactgtaagctctacggtcaggaaaagaaccttggaacctgggcgatcgccaaattgaatatgttcctgcacaacctggatggtgatatcaggcgtggagatacgctggtcaatccacagcatcttgacagcaacaatggcgtaatgccatttgatcgcgtcattgctaatccgccgttttccagcaaagagtggtgggaaccgctggagcttaacaaagaaactaaagtcgataagaacggcaaagaaaccgaaattgcccccaaatacgcaaccgaactgaaggatccttttggtcgcttcgggttaggcgtcgcgccccggacaaaggctgaccttgcctttgtgcagcatatgatcacatccactcgtgaagatgggcgtattggcgtggtcgtcccgcacggtgtacttttccgtgaaggggaagaaggtaaaatccgtcagggcctcctggtgggtaaagatgacttcaaaggtgatttgattgaggccgttattggcctgcctcctgcattattctttaacacaggaatttctgctgccattgttctgattaacaaagcgaaacctgctgcgcttaaggataaagtgatctttattgacgcttcatctgactatgaagatggtaaaagtatgaattatctgcgaaataaaaatattgaaaatatagtttcagcatatagaaaagctaaacatgaaataattgacgcaggtgagcaagctgaaaaatcattgggggaagtaataaaaaaagttgaaattaaaaaatatttgcgcattgttgaaattagcgaaatcattaaaaataaatatactttaagcattggtagatatatagatcaatctaataaagaagatgagatagatatattaaaaacacaaagccatttagataaaataaaagaaaaaattacagagatcgattgtaaaatagagtttttaatatctggtctgactgaaactcctgatataaatctcaaagagtcctctttcggaaaaatacctaccatttggaataccgttaaacttggcgattatacaagtaagataggaagtggcataacacccaaaggtggtagcaaggcctatgttgaacaaggcatccctctattaagaagtcagaatattttacatgggaaattgaagttagatgatgtagctttcattagtaatgttcagcataacaaaatgaagaactctcaattacaagagagggatgtattgttaaatattacaggggcatctattggtcgctgcgctgttttacctaataattttaatgttggtaacgtcaaccagcatgtttgtataatacgaacttcacaaaaattacagccagaattctgtggtatttttctaaactcacattttggccaaaaacaaatatggaatttacaagcaggcggaaaccgtgaaggtttgaattttcaacagattagaagctttgaaatccatcttcctcctttaaatgaacaaaaaagaattgtagaaatttttaatgctattgatactaaacttgacttaatcgaacagctggaatttgagacccaaaacctgaaaaaaggcctgatgcaaaagttactcacaggagaatggcgagttccgttggattgcgacgaagaagctgctgcgtaa

SEQ ID NO: 247026 - DNA, 3384 bp, Klebsiella pneumoniae
atgtcaggtaagactgcaacatctttcccggaattggatggcgttgagcgtccagcgattgagtggctaaagaagctcggctatacccatatcaagggatgtcaggttgaacaaacggtgcggaccgagcccctgattctggaagaagtcctcctcgaaagattgcatgcactcaatccctggctggcagaagtctccggcgcggcttcccgagcaatgaaacaactgcgtgatatctggtttgaaaataatagcgatctgatgctggcaaaccatgctttctgggaaaacgtgctgtttcagtccaacctgcaagaaaaagataaagagggacgcaagcgcagcgtccgatttattgaccagtccggtgcagcccacaaccgtttccacgtcgtcgatcagtatgtcggtaaaaataataatgctgcgccttttaaaccggaccttttgctgttcattaatgggctaccgctggcactgatcgaatgtaaagccagcaacgttaaactgagcaagggtatagcacagattgacggttaccagaattcattcccacatcatttcgcatttaacatggtatgtggggcaatcaatcgcagccaggctaaatacggcgcgctttattctccagagcagttttacctcaagtggaaatttgatcctaaaagacctgatgagcacgccattctcactgaaattaaagagttactaggtaaagagcccacagcacaggacactttgctgtgggcattattcgaaccttctcgctttgttcgttttgtttgcttctatcctctgtttgaagttgaagatggtcaaatgatcaaaaaactgcctcgctatcaacaatggcgggccgttgagaaatccttgctccgtctacaggggaatgatccaaccttgccgggtaaatcacagggaggcgttatctggcatacccagggaagcgggaaatcgctgaccatggcacttctggcgcgtttgatgcgcgcagaaatatccaatttcgaaaatcccagcattctggtattaacggatcgcaccgatctggaccgtcagatccacaacacctttatcaatgtggggctcagggcgtcaaaagctgattcagtcgccggacttgagaccatgttaagcaatgattacggcgcgatcttcacctctacggttcagaagtttcaggaaagcgatggtaaacagatccaggcggcaaaagactctgaaaatagtgaggatacggatgaagagcagtcctcaaagagccgtgtcagacgtgttttaaaacggctggaaaacggcaaagatgaatgctggataatcaaagaaaacaatcttaacttcggtttgaataacgccagtggtgagcccctgaaagcaaaatggcaaaaagttagcgaagaaaaagtggatttccgggttctcagtactaaagcaaacttctttgttatggttgatgaagcacatcgtagccaatacggttttctcgcggcctttatgcgcgcatcactccccaatgcgaagttcattgcttttaccggtacgcctctgttcaaagaagacaaaaatacccttggcgaatttggcggcaacgaatatatagatatttatcgccttgatgaggcggtggcagatggcgcaacgttacccatcaaataccaagaaggtatggccgaatgggccagtgatggcaatctgaaggaggcgtttgaagctgagttcggtcaggaacctctggcacgcaagaaaaaactgaagcaacagttgctgaaaaaacgccggggggcaatcagccgcattgaacaaaatgcgaagcatttgattgagcacttccttaccagcgtaaaaccccgaaaatttaaggcgatacttgtctgtgatggccgggatatggcggttcgctacaaagatgttatcgatggtctgatggcagaacgccaggcacaaaatttacccacattcgacagtaaggtcgttatttctctggggagtatgacggataaccgtactggtgcaagcgagcagcaagcccataatgccacaggcgcacaaggggttctggagacgatagaagagagagtaaagcgcgaggctaaagaagggaaaactccggttgccgttctgagcgatgatattcccactttggtcaataccgaattcaaactgccttatggtcatgaagcagagaacaaacctgatggacaagccaggattaataacattggtttgatcatcgtttccgatatgctgctcactgggtgggatgcgccgattgtcagtaccctctatcttgataagccgctgaaagaacataccttacttcaggctattgcccgtgtgaaccgtacccgcaagggaaaaaaagcaggttatatcgtcgattactacggtgttgttgaatacctggatgaagcgctcaaaatttatggtggcgatgttctgcctgaacaagtctggaccgatgtagaatcggaactgccaaaacttaaagccgcgctgagcaaagtagaagatattctgccgaaaaaacacaatctacttaagcaccctgaaccctataaagaggacgccgatctatatttagatccggacgtacggcttgatatcgtggaagatttccttgttgctcttgcggagttcaatggtcgtttagatattgtattacccgatgagcgcgcagccccgtttaaaccttattttaaggtattcaatgaaattaaactgcagttgctgaataaaatgccggacagtgcggataaggtacgcatcaccgcttcagaatcagaactgcttaagggaatgctggacgaacacattgaatcaagtgaagtcaaaagcctgctgggacgcgaagtctctatccttgatgccgccgatatggatcttctgcgtaagcaaaaaagtaaaggcagcgcagcgctggtgatgaagaataaactgaagcacacgatcagaaccggtaaaggcaaagatccggcgttcttcggcgatcttgaagaagagctcgcaagactgatacaagaagagcgggaaggccggatcgaacaggctctgtttctggaacaactggaattgttcgcacagcgtatcagagataaagatgcgaagcccagcgaaatggggttgagtaccgcaactgaacgggcaacgttcaactatctgataaaacaggttgctgaagcagaagccctggcgtggacgaaaggattattcaatcatccagatattgcagctgtcatgcgctctcctatctggaagaaacaaagtgacatccacaatgagatcaagaaaacgatacgtacaattttacgcggtctgggggggtgggacatgaccgttgcacgtcagcacaccaatgagatattccagataatgctgaacaactga

SEQ ID NO: 247027 - DNA, 702 bp, Klebsiella pneumoniae
atgcccatttttcaatacggcaccatggctatcgagtgggagtttagggtcgactcaaggctcgctcatcactatgtgaccgtggaacgtggccataaggtactccttcgaggaccggatgtgtcgttgcaggaacagcaagagttgatacgctatcgcgcccgatggatcaagcaacgtctggctgaggtcaaccggccattgaaagatgagatcgtgacgggtagtcgcttaccttatcgtggtaaaactttctattgtgaagtcattccttcgcctgagctcactgtacccaacattacgttcaaccaaagtcgattcaaggtgttttcacccgagggccattttgtaagccgtcgtctttttaaacctgcactggacggtttttacaggcagaaagcaaaagagaagctgcatgtgaggatccttcactggcaacgagaaacaggtctaaccgcaacgacgtggagaattaagcacttcgatgcgcgatgggcaaactgcacggaaaacaacgtacttgaattccatccccgttgtatggagttttcaaatcgcgtaatggattacatcattatccatgagctgtgtcataccgttgagaaaaaccacgacaaaccattctggttactcataaagaaatattgcccagaatggaaagagctccatgctcaagttgaacatcctgaaatgcaactgtaa

SEQ ID NO: 247028 - DNA, 828 bp, Klebsiella pneumoniae
atgttctataattttgatttttcattattaaacagtaaatgggttaaagaagatgcggtaagggaagagttgatttctccgctattaaaggccttgggttactctatttctggcaatcatcggatcatcagaagttttgcactcccccatccatatgtttatatttggacaaaaaagaataatattaaaatcatccctgactatttactgatgatagatggcaaacataaatggatcttagatgccaaaggcccctctgaaaatattttatcaggtaaaaatgtcgagcaagcgtatagctatgctattcatcctgagattagggcctcagtttatgctttatgcaatggacaccagatagctatttttaatataaataaaaccgatcccgttttaatttttaaccttaaagatttaagtcgcaatctgaatgaattaaaaaaaatattatcgccattggcattttcaaacccacgtttacttgacttcaaacccgacttcggactggctttgcataaacttgggtatccgcttggagatattatatctttcaagtccttaggtttaccatttattattagggtcaatgacgatttatactctgctgtcgtggaaattggcccgatcagtgagggctttaatgacggaacattctgtctctcgttggactttagtaaaaaaatgttggataaaatactggcaaaaatagataacaaaatagcgaacaagattaaagaatctttgtcacggcagccatactctattgaaatactggagggcactccagtgctgaaaatcaatgcaaaaataacggggggaaatatatga

SEQ ID NO: 247029 - DNA, 213 bp, Klebsiella pneumoniae
atgttttcttacattatgccagggaccaatgatctgtcacgcgccattacattttacgatccgctgatggatatactggcgtatcctcgcggcggcacggacgagggggcaccaggcctacgtccgcatttcggcgaagatttctgcagcgcttacgtcagagatcccgatggcaacaagctggctttcgtgtattacaccgcacaatcctga

SEQ ID NO: 247030 - DNA, 150 bp, Klebsiella pneumoniae; identical to SEQ ID NO: 183555

SEQ ID NO: 247031 - DNA, 810 bp, Klebsiella pneumoniae
atgtatcaaatagggctgttttcaaagatctgccgtgtgacgataaaaacgcttcattactataatgaaattggtttactcgtccctgcctatattaaccctgagaatggttatcgattttatacttctgaccaattaatgaaattccatcagattgcgagtttacgtcagcttggatttacaataactgaaatagttactcttactcaggatgaaaattcctgccacataattgaacggcgacgccttgaagtacagaaacaaattcgggacatgaacgatatgctctcccggattaaccactatctgcaacataaaaaaaaggaaagaattatgttatatcaagctgttttgaaagagatcccggaatgtattgtttattccaagcgtttcattgttcctgatttttcctcttatatcaaattaattccgcctataggacgagaggttatgaaggcaaatccaggtttaaccttaactaccccggcttattgtttcactctttatcatgataaagagtttaaagagaaaaacatggatgtggagttctgcgaagctgttaatgattttggtaaaaatgaaggaaatattattttccaggtaatccctgccataacagctgtaactgtaatacacaagggaccatatgattcattaagaaatgcttacatttaccttatgcaatgggttgaagacaatggttacttgttaacaaattcaccaagggaaagctacatcgacggcatctggaacaaacaagactccgcagagtggatgactgaaatacagttccctgtagagaaagtttaa

SEQ ID NO: 247032 - DNA, 609 bp, Klebsiella pneumoniae
atgaaagttacatggaccgtcacgcctgtggggtatcagcgcatcgcgaaacgatgcccttcttgcaagattaaacgggacttcactccgtcaggtgcatttcgggttaattcgcaaaagaaggtgctggacgtgtggagtatctataaatgcacacactgtgattacacctggaatatctcactgttttcgcgcctgctcgtcagcaaaatcgaccgccagctttatcatcggctaatgacaaacgatgccgctacggtacatcactatgcaagtgatatcgcgatgctgaagcggaacaatgcagagctatcgggtcggcctgattttaccgttcaggagcgctggcagttaagcatctccgcccaccagcgggttcgcgttagtgtcaggatctcccgttcatttcaggtcaccctgctgtcgattttgaagcaacagctcatgctgagcaccggcgaaatcaagagacacgttgagtcagggaaaataagtggtatcacgatggaaatgcttaaatcgagaaagctgaaggcagaggaatatgaattccagctgtctgcggaaacgctgttcgcccggcgtaagattgttctgacacatcgttaa

SEQ ID NO: 247033 - DNA, 1458 bp, Klebsiella pneumoniae
atgaatcgaaaaatgactgcgttggttatcggaaatgcaagttatccggggcaggaattaaaaaatagcactaacgatgcagaagatatgtatacggcgcttagtgagtttggattctccgtaatccatttatccaatgcaacccaaagagaaatagatgaggcggtcaaatcattcagggataacttgaacagcaatgatataggccttttttatttcgctggtcacgggatgcagataaatggcgaaaactacattactgctgtagatactgattttggtaccgagattgatgcaaaatactcatcctacccattaaataaagttattgagataatggaaaaaagtggcaataaaaccaatattattatattggatgcttgccggaataatccttatgagcgagcgtggcatagagccccagctcaaagaggtttagctccattgtttgcaccgaaaggaactattgtagcttttgcgacttccccaggtgaggtcgccggcgacggagtagggagaaatggttgttatactgaagctttacttaaacatataaaatcgccagatattccaattgaagaaatgtttaagagggtaagaaactctttagctgttcttacaaaaagtaaacagacatcttgggaacatacctctttatcaggcgattttttctttaacataagtttggttagctcaataggaaaatatggaaaggaatctattgccgataacttatttaatgttaaagcaggcatcaggctccacggggtaataaccaaattaaaatctcatgactggtacattcaaactcctgccgcaagaagcattaagactgaagatattaatcaatcagatattgactcggtttttgttttaggtaggaatatttatcaggcagcttgtggaggagctcatggtgcgagcgaatttatatcttcgttccgtgataaaactcacgacatcatagaggaattgagatctgccatattagatgggatgttatttgagattttctttaactcaaatggtgagttaagagataacttcaaaacttccaagttcaatagcgtatttgaacttcaaagatattcagaatttgatgaatcattcaaattcatatcagacatcttagcgatctaccctaataagtttcatataatcccaggtaaaaatagaaatgtttcagtagatgtggaaactataattaatgataaagatgaatacaaggtgataggtgtttatctgggcggtgtaaacctcctccggcaagatgaggactttggatactatgaagatgagggggttgtcccatatgaggcactaagaaagctagcatttgaaagacgcttgtcggaagaaatgctcataccaaatgctaaacttacaatcaattttgattttgcagctgatggtcaatcaaaaattttattcccgtatggccatacggtggcaaaataa

SEQ ID NO: 247034 - DNA, 228 bp, Klebsiella pneumoniae
atgcgctgccgcgtcgatggcgtcctggcgcagatcgaggaaatgctccagtcccagacccgccgccagcagcgccgcctcctggcgcccgcccagctcgtgcaaatagtttaccgcgtgccagaactcttcttccgtaacgttatagtcgtcgatgagcgtgcagatattttccagcagacgatgaataatcgccttaaaacgttcatcgccgccggcaacatctaa

SEQ ID NO: 247035 - DNA, 711 bp, Klebsiella pneumoniae
atgactatgaatattgaccaacccgaaacatcatccgatgaaacgctgtcattcaaagagactgttcgcgcgcgccgctctatccgcggttttctcgacaaacccgtgccactaagcattatacgtgaggtgctggaggacgcccaaaacgcgccgtccaactgcaacacgcagccctggaatacacacatcgttcgcggccaaaagcttaagcagctttccagtattctccatgccaaaaatgatactggtgagttctccccggatttctctttcgaccagaaccacttttacggtgaatatcgtaagcgtaacgatgcgatgggtaaggcctattacgaagccatgaatattatgcgcgaggacaaagaaggccggcatcgtgtggcggcaatgaacttctcgttcttcaacgctccgcaggcagcgttcctgttcatgccctcatttggcgacaacgtccgcgttgcgggtgatatcggtatgtatggccagaccttcctgctgtcgctcgcggcacgcggtctcggtggtattcctcagacctcgctcggcttttttgccgatcccatccgcgaattcctgggcgtttctgacgagttcaaacttctgtttggtatctctttcggctacccggatgagtcagcccctggaaatcgcatctacatggatcgcgtgccagtcgacatcagtgtcactttccacgattga

SEQ ID NO: 247036 - DNA, 789 bp, Klebsiella pneumoniae
atggctattgttaaagattatctgaagaatgatttcaggcataatattaaaaagggaaacctgcaattaggtataggtctcgagatcccctcagctgatgtggctgaagttctggcaaccagtaaatttgactggctgttcattgacggtgaacatggtgctcactctgtggaaagtatcgttgctacagcgcgggcgattgctccatttaatatgacaccggtagttcgtgttggtggccccagtacgggcttaattaaacagttaatggaccaggggataaacaatattatattccctaaagtggaaacaaaagaagaagcagaagaaattatgtactggtcttcttttgcacctcgtggtaatcgtggtatgggtgctcaggcagttcgcgcaggcttatatggccgtatacctgactatctggaaagaattgccaatgaatcagtgatgataattcaaatcgaaagtcgtaaaggtcttgagaatcttgaggaaatttgttctgtaccgggtattggcgccattttcctggggccaattgatttggccgttgatatggggcatgggttaaatattttccatccggaagtcgttgaggcgatggaatatatgattaagaaagttaaatggctcggtattcctgtaggaacaatagcagtcactccggagcaagcaaaaaattataaagacttaggcgtttcattcctggctgtaggtggggataccatgctgcttgccagtgcagcggatgagactcatcagaattattctgagagccttaagtaa

SEQ ID NO: 247037 - DNA, 432 bp, Klebsiella pneumoniae
atgaaaattttttacaaaactcgtgcaacttcagtcggtggtcgtgacggccacgtcgcgctggatgatggttcattcggtctggatttagtcagcttcaaaaatgaaagtggtaagacaggtgcaaaccctgagcagttattcgcgatggggtatgcagcatgtttcgataacgctttgctgcatattatccagcaacaaaaactggaaggtgtttcgacaagaacttcctgcgctgttggcataggacaaaatgctcagggtggttttgcactggatattgatttggatgtggaagtaaggggtatggataaaaattccgcaattgaacttgtgaagaaaggacaccaggtgtgcccatactcaaatgccacacgagataatattgatgttcgtctgcatgtaagtgttgtagatacttttgatatctga

SEQ ID NO: 247038 - DNA, 474 bp, Klebsiella pneumoniae
atgactgacagcaatattcctggtacgcctgagcacactaacttcccgaaacttggtgattttttatgctttgcaacctatacggctaacctcgcattcggcaaggcttatcatccctatctggctgagctgggcttgacttacacgcaatggctcacactgctggctctgggagaagaggatggccagactgttaatcagttaggtgagaaactatttttagcttccagcacactgacgccattgttaaaaaaccttgaaaaaaaggatgctgtacttaggttgcgttcaaagaaagacgagcggaaagttcgcatttttcttactggtggtgggagagaactgctcaaagccagccatcgctgtctggatgtttttcattgtcttggactgtctctggaagaagttcaggtgctgcaaaaagcaattatcaggttacgggataatttattgaatacatcagcttcagactga

SEQ ID NO: 247039 - DNA, 921 bp, Klebsiella pneumoniae; identical to SEQ ID NO: 206567

SEQ ID NO: 247040 - DNA, 582 bp, Klebsiella pneumoniae; identical to SEQ ID NO: 206566

SEQ ID NO: 247041 - DNA, 918 bp, Klebsiella pneumoniae
atggaaaaaatcatcccgacagtagttcagtttatcaagcttggtgaggctggtgaatgggagcggcagtgcctgtcggatggcacacttcggtttggttatcatcaaaccccgaacagtctctgtgttgaggaacgttgggaagatgttcatgatatttggcttaacatccgtgataggcggcaagccgtcgcgaccagtgacgtaaggcagattaaaactttctacacggcaggagcagagacagtattcatcaccttttggggcgggtttctttactggtgccgccccacaggccaggtagaggtcctggaggatggaagtcgactccgaaagacggttgaagggtggaaaaacaccagtattggtggtgcgcagctaacgacggatcacctgagcggtgacctcttaaaggttcaggggtaccggggaacgatatgtaacgtaagcgcacatgattatgttgttcgtaaaataaatgacgtagatctatctgccgtttcagcggcgaaaaaggctgaggaggcatatctgaccgcgataaaaaatctgtgccaattgctgacttggcaggattttgaactactgattgaccttattttttcaaccagtgggtggcgacgcaccagcattgtcgggaaaacacaaaaaacgctggatcttgagcttgaattgccaaccaccggtgagaaagcgtttgtacagataaaatcgcatgcgaatgcaggtgccctaagtgagtatgaaaaacgtttcagggaaactactgcttataaaagaatgttttttatctggcacagcgggcctttatccgaaagtatcaaagccgactgcattacgttaatcggccccgataagttagccgggcttattctggacagtggcttaacaagatggcttcgtaaaaaagtttcgtga

SEQ ID NO: 247042 - DNA, 990 bp, Klebsiella pneumoniae
atgaaaatcaacatcgatatcagcgtcatcattcctgccttcaatgcggctgacagcatcggggttctggtccagacactgcttggcgaaacaacgctcagtactgaaatcattgctgtggatgatggctctaccgacgaaacatggacggtactcagcgccattacagatgaacggcttattctcattcgtcaggaaaatcagggggtgtatgctgcccgtaatgctgcactggcgattcaccgtggcgaatgggtggtgttcctggatgcggatgaccgggttgcggcagattttctgcaggagcggctgcgcacagcacgcgaagcacaggccgatgtcgtctttttcaatgcccggcatacagacagcgtcggacatctgcggcatcccgttcaccgcagacagccttacggccagacgctgacgggtcagcagtggatacgccattgcgtcagccagagggaatggccgcattatctgtggctgcagataatccgttcagcgtatattcgtgagcatgacctgcgattccaggaagggaaaagccacaaggacattctctggacgatacagcttgccgccgcagatggccgattttatttctctgacagacaggattacctgtgggtgaataacccggcgtcaattacccacagcccggattattacgatatccgcgcgttcagctattgcgacgtgattgcagatattctggcactcagtacacagacgcagtaccgatctgtcagacgagcgctagtcgggcatgcgctggtggaaagccgccattttctgggcctgtaccggcgcagggtgaatgaccggctggcgatccgggcgcgttttcgtgcgcggatagcctttcgccatctggtatccggcgtgagcaacctgagcgatgtctttttcctcctgaagctggtccgcaatatttatctgcctggtgtccgcaatactcccgcagccgtttcgcaggtgcggcgttaa

SEQ ID NO: 247043 - DNA, 321 bp, Klebsiella pneumoniae
atgcggcgggaatgcctgtggatagccgcacattaccgggacactgaaacggtactcacccgacagtttcgcctgctggccgtgttactgtatctgggcggttattttccgaaaggaaatgccgaaggcatgctaccggagaaatggttcattttactgaacgccccggaattaagccccatcctgacagacgatacggcccctgatgttctggcggcgtcctgccacaccctattctacctcagacggatatctccgttaaggtgttaccgccatacgcgctgtctgagcgaacatctgtttcaactaatggagatctga

SEQ ID NO: 247044 - DNA, 360 bp, Klebsiella pneumoniae; identical to SEQ ID NO: 177681

SEQ ID NO: 247045 - DNA, 1146 bp, Klebsiella pneumoniae
atggccgtatgtaaaagaaataactgcatggcacagatcggccattcacccgctgaacggatattacggctatgcccggcacattatcagggcagacagttaaatgcagccagacgaacggaaagagcagcattaatatgccagtatcccgcctgtggtatcagtatatctgaaacccgcaatcagttttattgttgtaaggaacatcgggataaagcccggaggttaatcgatgacgatgctattataagactggttaagcactcttactggctcaatgtggaagctatgctaaaaaataattcccttggactggggagtatcaccggtccgacggatattgcagacctcattcggttatatcagcgcaaagctgtccaccaaaaaacgtataatatgctgaacgggcacagagttgctgatacgacaaaaaggttaatcccctggctggatcttgagctatgccacatttaccctaactctaagggcggtgcaaatatcgccagaaacattatcatcgcacctgctgctataaaccggatgatgaaggattttatcccctgctgtcagtcaggagtgctgagtggcataaaagcaatggaaacacctcaaccggttaaatcgaccttactgaaagcgttaacggataaatacggttcagatgctgtacaggaagcattgtatggagttaagcatcttgcctttgctgatttaagtctgtcacgcaggctatttgacactgatatttacgcattccctccactaacccgtctgttaaaagaggaagccttacgcctgaatttgatgtcactatgggaaacgctggtttgtaccgaagtcagcgtctggcttaatgccgggcctgcgaatgaattatttgccgttgccgcgtttcatgcgttgctgaacggcgacgccgaccacctgctggagcaatgttatcgtttagtcgatgaaatcagggtgaagcacaagcgggggtctcaacaaatctacgacgaatttcagcatatactcagccagtacatggcaaaatattttcacattgacaccagcgaccacagagcctgtaatctcttctataaccgcttttttagtgttcctcctgtcacagaggacggtgtctgcgccataccgcctcagtga

SEQ ID NO: 247046 - DNA, 1611 bp, Klebsiella pneumoniae
atgcagaatatactgccacacactgtcattccgaaaatgccggagccttatattcccgtacaaaacagaaccccggagggttaccctgtctgcgcgttcccgccggtgatgcgggatgtcattgatgctctttataacgagacgggtatcccggcggaactgatagcgggggccgtacttgcagcctcttccctcgcctgtcaggctcatattgaggtggtaccaccacactcatcggatccgatgcactgtgcactgtatttactgacgctggcggtctccggtgaaggtaagaccagtatcagcaaaaaagtgatgaagcctttttaccggttcgctgagcaaatgaagcagcagcacgacggtctgatgaaggcacacctgcgtgctgacaatatctggaaaatacaccagaaagcattgaccagtaatctgtacactgccatcaaaagcggttctgaggggacggaggaagaacggctgttagatgaacatgcagaaacccggcagcagcctccgacccgcctggcgatgctttatgacgacaccaccgcaaaggcgctcttggaaggtttgagccggtattctgaagccggggtgctttcagatgaggcaattaccttttttaaagggtatctgaaaaacaacctcggtttactgaataaagcctgggacggggagacctatgaataccaccgcccgggcggtgaggagtacgatatcaacgcctgcctgaccctggcattaatggttcagcccccggtctttgaaaattaccgccgtaaccacggtgaactcagcaagggaagtggttttctgtcgcggtttctttatatcaataccatcagcacgctgggacgtcgccgcacaaatacggaccacgctcattctgatgaagcattaaatgtgttccacagtaaaattaaccagttacttgataagcaaaaggcgcgtttttatagtcacgatacgcagaaacaaacgctcaggttatctgatgatgcgaccacttactgggcagataaacagtcagagctcagccgtaaaacagcccccggacagcagatggagcatatcagtgaaattgcagccaaagcgggggcgaatgccctcagggttgcggccattctgacatatatgtattcacctgagagtttatgtatttcgcggggggtcatccaggccgccttcaaaattgtggaatggcatcttgaagaagcggaaaggctgtttttcccttcttctgaacggaatgcatttatggaggacgtttacgagatgttcaggtggcttaaggagaaatttctcgataatgagggatatccactcaggaaaaatgaggtaaaccggaacggcccgaaccggctgcgtgacgccagtaaatcacaatctgttcttgagcagttaatcgcactgggtctgatttgttttattcgtcccggccgtcattctgcggtgtatattgccatgccttccctggaatgtcgccactcatggtgtattccaccggcattcctggagaacggacataatccgattattgcatcgccagagaatgtcactggcaggtatggttttgaatacttcgactttaacaggctggaatattaa

SEQ ID NO: 247047 - DNA, 216 bp, Klebsiella pneumoniae
atgagtacgaccatacaaagcatcaggatactgcgcatacgcgccgttgttaacaaaacgggcatcgcccgctcaaccatctatgactggatcaacccgaagtcgccgcgccacgacccgacctttccgaaacagcgcaggctgggtatgcagtccgtcggctggcttgagtcagagctggatgcatggctgctggaacgccagcaggcatcataa

SEQ ID NO: 247048 - DNA, 744 bp, Klebsiella pneumoniae
ttgtctgataacaacgaattgtgttcatgtgatgctgaatgcacggatgtttttttctcaatagttaaagatcaggtgcagagcatgtattccctgcttcatcaggaaaaaagacttaccagcgaagaggaaaaaagacgagtaaaacaatggtttcgggatgccttgagtgatatgagggggtggagccgagaatctaaaaccagaattgttaatgggaaggtgaatgattgttacgagcagtctcaccttaaggtcggtgttttcggaaaggatatagattgttacctggatgctgccggaatccttttctggtgggggcaatatgtctggaagagaggtggtctgggagaaggtattcgcgccatgctgcgagcaactcactgcctgggggcatggcagggagcccatcatcaactcgataagcaagaggagcatcggtcactcagtgaagtgcggagcgaggctggaaaaaaaggggcaaagtctaaaagggagttgtttgaaccagtaaaaaaagaatttctgtccctgattgaggagcatatgcccgccgaaggctggaaaagccgggccaaggcagttgagagtgttgagtctgagttacgtttattcatcgtcgggcagaaaataaagcctgaaccgattgatctggaacgtctgattggtgactggtgtcgggataaaacgtcaccagaatttggcaaacaagttaaggaacttttaaaaaggcccggaacttga

SEQ ID NO: 247049 - DNA, 1176 bp, Klebsiella pneumoniae
gtggagaactttaaaatcgtagcggctttatgtcggcagattatcaaggatggggcctccgcaggtgctttgcagcagatggagcgcctttatgatgccctcagaaacgatcagcaggttgcagaagcaaagctgctcagggggctgattaacaaagccagtacgctcaataccctggagccagccagggttgagctctcccgtgtctcatttctcagaaagcaggagctcagggaaaacgttaaagtgcctgtggataaagaaagtggttctccccttgcgcagatcatttttccggaagagcttgccaatgccgagcttccggtcatgcccgacgagctggcatccgcggtcagtcagctgattgagcaatggaataatctggataaactggctcggtttggtgtgatgccatcgctgagctgcctgcttttcggactgccggggacgggtaaaaccatgctttccttttatatcgccaggatgctcggattaccgatcgtgctggccaagctggatgggcttgtttcgtctttactgggtaccagtgcaagaaatatcaataatctgtttgattttgctgctcagtatgactgcctgctgctgctggacgagtttgatgctgtggctaaagcccgcaatgacaaacatgaggtcggtgaaatcaagcgtatcgtcaacacattactgcagtgtattgatgccagatcgaagagtggtatgacgctggcaattaccaatcatgaagtattactggatcctgcagtctggcgaagatttgagatgcgtatactggtacctaagccaaattacgtagcaaggttgaagattattgaaaaatatattaatcccttgaactttacgacggaagagataaaatttttgaccgtactgacagatggatttaacggttcagatattcagttaatgttaaatcacttcaagagaatgtccgctattggtaacgccgatcagacttttattgaggctgttcggtcatttgcagtcattcatgcaggcagtgaagttaacgaattcatgcagttgttatcaaataatcaggacgcagcaataatgagcttgttgcataaaaagcatgagttcacgcaaaaagagattgcgctggtttttgacgttactcagtcaaaagtttccagaaatataaaagagtcctga

SEQ ID NO: 247050 - DNA, 2517 bp, Klebsiella pneumoniae
atgaaaagaaataatccggttcaggttattttaaattcagagcagtataaaaatacgccacaacgcagagcgatgggtaacaatactgatttttacgctgatcgtgatgatgccttcaaaaagcacaaaagaaacctccttaatgaagtaggaaatgtcagaagccagctcaaccggtcaggtcacgatcttggccttgtgaaagttgagcttaatcctcaggcgctggcgaaatctcaccgtcccgttgactctctctttcccggaagtaaagcgcctgtggtgggcgccctgggaataggggagctgctcatacaggtgacggataaaaatctggttcatctttacaacaaaattgatagcgctgaagaatataccaaaaaggtgtacgacgaaaaactgcgcaaaaatgtcaataagcccagcgaagcaaaaagcgagacgggggcaattgaccgtatcagtttttatggcagtgaagagaaaattgccttttctgcggaggatagcgctgcctggcatgccgataaggatgagggatttgccggctatcaggttgaactggttgatttcagacccgttgacgccaagctgtttaccgtgaccagcgatgccataagttcgatgaagcggtctctgagggagcagctcaagatgctgggggccggcgtgtatgcgacaaaaatgagccgttatccgtcatcatctgaagccatcatgatccagcttctcagaccggattcaggacacgattttaaggtggattttgacaagaggctggagctgaattttttaccttctgacgttgattattcctcgaaaaggcacaggctcctgctttctgttcttagcgcaagcccggtggtgaagcgtatttccctgccgccaaaaatttcccgggcgaacccgtcacactctccggtggagatggacttctcgctgcccgtccgaacggagggagaagattatccccgtgtgggcgtcattgatagtggtatccatcatgccgaactggcccagtggtgtgtggaagtatccgatggctttgaagctgaagactgcgatcccaaccatggctcacaggtggccagcctgctggtctgtgggggcatgctgaatccggagcttcctcaggtcgatgatgacggttgtctgctctatgatatctggatccccgttcacaacagtaaatccaatacgttcaccagctatttttccgacccgggtgactttttcgactggctggatattgaggttggtgatgcggtggcgaaggggtttcgcatctttaacttcagcctcaacttccgcgagtttgtccgcgatgattcctacagctttgccgccacgcaaatcgaccgcatttccaaaaaatacgatgtgctctttgtcatttcttccggaaacctgcgtcctatagatttccgggccccctgggcttcaagaccggctgcgctgcatttttctgacgttgacaggctttctcagcctgcggaggccgtcagcgccattaccgtgggagcggtaaatccgcctggatgtgacatcagcgttcacggtgcacctacggtctatacccgtcgcggacccggagtggccatgggcgtaaaaccggatgtgatccactatggcgggtactccctgaagacggggcgaaccggactggtttccattgacggcagcggagaactcgtggaagaggcgggaaccagtttctctgcgcccttggtatccaaaattcttgccagtctggaccaaaggacagcaggcaaactgtcacgcaattctcttgccgctatgctggttcatcactcagacctgacgccgccactcagagataagagcgtggatatctcttcagcaaggcgattcgccggattcggcatgccactgacctcccgcgatatgcttcacagtgacgacagcagtattacgctggtgctgagcggaagccttaagcgcagcgaagtactggagtttgatttcaactggccccgtagtctgaccacggaaggcggaaagtgccacggtaaagccacgctgaccattgcctacgatcccgtcattaatcagaactatggcgcagaatattgccgtgtcaacgttgacgctgtgcttcagcagtttaagcgggactctcagactgatgaatgggcgtaccggaaaaactgccagtcagtctgggacgttcgcctcggtaaagacgttaactatgagaaaagccaaattgacttcggcctgaagtggtggcccgtcaaaaaatatgcgtttgaaaccaaaactaaggctggcgtaggtgcttctgaccagtggcgactgaaaatcagttcaatcgagagaacgccaggagagtttccagacgaggaagttggttttaccgcactactcacaatcgaagatacacagaacagaacgaatgaccttttcaacgaggtcagacaggagctcagcgcttatggcattgagtttgaggatattaccgtgacacagcatctcaatattagggcaggccaataa

SEQ ID NO: 247051 - DNA, 213 bp, Klebsiella pneumoniae; identical to SEQ ID NO: 203614

SEQ ID NO: 247052 - DNA, 732 bp, Klebsiella pneumoniae
atgagtgagccaaaatgttattttgtggtttcgcgatatcccaatgattccgatcctaagggaattggcttttcccctgttggcaacgggaaggtgcctgaggaatatctggcgtttcgccttgatgtggatcgtgttgttcagaccgttaatgcactgtttgaaaaggataaagaaaagcggctagaagtctacgagcaggtatttcaggctacgaaggtctgtttctcaggccgggaggctgactttgttccggcaagccaagcgctcagtgagctgaaaaagactatcctgagttcgtcatggaccttggtcagaaaccggataatgggggtatacggtctctatgccctgctactaatgattattctgggcgcagcacagtatttttataatgctgaactgaaaaacgtacccgccgtgctcatcgggacctgtataggttcctggctgtttgtttcaatcaaaaccaaaagcatcgtatttgatgaaatctacgagaacatcagccagcatcgcagtctgctaatgaggctgatttactgctgcacactgtcatcggctgttacattatgccttctggcaggattttttgagattaaactcggggaagtttcaacggcgctgatccccggtaacgccatcattgcggtggcggccgggattttttttgggctgggtgaatcttcacttgccacaaaattgtcaggcaatgttaaagacgctatttaa

SEQ ID NO: 247053 - DNA, 405 bp, Klebsiella pneumoniae
atgactcaacattttaccacatcgttcggtaaactctttgctaaagagtttggtaattttaccgaaagtgaccaagacaaagttcttgattttactgaacaattcgagcgatgtggtttgcgggatttctcttgttatcaagggaaaatttctgcatcttggtcgaatttagatgaaactgacgctaattacatttatgcaaaagacaacgatctctggcactaccatgtagggttacctgagtacgtacagcgacatccaaaatattatacgtcagactgggtggttcattttcaatgggtagaacgtggaaaccatattcatcttgttgatatgtgttatcattatacctatgatggtcagttttatcttccgaaaccagagtatcttgaaaaagccagttaa

SEQ ID NO: 247054 - DNA, 615 bp, Klebsiella pneumoniae
atgaatttatttacaaccttaggagtgggacttgcgcctcttcttctctcgacgcaagctcaggccactagtgttgccgtacctatcacaagagtacaacctgccgagtttacatcagcggcaagagggcggggtatgacccctgaagatgttctccgactgaacggtgaaatttcacctttacttagtcagttgcttgatttcaatcgcgatttagaagaagggattgatgtgttgcatactgcgattgggaaaggtgaacgggtcgagatatctcagtcgttagttaacagtgctgattccagcattgaatcagctaaggcctcaatggctttggctcaagaagctttcgggtttgtgttgtctgttgagcggagcgcttgccgaccaatgctggaagaacttcagacaaaaaccattgctggtatagctgctagcatagagactatgaaaaagataccagagttgtcaaagcaagcatcagaacagactaaggccgtcgttgcatttgagcaagaccggatgtctgttgcattgaactctgatagaattgagatgaaaccagggatgtcgcgcgaagaaaaacggcgtttcattctgtctcatgcatcttaa

SEQ ID NO: 247055 - DNA, 150 bp, Klebsiella pneumoniae
atgaatcaaaagataactgagtttctttttaagaaaagccttggcaaggctattgaaaaagtgtttttattttcattttttcttttcgtgtttttgtttctgcattggattgcttccacttctagtcatgtacctatggtgagcgattga

SEQ ID NO: 247056 - DNA, 210 bp, Klebsiella pneumoniae
atggtagtcacgaactgtctggggctgaatggcaaaacgtcgatttcgcagttcaacccaatacagcttcttgtgttgttgacttcatcgtgtctcagcttcgtccactcgatggtatgcatgttagtgagtacgacccgcttaccggaaaaggcagattcgttaacatgggatttgattttacccccggtatttataccttgcgtctga

SEQ ID NO: 247057 - DNA, 147 bp, Klebsiella pneumoniae
atgaatattaattttctttgttctgcattatatgagtcggcgctgggaaccaaacatttctacgctgcgctgagtttgctggccgattgcaacgaagaataccgggaagagtttacgttgctgcaaaccaaatcctcgactaactga

SEQ ID NO: 247058 - DNA, 126 bp, Klebsiella pneumoniae
atgtcgcataccagtcgtgaagatgagatagagtttggcctcgatagaatgaaatatgatgaggttattgctatggccacgcgcatctaccgaaaatgccagcaatatctctctgagataaaatag

SEQ ID NO: 247059 - DNA, 1011 bp, Klebsiella pneumoniae
atgaaaaacatccttgaagaaatcaaaaagttagcaggcgagttaaatggtactttaccgatgaaagatattttgtcttccctaagctccaacaagttgagaaaactccgccctgacgcattagccttgctggtggaggctgctcatttcctctctgaggacattgaaactggtgaatcgtacaaacctgccgaagactacacgggacttcttaaacaatttaatgcactaaccaacctcaaccgttcactacgccagcaggtttcattttatcgaagaaacattgggaatgaaaaagccaatatcgaagtgatcgctcagttacatgagcaggttaattctgaacgtgcagcaaacgaacgcctgaccgaagatataagagaactgagtaataagttgctggcccgagacgaacacctcgcggctctgaaagtgcatgaaatggctcacaacagtgcaaaacaatcattcccctcacagcatgacgaagctgtacgccgtgcagatgaagcagaaattcagttagaacaggaacgtaaaaataacttggcactaaaaaaagaagtcgaacggcttgggctggtggagcatctaacaaaaagcactgcccgtgttcttggcatccagaatgttgatgatccctttctggcacaggacgtgctgagtcataccagcagtctgatttggaattttgaacaacttactcaggaactgaaagatggtacactccttcctgcccccctttattccgcacgtatcttaccattgccgaaaagcaagctgtctaaggaaagcatcgatctggttgtcaatgtggccgggaaaatgctgattcatttgagtcaggatgaaagccagcgggacgctggtcacgagaatgactggatggctgacaactggcaaaaatcatgtatatcggggatgaacaggcatatacgtaaaaatgcccccatagatgcgatgaactatatagccttcgcgacctaccacggctggcccattaaccaataa

SEQ ID NO: 247060 - DNA, 462 bp, Klebsiella pneumoniae
atgaacttcaatatttataatgattcagtttttagaaaaatcgttagtcgcttttctttagtaactgcattcgcctttaaaacgtttgtattggctccgtgtgtaacattctttttcttcttttttctcctggcctattctgctggaggggctggaaacatcatcactgagtatattaaatcagtcgattacaacgcgaattcaaactcatatcgtgtctgtatggatgagcctttagtacccaccgctactaaaaacccagaagaaatgtggcctgttgcagaggacgcaatggaacagaaacaagtcgaagtcctctgtcatcaatacggggatgtcagcgcagacaagaaggcatccatacttaccagaaacataactgggtactatctcagcacagttgttttttatttagcggtactattatttgtccgtcttttcagaaaaccctttttttcttaa

SEQ ID NO: 247061 - DNA, 282 bp, Klebsiella pneumoniae
atgattggtgcatcctttaaaaaaggtgacagtgtaacgtgggttagtcaggctggtggctctattcgggaaaaaaaaggggaaattgttgaaattattccgccaaatggaaaatttagtaacgctattcgcgacagataccctgatctcttcaaaggagctggtgtaggatttccccggccagaaattagctatatcgttgcagtgccgcagggtaaaaccggaaaagcgaaacccaaacattactggccccgcacatctgggttgcgtttgtctcaatga

SEQ ID NO: 247062 - DNA, 288 bp, Klebsiella pneumoniae
atgaagaaaattgttttcctgattgccacgttgtccttaccgtcattgtctttcgcaatgacccagactcatgatactgccgtcgtcgataaattggctgagatttccagcaagcttgatgtacttattagtcagggggaaatcagggaaaataatgatctcctgtcccgcccgacgccggaaggggcgtgcatttatgcgaataagatctttcctgacggtcaggtacacgatgtcagtgggacgaagcaaaaatgctcgaaaggagaatggaaagacgttaaatag

SEQ ID NO: 247063 - DNA, 309 bp, Klebsiella pneumoniae
gtgaccaacatacttagttttcgtgataattcccgcctgagtctttcgactgaccagatcgtgaattccgttcccggtttccgcacccgagccgatgcgctaaaagccggttccccttttggctggagaacggctatccgcttagaacgtcgtttcgaaaatatctgggtggtgggaaagaaagactttcaacctgatgagaccgacggcatgtgttatgatgcatttcatctcccgttactacgatgggaaaacaaggacgggaagatggtttgtcctgtgttgaaaattcgcaggttaattttgtaa

SEQ ID NO: 247064 - DNA, 648 bp, Klebsiella pneumoniae
atgagccttctctgtaatgatgtttatatctatgccaccgcaaaagtgtcttcccggcacgtaatggatcaggattttctttatggcatcgccagcaataaaaatgctgattatgtttatcgcggtgccagaaacagcgtaatcgtaaatctcagtagcattgctacagcatgggacaatattctggaaacattatgtgccgatggctgggattcagattgtcttccgggtcttattcgcctttttcaggtgatggttgaacagaaaattttctgcattgaattccatgaagaccaccctaaagtacggtgggctgactggttcacctctgatacttttattcacatcaaacctattgcctatggcgttaatctcttttcttataatgagctgccgcaggcgcagcaggatcaggcccgtaaattacaaacactcattactcctgaaacactggagaagaagatattctgtgtggtcggggctggccgcgttgtgaataccgaagacgtaaaagcatttgacctctttgaaccggaggagatcaataaagattatgacggtctgattgaaaccattacaggggaaaagctggtggtaaaagtgaacaaagagagcaacactgctgatgttggcattgttatgaactga

SEQ ID NO: 247065 - DNA, 249 bp, Klebsiella pneumoniae
atggcgaaatccatcagtttccgacaggctgacttacccaagctctgtgatgtgctggagcgggaaatgacgacagaaccgcactgtttttatgatcagtatagttacgtgcgatgtgctggagcgggaagccagagatacaaagggtttgcgacgtacagtgctgatgttctggtgtgggatagcgatgtgctggtgtgggaaccttgtacatttatcgcgcaaaacacccctttcatgatgtgctag

SEQ ID NO: 247066 - DNA, 165 bp, Klebsiella pneumoniae
atgtttaatccgaaagaaaataatgtgaaataccatgcgatgcttcgctggactgagcgtgggtacatggggaatatcggacttcttcatgagctatcaaaagctgaaccgcctgacatggatgccgccaaaaatagtaacgacttgcaattattttccgtgtaa

SEQ ID NO: 247067 - DNA, 375 bp, Klebsiella pneumoniae
atgaacaaaaatagcttaatagcgctggtgttttcattccaaattctggcaacgcaaactgttcgtgctgacgttcagcaagaatatgtccggctgtctcaggatgaatatcagcaactcctttcccgcgcccaacaaaatggtgaattcttaccccgtcagagcggtgtcactgatacggggccggacggcgagcctatggtgcgcctgacaaaccgcgagtacaccaaacttattgaacagtctaaacccgaagccaatgagagctggagcgataaactaccgccttttagcatgttcagtttttggcttggttgggtgagtgggatggtcggcatcattattttccgactctttggcaaatggcggcaataa

SEQ ID NO: 247068 - DNA, 216 bp, Klebsiella pneumoniae
atgtctgatcaacaacagtatggcctcttaccgagcaatttgcaaggaggagtaaaccatgaaactaccgcgaaacgccctaatctggtgcgtattaatcgtgtgtttaacgctcttaatattcacatgccttacccggaatcgcttgtgcgaacttcggctaaaggacgggaacagggagatcgcggcaagcctggcttacgaatccaacggtaa

SEQ ID NO: 247069 - DNA, 261 bp, Klebsiella pneumoniae
atgtgcggatgtgccttaatcgaatacaataaccgttcagctaagctgtgtgggattgtattaccccacgatgttgagttggtactttttgccctcaataaatgggcgattattgcattcaacattcgtaatacggacgaaaactttactcgaatccccgtagaagactggattgacggcataaaaactgctgttaagccatcaccataccgagatcgagtgattactgcgcttacccgctgtcgtccctatacattataa

SEQ ID NO: 247070 - DNA, 306 bp, Klebsiella pneumoniae
atgaaaattgctaatgaatttaactttaatgagcatattggtggaactcagcatgggtttacatcagctcagcttgatgacctcattggttatgttaatgaaaatcgagatagaaacttctttatgcttcatcatgaagtccctgtcttcgattcaacttacatcatcaatatatttcatccctcagcgccagacaccttctgtctttatctttatcaagatgaagatggcaactggtggccttatgcgactttggattgtctgactggtgtgaaatctcttttaaaatctatctgggtgaattaa

SEQ ID NO: 247071 - DNA, 1251 bp, Klebsiella pneumoniae
atgatcacccttgaagcattatatgctaaaaattataaggcatacaaagaacttgattttagtgtaagtaaattcacgctttttattgggaaaaatagtgctggtaagagttcgataattagattagtaccatttattataaattcattgagtttagatgatgataacgttgttgatttttccccccagggcattgatatcggtgctaattattcagatgttgtccatgggcataatgattttactcgaatgagtttaggtgcatcattttcgttaaatgataattattttaattttataacggaattaacttattcaactgaactaaaaaagaccattgtatcacacttcatttgctcaaaaaataacaacccagccttcgaagtgcatctagatatcgaggccttagaaaataaaggggtgctcaaatatgtttatgacgctacttccatccctatggtatttaatggactgcttcctgattcatcatttttagatgcatcctttagtgaggaggttcatgatttattttctttactcaatacaataaaatataataaattcaaccttagttatttaggcccttttagaagtgagttaagtaggacatttaccactaaaactgttaaaaataattccgtcggacataaaggacaatttacgccatatgtttttcatgataaagaggataaatcaaatggggtccttggaaataaaataaaagaatggatgcagaaaaatttcgatgggaaatatttttttattaaatcatatgaaaaatccttttcggttaattgtagtggggggaccggtgagtctaatataattgatgaagggatggggtttgctcaaatatttccatcaataattaatcgtaatgttcgggatcttgataaggttaggggtattgaaataattgagcaacctgaacttcatatgcaccctgctgcttgtggagtggttgctgatttatatctgacagcaatgagaaataatgtcgtttttgttgagacacactcaaaagaatttttattgcgaatccgtagaagaattgctgaaggtctaaatagtgaagattttaatatcatttatgttgattttgatgtcaataacaaatctgcaaaaatagactctattgtaattgacaaaaaaggggctgttgataaatggcctaccggtatatttgaagaggattttgatgaagtaattgcattgcaaaaagcgagtagagaatatgaaaataaaatgtga

SEQ ID NO: 247072 - DNA, 942 bp, Klebsiella pneumoniae
atgaaaataaaatgtgacccatctatatttcattctaatactcaaagtgacttttttttctcatgtatgtcagcgcataaagaatcacattcacttgatatattaaatatagaggagctattagagcattttaaaaccaatattgctttatgcgagaagttgagacgactcaccgtactctctgctcaacgcaattataaattcacaataaacgttggttataaattaaaaaaagagggtattgttgatgttacattgttgaaccagattatgagtagaaaggcagtcattattatcgaaaatgaacatagtgattcatattttttagacgcaattcttcacgcaaaaggaaaaactaatatatcatctcagaaaaatataagttgggaggtcagagggcctggcggctgtggagaaatacccaaaagcattgaaagtgaaatcaataaatctcaaggagttgtgagaattattgttattcatgattcagataggatttatcctggtcaagaattagcaccagctcaattgaaaataattcaaaaagctaaaacatataatatttattgtcacactttattaaagcgagaaatagagaactacattcccgatgttattattgaaaacttagatgttacaagaaaagaaatggtttcatatttaaaaactttaaaccctcatcagagggatcactatgattacaaatttgggtttaagaaaaaaggcgggttcaaaaagaaagatgatgaatcttttaatggtttatttgagtcaatgagtgatgatgcttatgaacacttaaaaaatggctttggaaaagacatcgcggatgccgtatataataatcatcagtcaatttcactcgatgacttttctgacagatgtggtaacattcgtgctgagtttgattccatatgtgaggccattgagaaaatactatga

SEQ ID NO: 247073 - DNA, 1560 bp, Klebsiella pneumoniae
atgaatgactacaaagatgacgttccttctgtaagccctgaagttacatttatcgatgaccttgtccttaacatcgaaaatggtaagatggtattgcctgagtttcaacgaccttatgtatggaagaaaaatgatataagagacctttttgatagtatctacaaaggctatccaattggttctgttttgctatgggatggtggaggaaaagatatcccatatatagagagtatcggtgggcggtatatcggacaaagcgtaggtgataagtactatatagttgacggccaacagagattgacaactttattttgttgtttgtctgacgatattgatgatgatgatggcaagtgggatctttactttaatttaaatgaggaggaatttactcactcaattaacaaaaatgcaagtaaaggttgctatctaagcattcgctctatcaggaaaacgacttcttttcttaaggaagcaaggagaataatagaagaaacaggggacgataaactcgtagaaaaagctgagtttctggcagatagaattagaaaatataaaatggccattatcaaacttgacggtggaaccttatccgaagttgttgaggttttctcaaggctaaactcattagggaaaaacattaaacagcaagaccttatttacgctcttacatacagtggtagtgacaagaatcgagtgaatgattttataaataaggttaaggaatgttttgccaattacattgaagtcgaaaaaagtagcggtgatatttatctccagttaattaaaacagctattggtttagaggtttatgataaggataggaataaaatagtcgagagattaaaatacattgatgaaaacgaaccttataaacttgatgacataataaaatctttggatagaacattaaattatttagttaatgtcttatctatcaatagcatttccttactaccttatacacaccaattatttatggtttttcattatttccatagtggtgaggagtttaattctattgaggttatgaaatattggttgtttattgtttctgtttttgggataggtagtgcaagtccatctaagcgagaagaggttatcgatttctttaaattgggaatgcaaaaaaacaatatgagcaggcagttggaaaacattctttctgcagaggtaatccctcaattaaccggtgattatactgctggttctgcttcaggaaaaaccgtttctataattttaaataattattattcttcagtattttgtgagcgtgggattaatgctaacatcaacgacttttctgtctttccacctaaaaatatgtttggtcataaatatagtcgtttaggcggaaaaattttctataccaaaaatcatgctgttgatgtcaatgactatgtttttgatattatcgatgagcatataccaaccgatgcgtttttaaatagtgacttaaatcgcgatgaaattatttttaggcgcgagaaaataatacagagaatttatactgattttacacaagatatattattaaagttacaaaaaatttatttaatttga

SEQ ID NO: 247074 - DNA, 147 bp, Klebsiella pneumoniae
atgcactgcaccgcttatgggggcagatatagcgcccagcagcctgattcatctcgcatttttgacgtcgataatctggcgcaattcctgcaattgatctcctccctgaatttgggccagggtcataagtgcgtcgactccaggtga

SEQ ID NO: 247075 - DNA, 1383 bp, Klebsiella pneumoniae
atgttgctttgcggtcgtcagcgttaccacggcttcgatacacatgcagaaattcgtcgcaatgagttcatttctgtattcggtcaggatttactcgataagtcgcttgatacgttgggtcttgctgtcttcgcggatagcactctcgactgtctcgatgtggcccgtcagttatatgacctcgcaatagatgcttttaaacaggaacaggaagacaaggaaactcccccgccttcccaacctgatcagaatagtggttcttctggtgattctaacgacaatagtgactctgaggatgctcccggctctgctggtggttctgatgatcggtctgatgattctcctgatgctgacactacagacgcctccggcattactggaagctctgagggtcaacccgatagctccgatgacaattcaccaaatgcatctggctcatcgtgtgagaagtctgtctcttctgataacggcaattcatctggttcaccaaactatgatccgtttgctaatgctaacgatgctgatatagagcgcgccgcaaaagatatttcggataagtttaacgacaagatgcaagataaattaacacctgctcaacgtgcgaaacctgttaatcctttctcggtatctcccgctaagagctttccaaccagtaacgaatgtgtcgctcgcggcatatacgcttctgctggtctgcggcaatctcttaacggtttacttcaaggtatgcaacacgttcgcagaacttataaagagtccggtcataagattgaagggcgacttcttccgactgtctttacaggcaattcgaaagttttcaaacataaatcgaaaaccgtttctcttaattctgcatttaccattctgttagactccagcgggtcaatgggaggaagtattgttgaggctgaggctgcggttatttcattgctacatgcactggataatcttagtggagtcacgacatctgcatatcacttccctcattccaatggaaactcagttggtaaattaaaagatcgtaagcaaactctgcggcaagcaatttctgcaaaccacttcggtatcggcgctcagggatcaaccccattgagtggcgcgttatggcctgcaattattgatttagctgttgagaaagctgaccaacgcattttaattgtttgtactgatggtgatcctgacagaggtactgagcaggacgttatcaaaatgattaatgatgcaaagtctgacggaatagtggtgatcggaattggttttggttctgtgaatcaatcaatgatgtcccgcattttcggtaaaacaggagtagcaatcggtagtctctcgaatcttcgttcaaaactatttgatgttgctcgctgtgcgttactgaaccgttaa

SEQ ID NO: 247076 - DNA, 996 bp, Klebsiella pneumoniae
atgagtgacagcggacaggagagtatctgggatattcagactgcatataacgtggtgagcggaagggtggccacccgggactacaactaccgggaagcgctgacgccgcaggacagcacggaaagtatcagcagtcaggaagggatcaccgccggtgaaatttaccactacgcggagcctttcctgacagcaggtgacgcggaaagtactgagagcggtgcgttctttgcccgtctgcgtcacgagcgcattctgaacacggaatatcatgtcaccgggcattcctccagccctcatctggcgccgggtcaggttctggaaacggacggctcgttacccgatgtcgttaaggaaggtatcgtcatcaccacggtacgcaccagcggttcacgcaaaagtagctttacgctgacgtttgagggtatcccctacagcgaaaccgtctgttaccgtccggcgctgctcagtcgcccggtgatatccggctcgctgcctgcccgggtggaaagcacacagaaaggtgatacgtactcctggctcgaccaggaaggccgctatcgagtgaaactggactttgaccgcaacagtaccgaacagggttatgcgtatctgtggctgcggctggcgaaaccgtatgccggggatacttacggcttccactcaccgcttctcgacggaacggaagtggccgtcgtatttgacggtggagacccggatcgtccctacatcgcttatgccctgcatgattcagagcatccggaccatgttaccagcgacaatcatacgcgtaacgtgtggcgcacgccgtcgaacaataagttgcgaatggaagacaagcgcggcgaggagcatatcaagctcgccaccgaatacggcaaaaggcagctgaacatggggcacctggtcaatggccagcgtgaaaaacgcgtggcgctggttttgagctgcgaacggatgagtttggcgcggtccgcgcagccaaaggtctctacctga

SEQ ID NO: 247077 - DNA, 351 bp, Klebsiella pneumoniae
atgtttgtgcataaagagggggcgaagctggtcgccaatcagggggatattgatattcaggcgcagcacaacacgatggggcttctggcaaagcagcaggtgacgataaccagctgcgaggacgggatttccatcagcacgccggagacactgacgctgaatggcggcggatcgtatctgaagctgagtaaaaacgggattgaacatggttctgaggggatgatggtgatgaaagtggcgaactatctggttcccggtaccggggcatcattgaaaggtgtcacggagacgttcaggaaaaccacactggaactggtatcaccaccgcggcgcggacggttttcacgataa

SEQ ID NO: 247078 - DNA, 513 bp, Klebsiella pneumoniae
gtgagtgcagcctacttaaagccagctatcgccgtaatgattattgctggtgcctttattgctggtttagcctggagcgatcgggcatgggaaaagcggtgggcagaacgtgatagcgccgaatcgtcccaggaagttaacgcgcaaaccgccgcccggatgattgaacaggggcgtcttatcgcccgcgatgaggccgtaaaaaatgctcaagcgcaaacagctgcagcgcgtactgctgccgctaatctctctgatactgttagccagctgcggcagcaggcaaaaaaacttgccacccgcttggacgccgcaagccacaccgcaagtcttgccgctaccgtcagaagcaaaacaaccggcgccaccgccggagtgctcgccgacatgcttggaaaccttgcagaagaagctcggcggtatgctgcaatcgctgacgaacgctacacagcgggaatgacctgtgagcggatttacgaatcagtaagaacgtctatccccagtaagggataa

SEQ ID NO: 247079 - DNA, 177 bp, Klebsiella pneumoniae
gtgaagcaaagcgagttgaggcgttggcttgcggctcaaggggcagaatttaaagatggtactaaccacttgaaaatctatctcaacggcaagcaaacggtaatgccgagacatccggggaaggaaataccggaaccgctgaggaaggcaattcttaagcaactcggcatcaaataa

SEQ ID NO: 247080 - DNA, 936 bp, Klebsiella pneumoniae
atgcttttaggtgataacgaaagatttattataaaatgtgacatagatctcgaaccctacccgaaagaggctccttcaatgcttcttagaaactgcattcctactttatttgaacttatgaagaaggaggaagcattttatgaagtcaacaaagggcgttcagtaatccgactggtagaagttaaagaaacccaatctgattatcgcctgctttttcagtatgctaatcgtgatgtttcagaccctgcttttgcaaacctcaagacaggtaagagtcgtatagctaaaaaggatgaagacgaggggcttggcgcaactcttcatatggtcgtagagaaaaatgctaagaacgaacactttcccaacacgtacaccgcagtgattgaggaagtgccgggcataacacgagctcttctatcccaagctttaacagcatttttcaaacattgtggatttacattcaaaaaacctgatggaaaaaatgatcttaaatgtagaccgattgtagatattgatttccatgcttcatcaacattagaaaaaaccctatcgactggttatttgtctgggattactgcaatcagaaaagtgtctaaagatgctcttgatgaagatgctcttatcagggttgatgaagagatattgaaaatatcaacaaaatttaaacgtggcgaagctgcggtaaaggctgtgaaacaagcttatgacaaactgcgcggcatgggttatgggaccatgaggataacatataaagatgctaacagacgtaccgggaccgatagttttaatttaaatgctgacaggactttaaaagaactcgctacggcgcaactggctcagagagaaaaggcaatccttgcagaaaatattgatatttgtcaagaaataatgcacacggaactcttaggcaaaatggttaattttctggtaaaataa

SEQ ID NO: 247081 - DNA, 603 bp, Klebsiella pneumoniae
atgtcactttttgcgaagataataacacctgttgactacctgatgatctcacacaatgagaaaaagtggttcgacttcattttactcgtgattgcatccattattatagtttcgataattaatattttaccaaaaaatatctctctcatcggaaaagatagtttggtttcattagtgaatgggatattacaaatactgtctggtttttacatagcttcaatggcggcagttgccacctttcaaaaaaaaggtatggataatattatggatggtgtcgcccccaaacttcggggcaaaagtctaaccagacggagattcttaacctatctctttggctatttagcattcgttagcataatgctgtactttgttggaggtgctgttcaactaacaagtactagcataaaagaacttcatcttgctaactttagctggttaaagaatctttgtttatttatttatcttacttttgtatgtaacattttatcaaccactgccttagggatgttttttatgattgacaaaatgcatgaagaaaaaaatgaacttataattcctgaggctaatcagattagtcatgatgacgatgtagaccagccttaa

SEQ ID NO: 247082 - DNA, 1284 bp, Klebsiella pneumoniae
  misc_feature (1216)..(1225): n is a, c, g, or t
atgagtttatcaaaaacgaaaattgataaagctggcatagccttatcaaaaggacagactgacgatataattaaatatatagagttcgaggatgtttttgacgagtacaggaaaaatcatctccaaccactttcggaaaccacagttgaactacaaaacatcctgaatgattacactggtgattattatatagcccagagattaaaacgcaaaccgcaaatacttaggaaattaaggagatttagtgtccgcctttcacaactgcaagatatagggggatttagaataatcgtccaccgaaatgctgacgtagacagtctgatccaatttataaaagaacgaacgtccggcacggaagattatagcattgagaaaatcacagattatagggaaaaaggaagagacgatactggttatcgagccgttcatataataataaagagaaacgattatttcctagaattacaaataagaagtagaatacagcattattgggccgaggggattgagcgaacatctgttatatatggctatcatttaaaagagaaagaaggagcaccagaagtaatttcatattttaaagagttgtcaaatgctttttatgagatagaatcaggacggcaacccgatagcaaccataaaattatgattgagaaacttcgactttcttgtgagaaaatcattaaagaatcagagaagtttaaagtatttgacagttttgtaaaccttgatgtcataaaagcacttaaagaggttgagggtaactcaaaacaattaaacaactggatattagtctttgattggaatcaaggaaacttcaccagttgggataaagtatctctagatccagaggaagctgtaaaaaaatatgttgattatgaaaatagttttcctgcagaggatggattcgaggttgttttgattggctcaacaaatgttgaaactgttagcaaaacgcatagccactacttcgggatagagtcttacgagcatattttagaaaacttagattcatcgatagttggtttttcgaggaaaatagacattgatataggtgctgtacaaatattagccacgcttcaaaggcggcatttttggggcaaaaaaacggtaacacttgatacaatcaaaaatcatttttgcaaaggtgtgctttcgattgactcatccatgcaagatctaattgataaagatttagtaatttataaaaatggtnnnnnnnnnnaaaatggtgtttactcattgaacatacaaaagaaaaaaataattgaacaatacatttaa

SEQ ID NO: 247083 - DNA, 1941 bp, Klebsiella pneumoniae
atgcatcatttaaatgatttccccaaaagagctagaaaccacaggattgaaagacttgcgatatccgcttttgagaatttccttggagattcaaatgatttttttattcaaagtcaggacatgaatgattatggcgtagactatcaactcgaaatcacaacaaatgatcaagcaactaatattagattgtttgttcaactaaaaggtactgagcaagaattgaataatgatggttcggtcagtatatctgttaatagagcaaacctgaattatttattaatacacccttattctttttatgtgtgtttccatgctccaagtaacagtctaaaaataaccctcgctgaaagtgtggttcgaagctataaacagtcgggaaaacaatgggcagagcaagaaacactcactgtaaaattcactgaggatatttctgaatctcgtttgcatgaaattgcagaggtggctagatttaatgccatgaaggaccgtaatgctagaatcgagttgataacaaatcatatttcaaatgttagcgatgttattaataaaaccatacctaaaatacatataccagaagacaaaaaattagctcatgaattgcttaattcattgtatgaaaataaccatgatgatgtaataagtgctaatttttatgagtttttggctattttcggtcctgaccatccggtgatgattattccatatatgtcggaaattaataaagctatggatagaattaatggcaatgaagaaagagttttgaatggtatacaataccttagggatagactggcggatggtaatataacaaagggaagtttacattattcaataggtaatggatttacggctcttgatagggacaaagaagctattcaagagtataagactgctcttgaatatatgagcgaagcagagaaattagctgcgcaatgctacaaaaatatgggtagtagttactcaaagcttgggaatgaaaatgaagcatatgaatgctataagaaggcacttgagttagaaccaaacttaagtgaagctaatttggcattgggagtaattcataatcgtagaggtaattatgaattggcaatagaatacttagatagagtgctttttccaggaattcatcaacataaattaattcaagttgataaatggagaataaacactcttttcaatatgggtgattatcgttcggcatatagagagataaacaatctattaactcggaatgataataaagaggatttatggaagtggtgcttaatgctagttgcgaagttctgtcgaacttcgactgcttctgctaagcttagcttgcctttttggggtcgctttttagaattctacccaaatcaccctgatgcatctagagagattctattggcgaagaattacttaagagttaatgatgatttaactaaatatgcgtaccatgattttaagaaagagtttgaactgcgaataaataatgttagtaatgaagatagtgctttcttgtgggatcgtataggtcattgggcacaagatgaagatgagtgggaagatgcagagatgcatttccgtagagcatatgaaattgcgggtggcgaatatggatattgtcttggagtagttctgaatcatcttggtcgcttccaggaaagcttgccgcttttagttgagcaagctgaaaaaatccaacctgatgattttagctggttccaggttgctgttgcctacgaatttcaaggatatactcaggaggcaatcgactcttatgaaaaatgcttatcaataaataacaaaaacgaattggcattattcaatcttggcggtctttactggaattcggggaactatgatggagcaagtcgtgtctggaagttggcagtagcgtattaccccgaacatgagctttcgcataaaatccgaaaggatattccatttattttaaattga

SEQ ID NO: 247084 - DNA, 330 bp, Klebsiella pneumoniae
atgactgccagctattttccttcacctgctgctgattatattgagtctgctctgactgtcacggctgcgtgcaacattggcgcgaactctcagattatagagactgatcgcggctatgtcgttctcgatttatcgctgaaggtgacgcaaggaagcgtcctgcttatccgcttggctggcgaactgcagtttgcaaaattgatggggcgttcttttatcactgtcgaaggtgaatcgatagaaggggaggcgatggaagatgttgaagtgttgggggtggctacgcacgcgatcaacgacttgaggcaggacgatagccctgtaatctga

SEQ ID NO: 247085 - DNA, 1053 bp, Klebsiella pneumoniae
atgcgtgatctgatccttcaactcagcaaaagttcgatttattcaacaaagccccgcgacgataccggcgcgccgaaaacggtgatgcttggtggggcgacccgtttgcgcatctcttcacagagcctgaaacgcgcatggcgtacctccgaactttttgagcacgcactggccggccatattggcatccgcagcggccgcatcgcccgcgaagccgcggaaattctggtgaagagcgggattgaacccaggaaagcggtggattacgtcaaagctattggtgaatgctttggcaaagttaaaactaaagcggatcaaaacgatccgctgaagtgttcggaaacggaacagctggcgcacattagccccgcagagtttgacgccgtgaaagcgctggcgcaccgcctggcgggagaaaaacgtgcggccacgaaagaagaagcggcgctgctgcgccatgaccgcatggcggtggatatcgcgatgtttggccgtatgctggcggaccaaccgacctataacgttgaagctgcctgccaggtggcgcacgcttttggcgttagcgaaaccattgttgaggacgatttctttacggcggtggatgacttacgcgcggcctctgaagacgccggcgcgggccacttaggggagacaggttttggctcggcgctgttttatacctatatctgcattgataaagatctgctggtgaacaacctcaacggtaatgaagaactggcgaacaaaacgctgcgcgccttcaccgaagcggcgctaaaagtctctccaaccggcaaacagaacagcttcgccagccgcgcctatgcgtcctgggcgctggcggaaaaaggtaccgatcaaccacgctcactggcggcggcattttatcagcccattaatggcggcgatcagctggatgtcgcggtgcagcggattactgcgctgcgggaaaatatgaataccgtctacgggcagcagacggcatttcagcactttgacgtgatgaataagcagggaagcatgaatgacgtgcttgatttcatctgcgcgtaa

SEQ ID NO: 247086 - DNA, 1314 bp, Klebsiella pneumoniae
atgaatgttggtgttgagtggaatgttagtgttataaaagcgattacatggcttgccaaaactactactgatccccgcgaattttctaagcgcctggagcaagctcagactaattatattaacgaaacatcaaagaagactaattttggtgctcagtttgataaaggttggtatggagatgatgttgttgctggttttttctcacaagcaaagtctttaatcgataatagacgagcatttgaaatatccatggcatcgcatataattccttggatgtaccaactcggtctgtgtgttgatttcctggataacgtgtctggcgctgttgagcgtgctcgaagaatgcttgagagtaataccgtttatcctgatactgcaatgtttgaattgattcttgcaggaaactatgcagcaataggctacgaggtcgaatttattcctgagcgtaagggtattgcaaaaaccccggatttcaaatgtagtctagatggcggtggtgaattttttgttgaatgtaaaaggcttcagaaagggccgtattcagttcaagaggaaaatgcgcatttcatcagagctaaactagtagagggtcgcgtccattctaaaaggatgagcgtttggatggatgtgacatataaatctgaagtaattagcactccagagaattatcttgtaaatcatttaagtaattattatgggaaagattatcactgggatgatgattatggtactggatttgtaaaagcatcaaagttacaatctgctagaaatgaagttgaagccaatgggtcactctcatttcatactaaattagcaagattactcaaaggctctgctcttagcgatgatttttttaatgtttttgcttttggtcagcctgatgagcgggatcctcggtttatttcaaaaataaaatatgcctctttgttaacatggaggtgtataaatgaggtttcttttgagaaacgctctcgacatatcacaaacaacttgtcagaaattgaaaagcagatttccaattatggagttggtgttggtcatattgcaatggatgttgatgtacaaagggatgttgcagacaagcggcgtgagaaaaatcttgaagccacgaaatcattcaagcttgagtcaaagcttgttaggtttaatattcattaccttgtcccacgcatagatgaaaatcattcttggatggttgatgaaactcttgactatttttataacgacaagattattcatgatattattccagctgttcgaatatttcctgaagccgctgcatttaataacgatttgcctggttggcatcagtga

SEQ ID NO: 247087 - DNA, 627 bp, Klebsiella pneumoniae
atgaatcaaacacaattccagaaggcggctggtatcagcgccgggttagctgcgcgctggtttccgcatattacagccgcgatgaaagagtttggcataacttccgctatcgaccaggcaatgttcattgctcaatgcggccatgaaagcctcgggtttaacagggtagtggagaatttcaactacagcatcgccgggcttgctgattttgttcgttacggcaggttaacgcaggaccaggcaaactcactcgggcgcaaatcgtctgagaaggtgctaccgcttgaacgccagaaagcaatcgcaaatctggtctacagcaatcgctatggcaacaagtcggcaggtgatggctggaaatatcgcgggcgtggactgaagcaaatcactttcctggataattacctgcgatgcggtactgcgctgaggctcgatttagtgggcaaccctgagcttctggagaaggatattaacgccgcccgcagcgccgcatggttctatacctcaagcggttgtttgaaataccccggcgatttagtgcgcgtaacacagattatcaacggtgggcagaacggcattgatgaccgacgagcccgattcctgaaagctaaatctgttctggtgtga

SEQ ID NO: 247088 - DNA, 276 bp, Klebsiella pneumoniae
atgggcattgaaatgattattggtctggcaactgcgttgctggccattgtcgctggcgcatttggcattggccatgcacgtggaaccagcaaggccgaagccaaagccgatcagcagcgcactgaagaaaaggccgctgccagcgtcgcctcgacggaacggaaagaggaaaccaccagagaggccagcaatgtacagcagactgttagccacatgcgtgatgacgatgttgatcgcgagctgcgcgagtacttcacccgctccagtggtggttga

SEQ ID NO: 247089 - DNA, 741 bp, Klebsiella pneumoniae
atgcaccaagatttagccaatgcaacatttcaggtaattgcgggagattcttgcggaagtggcttcagtttcatgcgagaagacttggttgtaaccaattttcatgttgtggccacctgttgtgacttacaggaaatgcgacaaattaatcccgttattcttcaaactgaagcgaatgagcatatcggtgctcaaatattgcatattgatggtgacaacgactttgcgattatgcgattgcaatcccctcttcctggcgggagaactgttcttcagccatctgctgggtttactccaactcgaggcaaaaagttaatctttgctgggtatccgcacgggatgccgcaattgttaacccatgagggaataatttcagcccctcttgagaaggggatgttttctattgatgggatggttaacggtggaaactctggtggcccagtagttgatgcatgcactggtgacgccataggtatggtaactcagcgccgttttatgttgggtggagatgctgagaagttgagtagggaggccattcagctaaggaattatttagcccaagcttcacagggtatgagcgttggaattatggggatagattttgggcagttagctgatatgtttggtcgttctttgcaggtagttaccaagatgcttgaaatgaatgccaaccctggtattggcgtaggcttctcgttaacgcctatcatcaatgcgattagtaaatttcctgaagattaa

SEQ ID NO: 247090 - DNA, 483 bp, Klebsiella pneumoniae
atgaaacgcgctggccatagcgtcagccgcgcacgccccctgtgcgatggggttggcaaacaggatggcttccggattcagaatagtggtgaggctgctgtccacccaggtcgggtcaatctcggacagataggctatatccatgtctccgccttccagacagcctgcggaggtgatgatgttcagccagtaggtcagcgggtacttgtaccagtgaacgtgataaaaagcgccgttcacctgcttgtcgtcctttctcgcggtccccataccggtcttgccgagattgatactgaagccccccagattgaccatacagccaggcgaacggctgacgtccgtcatggccatcggctcccagtacccgatggccaggccggggcgaacaaaaatcggtggcggcgccggacacagctgcaggggactacccggattgctggtatcaggcagatcgcctttaccaacctgcacgctgccgagtga

SEQ ID NO: 247091 - DNA, 828 bp, Klebsiella pneumoniae
atggcaatcgacattaaggattcaatcaatagacttgactgggcagaagaacttataacatatttagaggatagggttcgcaaatacgtagattcagaaccactaactttgaaatttgccataatggaaagtaaaagtaatgctcccaggcaagaagaatttaaccagtttttaaaaaaatattttaaaattaatcctgctggtatggcatcactaagaatgaatgttgtaaaagatattccacctacaattaacattgctttaggtgacgttgtagagaatataagaataagctatgagtaccttgctcaagctatagctagagagcatggtatgtctggcggcgaacttgaatatatatacttcccatcaacggataagcctaaagatctagatgccagaatcaatagtgtattcaaagggaaactacaacaagatattacaagaaaaataaaaacgttcgaaccattcatgggtgggaaatatagaattagagaaattgcatcattaagcaaccttaataaacacagagagccaatatctgtcattaacgtggcaaaaaaaatatccataaaaaacaaagaaaccaatttcaccattgaagagttacaagttggccttctattggattctaaatctatcgacatctattctatacctatttttgaatccagtaaacttacattcacccaacccgttccagatttgattattgccctccataaaataaaaggaaatacaaataaagaaagcggggaaaacgtactccaatacctcaaagaatctgtaattctggcaaggcaggtagttaattcattcactaattaa

SEQ ID NO: 247092 - DNA, 258 bp, Klebsiella pneumoniae
atgtttacgatagagaaagaagttgcggtcaatcaggtaactgccgatggcatttcagtcggaaccacagcattaaaagtcaccctgacatataccatcgagaggattgagcttgaaggggagagcggtatcgctttttacacggttacatctgacgctgatgcggagggggtgcggaattatatcccattcacttattcaggtagcggcgatccgctaactgaggcagagacagcgttaaagtcagcggtagaatga

SEQ ID NO: 247093 - DNA, 567 bp, Klebsiella pneumoniae
atgctcgtcggctatgcgcgcgtctcgacgcaggatcagaacctggagctacagcgagaggccttgacccaggccgggtgccaaaagctctttgaggacaaattaagcggcacgagagccgagcgccccggcttggccaaggcgcttgaaatgctacgcaagggagacacgctggtcgtctggaagctggatcgcctgggccgtagcgtcaagcaattggtcgatctggtcagcgagttgcacaagcagagcatccagttcaagagtctcaccgacgccatcgacaccggcacgccgtcgggacggttcttctttcacgtcatggccagcctcgccgaaatggagcgcgagctgacggtggagcggacccgtgcaggattggcggtcgcccggctgtcaggccgcaagggaggacgcaaaccgaagatgaccaaaagcaagattgaatcggccaagaaactgctcgccagcgggatcgctcccaaggacgtggccaagaacctcggggtctcaatcccgacgttgtatcgctgggtgccggcttccggtcacgctgaacaaaaatga

SEQ ID NO: 247094 - DNA, 585 bp, Klebsiella pneumoniae
atgaaggaattaatgctgttaattcctctgggcggcgctttgctcttaaccgggtgcgcgggcacagagactgaatttcaatgtaatgccacgacgtcggatacctgtatgacgatggagcaggcaaatgaaaaagcgaagctgaaagaggaacgcagtgatgcaaagccggctgcggccgggttgccacaactggctgagggtaatttcagaaccacgtcagtgaattcgtacccgttgccgccacagtccaacctgacccaggccagagtggccgcggagaaagatcgagcacgtgcagtgtacctaaataatccaacggcaaagaatgaggcaacatatttcgaaaccgagaaaaggctccagtctttgccggtagtgaaaatgtctttaccagtagtggcgtcaacgtttacgtcacagtcaacactgccaggtaattatcctcgtccattaagaaaaggggaggagacaacgtcattgtggatagcgccgtatgtggactcagatgatgtatatcaccagccagcaacggttctttttgtcgtaaaaccatcggcgtggggacagcctcgccttaattga

SEQ ID NO: 247095 - DNA, 219 bp, Klebsiella pneumoniae; identical to SEQ ID NO: 152582

SEQ ID NO: 247096 - DNA, 645 bp, Klebsiella pneumoniae
atgattaaaacggtcgcactggtactgatggtgactgaccacaccggcttactgctggccggaaacaatgaagtgatgcgcctgctgggacgtggttgttttccgctgttcggtctggcatggggaatgaatctggcacggcacgcggaaatacgccagtctcaactgaacaacctgtggggctgggcgctggtcgcccaggtggcgtttatgctcatcgggtacccgtggtataccgggaatattctgtttgcctttgccgttacgggccaggtcctgcggtgggtcagccagccgtcctggtattacaccctcctggcggctggactgctggtcacctggatacccctgtcaaccggcagctacggcatggcaggagtgggcatgctcaccgccagctggctgctttgtcgcgcacagcatgcaccggaacggctgggatacggggtgttgtgggccctcatggtgttgctgatgaatatgaatgacctgagtgaatcagtggccgggctggcgattgcgctgctgacgctgatggtgtgctcatctgccggagaacgtgtgaaacgcttctggccgcggcagttcttcgtgatgttctatgccgtgcacctggcggtactgggtattgtcgtctcaatgtga

SEQ ID NO: 247097 - DNA, 195 bp, Klebsiella pneumoniae
gtgctggccgtgggcgtgtttttccacctgatagccaggcttgtcagaaaacagcctgagctggccgtccaggccggggaaatcttcgggctgggtatggtggtgttcgggggataccgcattctaaacgccctgattgctgaagccgaaaaagaggagaaagcctgtgaaaaacagcctgatgaacctcgctaa

SEQ ID NO: 247098 - DNA, 786 bp, Klebsiella pneumoniae
atgaccgttaaactcaagggcattacattgcctgatacactgacctatccgaagttacaggatttccagttatttagcgtgatggaagatacaccgataaaaacagggctggttggttcgtattttgtcggctctaaaaatgcggacccaaatcataattttgcaaaccctgcattaccattgctcacaaaattgaatccggatatcagtgattccaggtttgcattacttagcgccctgacgggatatttcgatacacaaataccgtcgagttctacacaatcgtttgtagctattgtcagagtacccagcgccacgtcagctatactggctaactatacaaaagacacaccaacaacaagtagcggagatgttgcagcaataaacattaataccgatgcaacgaaaacactcggctattatgtgcagacttcatcaactggcacgtcaccggttacgcgttcgctgaatgatttttcagccggggattttgctgttgtcggtggtgtgatttcttcaaatctaacagtcagcgcgtggacaatgagtgaaactgccagccctgctgcatccacttccggcgccttcactcaacacataacaaatggccgcacattacgcattggtgccacctatcttgataaccagtttacgggaaagatcggcatttcttccctggtgctttacaaccaggatattggctcggctgggatggttcaggtgatgaactggatgcgtaatacggttggagtacaggcaggtatctggaacgcaccgaagagctga

SEQ ID NO: 247099 - DNA, 516 bp, Klebsiella pneumoniae
atgctctatgtcgtcgaatgcgcctacaccgatccccaaagcgaagcggcgtggaataccttttacaatcaggaaaaactaccggcgctggtctctgtgcccggtttctacgcctcccagcgcttccgcgctctcagcgagggctgcccctgctacctggcgctgcacgatatccacgatgctaccgtcatcgacagcgacgcctaccgccgcaacggcggcggccattttgcccgctggcaatcggcgatcgccgactggcatcgccacctctatctaacgaataatacgctgcgggaggttgccccggatgaagtgctgctgctgggcgataccgcggaggacttgcccgtcgctgcgcctatactcctgcagccaggcggcctggcgaccgaacaaacccggtatgccgccatcctcccacgagacaacctgcatcacctggccacgactgccgccgtctttatctatcagcccatcaccgcccggttacgcaacccggcgcagcgcgcgtga

SEQ ID NO: 247100 - DNA, 1107 bp, Klebsiella pneumoniae
atgtcagaaagccagaaaaaagtgatcgtcggcatgtccggcggcgtcgactcctcggtctccgcgtacctgctgctgcagcaagggtataaggtggaaggcctgttcatgaagaactgggaggaagacgacggcgaggaatactgcaccgccgccgccgaccttgccgatgcgcaagcggtctgcgataagctgggcattgaactgcacaccgttaactttgccgccgaatattgggacaacgtctttgagctcttcctggaagagtacaaagccggccgcacgccgaacccggatattctgtgcaataaagagatcaaatttaaagccttcctcgagtttgccgccgaagacctcggcgccgactacatcgccaccgggcactatgtgcgccgcgccgatgtcgacggtaaaagccagctgctgcgcggactcgacggcaacaaagatcagagctacttcctctacacccttagccacgaacagattgcccagagcctgttcccggtgggtgaactggaaaaaccgcaggtgcgtaagatcgccgaagagctggatctgatcaccgcgaagaaaaaagattccaccggcatctgctttatcggcgagcgtaaattccgcgatttccttggccgctatctgccggcgcagccgggcaaaatcctcaccgtcgacggcgaggagatcggtacccatcaggggctgatgtaccacaccctgggccagcgtaaagggctgggtatcggcggcaccaaagagggtagcgaagatccatggtacgtggtcgataaagacgttgagaataatattcttatcgtcgcccagggccatgaccacccgcgcctgatgtccgtcggtctgattgcccaacagctgcactgggtaaaccgtgaaccgctgcagggcaccctgcgctgcacggtgaaaacccgctatcgccagaccgatatcccctgcaccgttaccgcgctggatgaagatcgtatcgaagtccgcttcgatgagccggtcgcggcggtgaccccgggccagtccgcagtgttctatttaggggaagtgtgcctcggcggcggaattattgaacaacgactgcctctgcagtcctga

SEQ ID NO: 247101 - DNA, 477 bp, Klebsiella pneumoniae
atgtttaaacctcatgtcaccgttgcctgcgtggttcacgcccaggataaatttctcatcgtcgaagaaaccattaacggcaaagcgctgtggaaccagccggcgggccatctcgaggccaatgaaacgctgctgcaggccgccgaacgtgaactgtgggaagagaccggcattcgcgccacgccgcagcacttcatccgcatgcatcagtggctggctcccgatgacacgccgtttctgcgcttcctgttcgccatcgaacttagcgatctgtgcgccactgaaccgcacgacagcgatatcgatcgctgcctgtggctcagtgctgaggaaattcttaacgcgccgaacctgcgctcgccgctggttgccgaaagcattcgctgctacctgcaggacccgcggcagccgctgtcgctgattggcgcatttaactggccgttcacagggggtgaacgaacggtgagcgcgtgctag

SEQ ID NO: 247102 - DNA, 651 bp, Klebsiella pneumoniae
atgcggcaattgataaagcctgaaaataccatgcagaaaacttcatttagaaaacatcgcgttgagcgattcagcacacaacaagtcaccagacaacgtaaagaacgccagccaaaaactgtgatcttgttcaataaaccctatgatgtgttgccgcaatttaccgatgaagccgggcgcagcacgctaaaagattttattccggtggcgggcgtttacgccgcaggtcggctcgatcgcgacagcgaaggcctgctggtgctgaccaacgacggcgcgctgcaggcgaagctgacccagccgggtaagcgcaccggcaagatctactatgttcaggtggaaggcgaacccacgcccgaggcgctgaccgccttgcgcgacggcgtcacccttaacgacggccccaccctgcctgccggcgtagaacttgtcgaggaacccgtctggctgtggccgcgcaacccgccgattcgtgagcgcaaatcgattcccacccgctggttgaaaatcacgctctacgagggacgcaaccgccaggtgcgccggatgaccgcccacgtcggcttccccaccctgcggctgatccgctacgccatgggcggctataccctcgacggactggccaacggcgactggcgcaaagccgaataa

SEQ ID NO: 247103 - DNA, 492 bp, Klebsiella pneumoniae; identical to SEQ ID NO: 26337

SEQ ID NO: 247104 - DNA, 309 bp, Klebsiella pneumoniae; identical to SEQ ID NO: 26336

SEQ ID NO: 247105 - DNA, 381 bp, Klebsiella pneumoniae; identical to SEQ ID NO: 26335

SEQ ID NO: 247106 - DNA, 249 bp, Klebsiella pneumoniae; identical to SEQ ID NO: 26334

SEQ ID NO: 247107 - DNA, 222 bp, Klebsiella pneumoniae; identical to SEQ ID NO: 26333

SEQ ID NO: 247108 - DNA, 288 bp, Klebsiella pneumoniae; identical to SEQ ID NO: 26332

SEQ ID NO: 247109 - DNA, 609 bp, Klebsiella pneumoniae
atgtttttgcaccttgtaccaaaaatcctgcatccgatgggaaatctttgcacgctggattccgtaagcgtcccggaactgtcgctacgcctgactggtaatgaccttgttgcgatgcgcccttatcccaacaagcaatacctggtggggatgctgaaggggcgtagggcgctgaatggatttttggtcaaaagtccccgtgcgtttgaagagtttacgatggtgtccgtctggaatatcgaaggattcggcaaaataacgcacaccctgaagacttttgtcgaagatacagattatgacctggtttcccatgacgtgctgctggcgcaagggagctaccgagcacaagcgtctgaacagtgtcgtgttcaccctgtttataaaaacattgcgccggtacacatcgaaccgaagatggaatcactgctgtcgaccgaacccaatttcgagaacgatgtctgtgaaacccattcgtgggggatgctggtgcgttcgcgggatgaggggtttaaggcaatgacgatgccttccgcacgcctccaggagtcggtagcgctgcggggggatcgccagccacaattggaacaggccatcgttattaccgggtga

SEQ ID NO: 247110 - DNA, 525 bp, Klebsiella pneumoniae; identical to SEQ ID NO: 26330

SEQ ID NO: 247111 - DNA, 312 bp, Klebsiella pneumoniae; identical to SEQ ID NO: 26329

SEQ ID NO: 247112 - DNA, 444 bp, Klebsiella pneumoniae
ttgctcgggaatgaagatgcgtgcgcggtggactggaatgacaacatcgtgatggacaggactgaagcagcccgcatttaccgggcgagctgcgaacagcggtcgggggattatgggctgtggtcgatccctgatgaggccgactggaagcctcgtaccgaaaatatgaagttcgaaggtgcgtggacaccttcaatccatatgcctcgctgggccagccgtattgcactggaaattaccgatttgcgggtagagcggttaaataccatcagcgaggaagatgccaaagctgaaggcgcaccaacagaatgttgtgttcttggcgataagcactttcttggcttccgcagcctctggaaaaacacgtacggcgaggacagttggcaggccaacccgtgggtctgggtcgtcaactttaagcgtattaccggggaggtcgtatga

SEQ ID NO: 247113 - DNA, 225 bp, Klebsiella pneumoniae; identical to SEQ ID NO: 26327

SEQ ID NO: 247114 - DNA, 465 bp, Klebsiella pneumoniae; identical to SEQ ID NO: 26326

SEQ ID NO: 247115 - DNA, 2376 bp, Klebsiella pneumoniae; identical to SEQ ID NO: 26325

SEQ ID NO: 247116 - DNA, 447 bp, Klebsiella pneumoniae; identical to SEQ ID NO: 26324

SEQ ID NO: 247117 - DNA, 807 bp, Klebsiella pneumoniae; identical to SEQ ID NO: 26323

SEQ ID NO: 247118 - DNA, 261 bp, Klebsiella pneumoniae; identical to SEQ ID NO: 26322

SEQ ID NO: 247119 - DNA, 333 bp, Klebsiella pneumoniae; identical to SEQ ID NO: 26321

SEQ ID NO: 247120 - DNA, 1146 bp, Klebsiella pneumoniae; identical to SEQ ID NO: 26320

SEQ ID NO: 247121 - DNA, 297 bp, Klebsiella pneumoniae; identical to SEQ ID NO: 26319

SEQ ID NO: 247122 - DNA, 468 bp, Klebsiella pneumoniae; identical to SEQ ID NO: 26318

SEQ ID NO: 247123 - DNA, 777 bp, Klebsiella pneumoniae; identical to SEQ ID NO: 26317

SEQ ID NO: 247124 - DNA, 777 bp, Klebsiella pneumoniae; identical to SEQ ID NO: 26316

SEQ ID NO: 247125 - DNA, 123 bp, Klebsiella pneumoniae; identical to SEQ ID NO: 26315

SEQ ID NO: 247126 - DNA, 264 bp, Klebsiella pneumoniae; identical to SEQ ID NO: 26313

SEQ ID NO: 247127 - DNA, 699 bp, Klebsiella pneumoniae; identical to SEQ ID NO: 26311

SEQ ID NO: 247128 - DNA, 2385 bp, Klebsiella pneumoniae; identical to SEQ ID NO: 26309

SEQ ID NO: 247129 - DNA, 603 bp, Klebsiella pneumoniae; identical to SEQ ID NO: 26308

SEQ ID NO: 247130 - DNA, 297 bp, Klebsiella pneumoniae; identical to SEQ ID NO: 26307

SEQ ID NO: 247131 - DNA, 597 bp, Klebsiella pneumoniae; identical to SEQ ID NO: 26306

SEQ ID NO: 247132 - DNA, 882 bp, Klebsiella pneumoniae; identical to SEQ ID NO: 26305

SEQ ID NO: 247133 - DNA, 516 bp, Klebsiella pneumoniae; identical to SEQ ID NO: 26304

SEQ ID NO: 247134 - DNA, 2457 bp, Klebsiella pneumoniae; identical to SEQ ID NO: 26303

SEQ ID NO: 247135 - DNA, 177 bp, Klebsiella pneumoniae; identical to SEQ ID NO: 26302

SEQ ID NO: 247136 - DNA, 1677 bp, Klebsiella pneumoniae; identical to SEQ ID NO: 26301

SEQ ID NO: 247137 - DNA, 1158 bp, Klebsiella pneumoniae; identical to SEQ ID NO: 26300

SEQ ID NO: 247138 - DNA, 825 bp, Klebsiella pneumoniae; identical to SEQ ID NO: 26299

SEQ ID NO: 247139 - DNA, 822 bp, Klebsiella pneumoniae; identical to SEQ ID NO: 26298

SEQ ID NO: 247140 - DNA, 708 bp, Klebsiella pneumoniae; identical to SEQ ID NO: 26297

SEQ ID NO: 247141 - DNA, 201 bp, Klebsiella pneumoniae; identical to SEQ ID NO: 26296

SEQ ID NO: 247142 - DNA, 1077 bp, Klebsiella pneumoniae; identical to SEQ ID NO: 26295

SEQ ID NO: 247143 - DNA, 582 bp, Klebsiella pneumoniae; identical to SEQ ID NO: 26293

SEQ ID NO: 247144 - DNA, 354 bp, Klebsiella pneumoniae; identical to SEQ ID NO: 26292

SEQ ID NO: 247145 - DNA, 318 bp, Klebsiella pneumoniae; identical to SEQ ID NO: 26291

SEQ ID NO: 247146 - DNA, 786 bp, Klebsiella pneumoniae; identical to SEQ ID NO: 26290

SEQ ID NO: 247147 - DNA, 513 bp, Klebsiella pneumoniae; identical to SEQ ID NO: 26286

SEQ ID NO: 247148 - DNA, 858 bp, Klebsiella pneumoniae; identical to SEQ ID NO: 26285

SEQ ID NO: 247149 - DNA, 951 bp, Klebsiella pneumoniae; identical to SEQ ID NO: 26284

SEQ ID NO: 247150 - DNA, 2682 bp, Klebsiella pneumoniae; identical to SEQ ID NO: 26283

SEQ ID NO: 247151 - DNA, 1254 bp, Klebsiella pneumoniae; identical to SEQ ID NO: 26338

SEQ ID NO: 247152 - DNA, 1008 bp, Klebsiella pneumoniae; identical to SEQ ID NO: 26339

SEQ ID NO: 247153 - DNA, 393 bp, Klebsiella pneumoniae; identical to SEQ ID NO: 26340

SEQ ID NO: 247154 - DNA, 840 bp, Klebsiella pneumoniae; identical to SEQ ID NO: 26342

SEQ ID NO: 247155 - DNA, 948 bp, Klebsiella pneumoniae; identical to SEQ ID NO: 26343

SEQ ID NO: 247156 - DNA, 150 bp, Klebsiella pneumoniae; identical to SEQ ID NO: 26344

SEQ ID NO: 247157 - DNA, 1035 bp, Klebsiella pneumoniae; identical to SEQ ID NO: 26345

SEQ ID NO: 247158 - DNA, 678 bp, Klebsiella pneumoniae
atgactaaaaaatctgagaaggaaaacgatcgtattcagattagtgcgttttggttatcggaacgacaatctccgtatgcatataattttttgaaaaaaaatgccctaacacatcgtggcgagcagatttctctaataagatctgcaatcactacggggttagtgctaaataatctcttccccgagttatctagttttattaatggactgaatgagagattaacagctgctgatctaaatcgattttttaatgatgaatttaataaagacaaattaaacaatgaaaatttgaaagaacaaataagctttatgcttgattcgaaattcaatgaattattttcaatgattaatggctgtgatttttctaaggcaactttttcaactactagtcaatctgatgtcagtgaaacattaaaggcagagagggtaagggatcagcggctggaattaatacctaaagaactgactgtaaatcccaaacctgagactttagagattttaacgccgattgagagcgcaaaaaagaatgattcaggtttaaatactagtcatggttctgctgctgttagcgcctcacaaagcgaaaacacggtgctgagtgaacatgcgcaaatccaaggtgtgacaaggaagccgaagaaaaaggccaatgcaaacctcgcaaatcttgcgaagtaa

SEQ ID NO: 247159 - DNA, 435 bp, Klebsiella pneumoniae; identical to SEQ ID NO: 26348

SEQ ID NO: 247160 - DNA, 558 bp, Klebsiella pneumoniae; identical to SEQ ID NO: 26349

SEQ ID NO: 247161 - DNA, 4221 bp, Klebsiella pneumoniae; identical to SEQ ID NO: 26350

SEQ ID NO: 247162 - DNA, 513 bp, Klebsiella pneumoniae; identical to SEQ ID NO: 26351

SEQ ID NO: 247163 - DNA, 1272 bp, Klebsiella pneumoniae
atgaagaaaaacggggacctcagtcagcaaacaaatcgcggttatgtcccgggtatgaatgctgacagtgtgcaggcagttatagaccatacgcaggctatccgcgctcagagtaataactcggaagcagttaacgacatcattcgcagacgtgatgagattcagggaaattcacagctcagcgagtctgcactgaaatccgtcgaaaataaaccagaagttatgcgcagtcagtcttcgaatatcgaaaagatgtttggttcatcaggaatcaccgccgctgacttcgagcgtaaaatagacagcagtcgggaagaggtgctctcgacagaaaacggtatcactatctttgcgtcatttagcttgcctgattacgtcctggaagatctactccgtaccgcgtcagaacataaggcgagagtggtttttaatggtctgaagaaaggcactacacgcctccctgaaactcaggcagctatcaaccagctggtggtgaaggggaagtttgactccccactaattacgattgacccggacgcatttaaccagtaccagatcacgcaggtcccgacaataatctcccgtgagcaatcccggtttgcaaaaatggtcggctctttcaacgttgatttcttccagcgcgaactggccagaaaacccgaccaagatcttttcccgattgctggtacgacctatccggttgaagagaagagcattattaaagagctcgaagagcgagcacagaaatacgactgggacggcgccaagaagagagcagtcgctgatacctggaaaaaccagtacatggttaatctgcctcccgctcaagagcacaaggaatggctaatcgacccgacaatcagggttactcaggacgttaaagataagcagggtcgcgtcattgcttctgctggcgagctcattaacccactggccaggttcccgcagaacctcacaatgataatttttgacccaatgaacccagggcaacttgagtgggcagagaagcaatatcgccagcgtcttggcagcggtcaggtgatgccgatgttcacgcgcatcaaacaggaaaatggatgggatcatttgaatgatctgcgcgaaaaattcaatgggaaggtgttcaaagttaatgagcaaattattgctcgtttccagataaaaaacacgccagcgctgatctccactgaaaaagagaaattccgtataacgcaattcagtgaagctgaaatacgtggtattggaacaaaaatcgcggcagaggagaattga

SEQ ID NO: 247164 - DNA, 132 bp, Klebsiella pneumoniae; identical to SEQ ID NO: 26353

SEQ ID NO: 247165 - DNA, 3177 bp, Klebsiella pneumoniae; identical to SEQ ID NO: 26355

SEQ ID NO: 247166 - DNA, 873 bp, Klebsiella pneumoniae; identical to SEQ ID NO: 26359

SEQ ID NO: 247167 - DNA, 1785 bp, Klebsiella pneumoniae; identical to SEQ ID NO: 26360

SEQ ID NO: 247168 - DNA, 876 bp, Klebsiella pneumoniae; identical to SEQ ID NO: 26361

SEQ ID NO: 247169 - DNA, 378 bp, Klebsiella pneumoniae; identical to SEQ ID NO: 26362

SEQ ID NO: 247170 - DNA, 987 bp, Klebsiella pneumoniae; identical to SEQ ID NO: 26363

SEQ ID NO: 247171 - DNA, 1053 bp, Klebsiella pneumoniae; identical to SEQ ID NO: 26364

SEQ ID NO: 247172 - DNA, 1128 bp, Klebsiella pneumoniae; identical to SEQ ID NO: 26366

SEQ ID NO: 247173 - DNA, 2013 bp, Klebsiella pneumoniae; identical to SEQ ID NO: 26367

SEQ ID NO: 247174 - DNA, 222 bp, Klebsiella pneumoniae; identical to SEQ ID NO: 26368

SEQ ID NO: 247175 - DNA, 1254 bp, Klebsiella pneumoniae
atgccagataagagagaacaaatgacttatgcatcccaggctgttaagcgtacaccacatgaagtcactgaccactttataaaaatggttcacgctcgtatagcggaagtatcaggctggcgctatgtattcgatagaataccggcatttaaagacgcttgtgataaagcacctggccaggttccttgcccatttagtggggtcgggaaatcaaagttccggttccgtaaaaaggacctctttaccggttgtgccattcacaatgattttccagtgaatgcattttgtgacggtattgatgtattggcagagtactacaagctgagcaagacccagacttgtaagaagatcctgactgatttctttgggatggatttgtacgctccattaactgatgcggatctcgaaagtgaacgtcgttataaatcaacagttcgtgcaaccgaaacgcttgacagcgatgaagttgaaaaacgagggcgtaaacttgaagtgatatatcactataccggtgaaatcaaacctgagagccctgtgtgggtgtatctccgaaatcgaggtcttaatcgagttctgagcaaccttcccaaggatttaggtctgaacaaacgactttactacatggataagtcactggaaaaacccacgatttacccgggaatgatcgcaatttatcgcgatacccgtgggcgtcctctgacaatccacagaacgttcgtcgagttaaatggtgataaggcacatgttgagaatccgaaactgatgatgaaaccgcctgccgatatgactggcggctcaattcagctgtacgatccacacttcaatccaggtacccgtacctggacgttaggtgtggctgaaggcatagaaaacgcgctgtcagttactgaagcgacttcaacaccgtgctgggccgcgagctctgcctggtgccttgaaaacgttgaagtgccggatagtctcctgcctccccctggtgtgaaagtaatacagttttacatctgggcggataaggatcttgtgaatacaaaaggcacttccccgggaatggagtcagctaaacgacttcaggaacgtatgaaagagttttttgcaaagcgatatcccacttcagagctgacaattaaagtctttgaacctgatttcgatattcctgtagggaagaaaggagtcgactggaacgatgtactaaaattaacaggaccggatggattccccgtaaaatgggctcctgaatgtcttgctcagctttaa

SEQ ID NO: 247176 - DNA, 525 bp, Klebsiella pneumoniae; identical to SEQ ID NO: 26370

SEQ ID NO: 247177 - DNA, 879 bp, Klebsiella pneumoniae; identical to SEQ ID NO: 26371

SEQ ID NO: 247178 - DNA, 936 bp, Klebsiella pneumoniae; identical to SEQ ID NO: 26372

SEQ ID NO: 247179 - DNA, 921 bp, Klebsiella pneumoniae; identical to SEQ ID NO: 26373

SEQ ID NO: 247180 - DNA, 936 bp, Klebsiella pneumoniae; identical to SEQ ID NO: 26374

SEQ ID NO: 247181 - DNA, 957 bp, Klebsiella pneumoniae; identical to SEQ ID NO: 26375

SEQ ID NO: 247182 - DNA, 270 bp, Klebsiella pneumoniae; identical to SEQ ID NO: 26376

SEQ ID NO: 247183 - DNA, 591 bp, Klebsiella pneumoniae; identical to SEQ ID NO: 26377

SEQ ID NO: 247184 - DNA, 258 bp, Klebsiella pneumoniae; identical to SEQ ID NO: 26378

SEQ ID NO: 247185 - DNA, 537 bp, Klebsiella pneumoniae; identical to SEQ ID NO: 26379

SEQ ID NO: 247186 - DNA, 390 bp, Klebsiella pneumoniae; identical to SEQ ID NO: 26380

SEQ ID NO: 247187 - DNA, 255 bp, Klebsiella pneumoniae; identical to SEQ ID NO: 26381

SEQ ID NO: 247188 - DNA, 960 bp, Klebsiella pneumoniae; identical to SEQ ID NO: 26382

SEQ ID NO: 247189 - DNA, 909 bp, Klebsiella pneumoniae; identical to SEQ ID NO: 26383

SEQ ID NO: 247190 - DNA, 330 bp, Klebsiella pneumoniae; identical to SEQ ID NO: 26384

SEQ ID NO: 247191 - DNA, 1182 bp, Klebsiella pneumoniae; identical to SEQ ID NO: 26385

SEQ ID NO: 247192 - DNA, 207 bp, Klebsiella pneumoniae; identical to SEQ ID NO: 26435

SEQ ID NO: 247193 - DNA, 225 bp, Klebsiella pneumoniae; identical to SEQ ID NO: 26434

SEQ ID NO: 247194 - DNA, 207 bp, Klebsiella pneumoniae; identical to SEQ ID NO: 26433

SEQ ID NO: 247195 - DNA, 324 bp, Klebsiella pneumoniae; identical to SEQ ID NO: 26432

SEQ ID NO: 247196 - DNA, 282 bp, Klebsiella pneumoniae; identical to SEQ ID NO: 26431

SEQ ID NO: 247197 - DNA, 606 bp, Klebsiella pneumoniae; identical to SEQ ID NO: 26430

SEQ ID NO: 247198 - DNA, 216 bp, Klebsiella pneumoniae; identical to SEQ ID NO: 26429

SEQ ID NO: 247199 - DNA, 201 bp, Klebsiella pneumoniae; identical to SEQ ID NO: 26428

SEQ ID NO: 247200 - DNA, 1206 bp, Klebsiella pneumoniae; identical to SEQ ID NO: 26427

SEQ ID NO: 247201 - DNA, 282 bp, Klebsiella pneumoniae
atgaagaataccgcaatcaacatcagcacgaagaaaccattgcagacagttaaggacccggtgacccgggtcagcattcattgtacggctaaggatgagaagggcgcagacgtggaagtaaatattctcgacctggaacagcaccacaccaccaacgaaatcaaattgacgtttggcggttccccttcccaggcgctgacaatgctcagcagagtgatggtcgtgctgcaacagcaggcggccgaagaaccgcaacggaattcctgctcccgtttgcagtga

SEQ ID NO: 247202 - DNA, 141 bp, Klebsiella pneumoniae; identical to SEQ ID NO: 26425

SEQ ID NO: 247203 - DNA, 438 bp, Klebsiella pneumoniae; identical to SEQ ID NO: 26424

SEQ ID NO: 247204 - DNA, 546 bp, Klebsiella pneumoniae; identical to SEQ ID NO: 26423

SEQ ID NO: 247205 - DNA, 237 bp, Klebsiella pneumoniae; identical to SEQ ID NO: 26422

SEQ ID NO: 247206 - DNA, 315 bp, Klebsiella pneumoniae; identical to SEQ ID NO: 26420

SEQ ID NO: 247207 - DNA, 357 bp, Klebsiella pneumoniae; identical to SEQ ID NO: 26419

SEQ ID NO: 247208 - DNA, 714 bp, Klebsiella pneumoniae
atggtgtggcgagtgataggaatcagcattattgtcctagtactcattgtgctttactgcctgatgggatttgtatcgtcggccattgctgaacgcaggacagccagacagattgaaatatacctgcctgatgatgcagaagggcttctgagcgacttaacgctgccggtcaatgccaccggcaccacgcagattgatcacgttcttatcgcctctcatggactctacgtcatcgagcagaagaactatgcaggaaagctctatgggaagctggaggagagccactggcgaaaatggaaatcgtcagggacactaaagttacaaaacccgttcaggcagaactacgggcacataagggccattcagtccacgttacgcgccagcgagctggagtgtatcaatgttgtcatcattaacggcccctgcaagtttgaaggtgagaagccagactggctttgcatgggtatggaggagttcgttcggaaagtcactgagaggcgccagttaaatgtattcaagcctgaagcagtaagttttatccgtggagagctgaagctaaagagaaagcctccgggcctttatactgatttgaaccatatccacaacgttaccactcgatacaaaacaaccatgcggctggagcagcgtattacctataaccttttgcgcttttctcggcttatactgagtaaaatgttcagatcggcaaagtaa

SEQ ID NO: 247209 - DNA, 1182 bp, Klebsiella pneumoniae; identical to SEQ ID NO: 26417

SEQ ID NO: 247210 - DNA, 663 bp, Klebsiella pneumoniae; identical to SEQ ID NO: 26416

SEQ ID NO: 247211 - DNA, 1104 bp, Klebsiella pneumoniae; identical to SEQ ID NO: 26415

SEQ ID NO: 247212 - DNA, 2085 bp, Klebsiella pneumoniae; identical to SEQ ID NO: 26414

SEQ ID NO: 247213 - DNA, 3036 bp, Klebsiella pneumoniae; identical to SEQ ID NO: 26413

SEQ ID NO: 247214 - DNA, 513 bp, Klebsiella pneumoniae; identical to SEQ ID NO: 26409

SEQ ID NO: 247215 - DNA, 1047 bp, Klebsiella pneumoniae; identical to SEQ ID NO: 26408

SEQ ID NO: 247216 - DNA, 1416 bp, Klebsiella pneumoniae; identical to SEQ ID NO: 26407

SEQ ID NO: 247217 - DNA, 3990 bp, Klebsiella pneumoniae
atggattacaacatctatacagttggcgatattgaatttgtgtggtccgccctgaacgggattgccctgattttctcacaatacaccggtgtaaaagcatttctaacgacggcagcggtactggctggagccagcctgttttataaaacgtggctttggctgttgaacccgacaaaagcagaagtgccgatattttcatggattcttgggctgattctattttcgatggcaattgttcgtgtggatgtgacgattgaatcagttaagtctggtgaagtgagaaatgtcgatggcattcctatttttattgcggcgatgggaactgtcaccacgaaccttagccagggcttactcaaagactacaaaacggcatttgatccactggcgccgatcgactttgccgcaacgacgcttgatgatgacattactcttggtccgatgattcgtttcgttaaattcttacaatggggtggtgacagccagggctattgttctgcgtttcccgaaccagccagcgggttaggtgcgatgaatgtgtgcgcgacagtacaatcactggcctataactgtctcaagggaacccaaaactcaagcgcaaaaattgctgggaaagaaaccatttttaacgatattttctctgcaaatatcgtggatagcatggaacgcattaatcaggcgatgaaaggttcgctgaagaacgcctctgccaacattgtcggtgtgaatagctcaaagtctgctacttgtgaagaggtctggtcgaccgttaaacaggtaacgagcaccccagaggctcggcagacgattgcattgattgggcaaacaaacggtatccttgctccagatgaggcgggaggtgcagcatcaggagcgagcttcacggatgtaatggcgtcggcgaatggcatgtacggcaaagctattggtgcttatgacgcgacgcttagtttgttcatcatgaatgaactccgtaatggtgccagcaagtacaaaaccccactcgggctggcctcggatatgcagttgtttgaggcatcattaaagcgtacgaataccatggcatctcaggggcagctctggctgcaattgtccggtgcagccatcgcgtttcttgagatgtttgcgtacatggttgccccatttgcattgctcatgcttttggctctcgggggaaatggtgtggccgctgctgcaaaatatctccagcttattcttttcgtaaatatgtggcctattactgcggttatggtgaatgcctacgtgaagaaagtggcgaccgcagatcttgatacatggagcacattgaatagtcagagtaacgcggtgacatggatgggtttgccagggcttgccgaaacatacagctcttatttatcagtagcatcagcactctatgctcttatccctgtattgacgctgttcctgatgacgcaatccattcatccaatgatgaacgcgatgaaaggagtcacaccaccagcgccagtggactccagccacctcacgccgaaagtgtgggatgcgccaaacagcggaaaatcatcgtttggggatgtgaatcgtaccgcgctgacaagcaccggccaaggattcagtggtggcggggccatggactccagtaatttccgactcggtacgtggaatgccggttcaagtatcgcgtcaagccaggggcaaggggcagcatttacctcttcagccatgagcgcagcaagtaacacattccagcaggccttcaaccagatgagtgaagttggccgaacggggcaatcaggccagcaatttacctccaacctgcaaagcttgaaatcatttactgaccaggccggtgcaaacatcgcgaatagcgtaggggcgaagcatggaattaattcgcagcaattagctggcgtggtgtcaaatcttctgctcaatggcagtttgggacttggtggtgaagaaaaacttggaaaaggaggaggaggaggtctcgctcagaaagtaatggatagcctaggaataaaagcgggggggcaagttggatcagggatcacgaaaagtaattctgggaatgaaagtctcttaactgatttgagtaaagctattacgactcaattgactgaaaactcaggactgactgaccaaatgactaaagcggctgctcagataaacagtgatcagtttgcacagaccaatgcattcaaagaagctgcaacaaaaatgaaccagtccacacagacaatggccgaaaacttgtcgacgtcactttcaacgaacgccagcgccaatactggcatgacactcgactcaagacaggctatcaacctggacagattctccgattctatccgtaataaaaactttagcgatgaagatgtgcgtaattttgcacggaaaaatggtcttgatgagaatgcctttatggagaagttcaattcctataatgacacatttaaggccagcactcagttgggttcacaactccaacgtacagatgcgctggtggcaacgacacgtgactttagtgagcaaaaaatagcgattgatactgcccgaggtgaaacggctgagagcaataaacaggatctgcgtgaaacttccagcctgcttaaagggctggttgctgactttggcggtaacgctcaacagatgctgccgattactaatcagcttgaccgaatcactggtgatgcctcgggtattaacacgattgcacaggcgcaggatcgcaccccagaacatgtaaatacgtccagcgtaatgagcgctgatcgtgttgctgacgtggggcaaagtatggatgctcaggcaaaagccgggctggtacaaaaccaacaaaatgctaaccagcatgttggtggacaaactgagtctggtgtaactccgtacaatgtggacaagatcagcaaagaagatattcagggcattcatcaaggtaatgtaaataaatcctatagcgaagagaaccagaatgtgctctcgtcattggagaagaatacccctgttgtgacgaatgaaactgtgggaagagttcagggggctggggtggacgttcagcacgccaaccaaactttcgaccagttacaggctggttcgggcggtaagcatgcgacttcgggcatgggtactatcagcgacaaactgaataatatgtacggagataaccagatacgcggtatatcaggcaacctcccgaattattttggcaggattgcaaatgatcctaccaaaaagccggatgacaaacgtgcggaactggccgcacaagctgtgtttacctatggcgccagtacaatggcaaccggcgctgagaaagaacaactgaaagcggatactcaaaatatcctctccgaactgagtcactataacgttcgctgggggatgaacgatctccagaatatccatgaaggtttcaacatgcataacaaggcttcaggttctcttgactcagttgtgagggcgaatcttggggaaggtggttctggcggcgggctcgttgggcaacgaacccaaaccacgacggatctccttgttggtaataaaattgagtccaatacagaacgtggtgttattggtagtacgcttttatcggggcaggagagtgttgccagaggacttgacgttatcggagctaaacctgtaaacgacatgctctcaggtatgggtatcctgaccaccccttcatctttggcaaacgatgcttcgaatccacaaaatatgccgagctcgctattgggcaaggttggaaatcacctgcaaatgtcagatggtgttagcgaggtgaccagcaggtataaggatatggggggggatgggatcaaggcgtatgagactgcatcacaaaactcagaacgtgcgattcgtcagcaactgaccgatgatccacgttttgggccggataaagcagatgcattcgtgagctttatgaagtcaaacctgaataatacaaatgaaccatatcagtcgagaattgagaaagctaaaagctggctgaatgaaaataagaagtaa

SEQ ID NO: 247218 - DNA, 567 bp, Klebsiella pneumoniae; identical to SEQ ID NO: 26405

SEQ ID NO: 247219 - DNA, 516 bp, Klebsiella pneumoniae; identical to SEQ ID NO: 26404

SEQ ID NO: 247220 - DNA, 750 bp, Klebsiella pneumoniae; identical to SEQ ID NO: 26403

SEQ ID NO: 247221 - DNA, 393 bp, Klebsiella pneumoniae; identical to SEQ ID NO: 26402

SEQ ID NO: 247222 - DNA, 423 bp, Klebsiella pneumoniae; identical to SEQ ID NO: 26401

SEQ ID NO: 247223 - DNA, 612 bp, Klebsiella pneumoniae; identical to SEQ ID NO: 26400

SEQ ID NO: 247224 - DNA, 1260 bp, Klebsiella pneumoniae; identical to SEQ ID NO: 26398

SEQ ID NO: 247225 - DNA, 354 bp, Klebsiella pneumoniae
atgagtccgtgcgccggacacgaagacaatgagctgaatttacatgattttgtggttcgtaatcgccccgcgactttctttgtcagggcctcaggtctcagcatggtagacgccggaataaacgacggcgccatactggttgtggatcggtcactgactgcggagcacggctcaatcgtcgttgcgctggttgacggcgagtttaccgtgaagattttgcagaccttcccgaaactgatgttgatgccctccaaccccgccttcaagccgatacctgttaacccggacactcttgaaatctggggcgttgtcacctttgcgttgaatcagtttcctcatgtacatgcacgttga

SEQ ID NO: 247226 - DNA, 615 bp, Klebsiella pneumoniae; identical to SEQ ID NO: 26396

SEQ ID NO: 247227 - DNA, 3336 bp, Klebsiella pneumoniae
atgggggacctggtcagtaaaaataatatcgatcgccttgaacgatttcattctctgctggcagggcagtattggtctgcgctcgtcgatattccggctgaggcgattgtggccggggacactctcctcattaactcgttgcggtacgtggataacaatctgcataccgtcatccttcgcgctcacccccggcattacggggaatgggtaagcgttgaaatcgtcgctgagaacggttcaaaatcaacgaaagacaagagactgaatgagcatcggtttctgacggccgatttcctcgcgttgtttgaatatcagcccgaccatgaaattatccgtcagtcggagctcaaaggcattcaggatgaggtcgctgacctgcaaatgcgtcttacggaaactctgcaagatccctctgcactccgggaactggctattaaaagggtcgaagacgaagaggccagtaaaaaggggggggcaactgaggacagaatgcttccagccgtcaggaatgcagaagatgttgcagtcaccatggcgctgggtacagtgcagaatgccctttctcaggggatttcagaggctcaggtttctctgatggcgaaagttgcggaacgggaaggcaagattgccggtgccgtagctaacattattacgtcgcgtaccggcgccatcacccgggcgctggagaaaatgcatccgtattatgcggagctggccgctgccaagctggccggaacgcaggagggcattgagcaagccagcaaaattcaggcaggtgttctcacgctggaattattcgtcggcaaaaacgtgacggtagttgatgttgcggaaggcgagccagcagacagcagcatcccgttgacgctgtgtcagaagaaactcgtcgtggatgaggagttttctgcctggagcgatatcgacgaacattttgatttcaggagtctttccgcattcctcaaggcgctaaaagataaccaggggctggtggagcaaattttcccgactgagcgctgcgtacttgtcatggtcactacccgcagatttattgactatggtgatacctgggcgaatgctgaaaacaacgaaaagaacagcatcgtgtttctgatggtccgcaacgggcaaaatatcaaacagatctattccccggtggagagccatcttggggcgtcccggttatttccctctgaagatgagcagcagggccacttccgagggtttgacggtaccaccatcaaatttgaagatgtggcttataccgatcgtctcaaagcccatgacctgatggctctgcattaccgacgtctgcttatcatgctgtttggtcttgaccagcgactggctctctttggtcagttctatccccagcatgaaaaggcgaatttcttgaatctgagcttccaggaacggtacttccattttctgcacgatgaagacggcacagggctgctggcatcaccagactcgcagacgctcgatgaatttattagtgaaaaaaactcctatattcaaccgggctcgcggctgctctgcaactggcgtgagcttatgacccccagaacagcacctggtgccgttaaagaggacagcggctattcagggtactccttcatcgctgaccctgaggataatgtctctgctgcggttgtgtatcgtcagggagatactctggccgttgatgtggcggtgaagcgattcagtacagataagatgtttaactgtaaggtaaacgtctctgcatatagcccgtggcggcgtggagaagctgaacttgcttatttgtgccttgatgcagtgggcccggaggagctgacccggtttatccagcaacgcaaattccggagtaaccaccttttttatattcgcttttttaaggccgcgatcaaattcctggaacaggagcgagaaaacgaactgccgcaccggcaatatctgctggctgcaatgcaggattcggggatgcacctgccggggaatatccaggaactgattcaccagtgtattgcttcatggaagaccggcaaccgtggggtttccctcgctgtcgggatgagtaccgaaaaagggcgccaggcactgctgaatcagctctacaggctcactcagggtgcaagcgaaatggtatcggtcattcaggagcacgtcgctgcgtccggctcgcaacttcttcgggccggggttaactcgtcagggaattacgtcgcatttatcgcgcctaaaccctatgagtgtgacaacagactggaagcccatgcgtgggtccatcgtgttgtctatgcaaccgggaaacgaaacattcgggaaaccggcagatcctgggtatctatgccggagcgttcggcatccgaaattactctttgggaagatgaggagcagtcacgaaaatggtactccatgacgcctgtattcagttcgtggaccgaaaaacagaagctttttgagatgtgcgaaaaaggcgcagggttactgaaaggggctatggggacgccggatgatgaggaatatggcgacctgctagagatgtggggggacgcgtatatcgcgtgcaatgccagcggtgagcatgtaacaaccccggatatgttcctcccggtaggcctgattaagtcacgaaaatcattaaagctgattgctttaggtacatgctcgacggagcactggatgtatgcccgggcaggggatgatgactcaagggagctgctgctggaattgtataccagttggtatgagtacccagataaagcgcgggcgcggctcctgtcgatggcagaaaaaaactccggcctgaggtttgtgttgctcgaaggtaaatcaaggaaactggagcgctttgcggtcaagcggccagaagagattgtcaactggcatgccggtaacttaaaggaaatcccgacaatgctgaatgatcaatgggcatgtcacatggcaatggtcagtcagaatgataaggtctacctgacaccggatttgctcgatgatgatggtctgcctaattttaatggagtcaccaggcaggtgcccggagaaggttatcagccagtcaatgtctatgaatttgaaagtgactattttaacgcggtatacgatgcagacgggaagaaagtggcactttgtcactggtatgatgtgacggataattcatattctgctgaagaactcataggcaatatgccgcataacgcatttaaatttcttcagtatagactggataatatcgagcaggctgaggcatttatcaaatacagaaaccggaattatcagccccgcgaaaatgcagactggcctgagccacctgaaggagttaagcgttacgtcatcagagcccgaagctag

SEQ ID NO: 247228 - DNA, 222 bp, Klebsiella pneumoniae; identical to SEQ ID NO: 26392

SEQ ID NO: 247229 - DNA, 387 bp, Klebsiella pneumoniae; identical to SEQ ID NO: 26391

SEQ ID NO: 247230 - DNA, 306 bp, Klebsiella pneumoniae
atgttcgccagtctgctggtttgtgaatttgcgcaccgcagaggtatgtccgcagctgtgcgaggcgggaacggaacagatgatggtggtattttcaatgagtctggcgggcacggccattactggtgtgaggtaagtgccggtgaaatgattttttatatcgatattgcggccgagcagttcggctacccttcgtttatcatcaaaaatgcaaatgacgtgtcagggtggccgcgatatatccccggcgaccaggttacagtagatgaacacgtcaggattacgttgtctggaggcattagatag

SEQ ID NO: 247231 - DNA, 474 bp, Klebsiella pneumoniae; identical to SEQ ID NO: 26389

SEQ ID NO: 247232 - DNA, 291 bp, Klebsiella pneumoniae; identical to SEQ ID NO: 26388

SEQ ID NO: 247233 - DNA, 270 bp, Klebsiella pneumoniae; identical to SEQ ID NO: 191355

SEQ ID NO: 247234 - DNA, 1074 bp, Klebsiella pneumoniae
atgcgaaagagctatacctatgggattcctttcggactccatcgcgaaaccggacggtttctggacatcacggaagtcagcagaggaagcgcatgcaactgcatctgtcctgggtgtcgtacggatttgatagccagacagggagaggtcaaactttggcactatagccacagtaccgatctcctcggtgattgtgatggcctgatggaggcgattcggggaaaaattattgaaattattcaggaaaaacaacttctaggattcccgcatcttctggccggttacgatggaggcacggtcccacttgatgaagtcagcggcagcggaagcatgttcggcgcaacggcagatctgtttgtgaaggtgaacgatctctgcgtagctgtgtttctggacattgaccgcagtgtggccgggaaactgacgttcgaccatctccatgcctcggagatggtagctgcattgcgcattgatctgccggatatagaatacgaaatcagtcaggttcagcttggtagacgagatggtacctacagtgaatgtatcgagaaaatcatcattgatgcgacggagtcacgcgaatggttgtatcaccccatgatgcaggaactggggaccgagcccctgaaggtatatgagggccgcgagccagcggaagcaggaccacttctacaacgcctttccgactgccccctgaagctgccggacaacttaccccagagcatgaatgtgctgataagaatgcagcaggccaccattgtgtgtttgtgtcggctcaccgtcagagcttcagatatcgcccagaccgacgaattcccgctgtttatgcgttacttccggctgcattgcctcgacaccagtgagcatgtgaattacgagaaattgcttaactggcaggacatgattacaaaatcaaaggaagggcagttactaacggtggaggaaagggattatctccaggaaatcgtccgtattggtctctataaccaccggcttaaaagtgtctgcctgacggcctgcgaagacagtagggtgggagaatctgaaggaccaaacaattactcattgctctga

SEQ ID NO: 247235 - DNA, 507 bp, Klebsiella pneumoniae; identical to SEQ ID NO: 26437

SEQ ID NO: 247236 - DNA, 261 bp, Klebsiella pneumoniae; identical to SEQ ID NO: 26438

SEQ ID NO: 247237 - DNA, 204 bp, Klebsiella pneumoniae; identical to SEQ ID NO: 26440

SEQ ID NO: 247238 - DNA, 1206 bp, Klebsiella pneumoniae; identical to SEQ ID NO: 26441

SEQ ID NO: 247239 - DNA, 492 bp, Klebsiella pneumoniae; identical to SEQ ID NO: 26442

SEQ ID NO: 247240 - DNA, 228 bp, Klebsiella pneumoniae; identical to SEQ ID NO: 26443

SEQ ID NO: 247241 - DNA, 807 bp, Klebsiella pneumoniae; identical to SEQ ID NO: 26444

SEQ ID NO: 247242 - DNA, 408 bp, Klebsiella pneumoniae; identical to SEQ ID NO: 26445

SEQ ID NO: 247243 - DNA, 450 bp, Klebsiella pneumoniae; identical to SEQ ID NO: 26446

SEQ ID NO: 247244 - DNA, 405 bp, Klebsiella pneumoniae; identical to SEQ ID NO: 26448

SEQ ID NO: 247245 - DNA, 669 bp, Klebsiella pneumoniae; identical to SEQ ID NO: 26450

SEQ ID NO: 247246 - DNA, 456 bp, Klebsiella pneumoniae; identical to SEQ ID NO: 26451

SEQ ID NO: 247247 - DNA, 348 bp, Klebsiella pneumoniae; identical to SEQ ID NO: 26452

SEQ ID NO: 247248 - DNA, 1221 bp, Klebsiella pneumoniae; identical to SEQ ID NO: 26453

SEQ ID NO: 247249 - DNA, 300 bp, Klebsiella pneumoniae; identical to SEQ ID NO: 26454

SEQ ID NO: 247250 - DNA, 1296 bp, Klebsiella pneumoniae; identical to SEQ ID NO: 26455

SEQ ID NO: 247251 - DNA, 168 bp, Klebsiella pneumoniae; identical to SEQ ID NO: 26456

SEQ ID NO: 247252 - DNA, 1428 bp, Klebsiella pneumoniae; identical to SEQ ID NO: 26457

SEQ ID NO: 247253 - DNA, 690 bp, Klebsiella pneumoniae
atgtgtatctaccttaacttaatgattttgataaaaatcattaggggattcatcagtgttctgcttcagtttcaaaatgctatgaaagaaaaaacattagattcagtgagtttgctaataagcaaaataaggaggcttgattggcaaaggttaaaagagttttttggtcctttggcatttaaccacccagattgcattgatgccatcatgactgatggaattagcactgatgcctcatttactattttaaatgcattaatttctcgcacggaaatgatgtcctctggagagtatgcaattgagcatgatcgttctaaaaatctgctaacttacaatgaacgccttaactttttgatcaattgtgataaggaaggagagtttaaacattccgagatagcaactatctcattccctctaaaccttaaaaaagtctatcaaattgattcgaaagaaagcccaagcgtgcaattgtgtgatgttcttataggtgcatgtattgaatcagtttatcaattaatggactctaaggtgctcaatcaaaattccgttctttcactttaccaagatagccagttaatacatttcatacctgatatagattttgaaggacagaaaaaatttaggaaaggcagtcaaagtgaggagtatcttacgtttattcaaaatgaaatctactctagtaaactttaa

SEQ ID NO: 247254 - DNA, 780 bp, Klebsiella pneumoniae; identical to SEQ ID NO: 26460

SEQ ID NO: 247255 - DNA, 924 bp, Klebsiella pneumoniae; identical to SEQ ID NO: 26459

SEQ ID NO: 247256 - DNA, 288 bp, Klebsiella pneumoniae
  misc_feature (272)..(281): n is a, c, g, or t
atgaaacttttgataaagtatgcagcagttgtttcttcaattacaatcagtcaagcctatgcaaatgagttttattatggtgtagcagagcatctcttcaggagggattatacttatagcgaacaggcaatattgaagtcaaaagaaatatgtgcaagtgtaatgcgaattgatgcaccttgggaagatgttgaaaaaaaaaaggggatttataacattccaaaaaaatgggacgatgtaattaataagatggtatctgtgggtattaaacnnnnnnnnnncttttaa

SEQ ID NO: 247257 - DNA, 177 bp, Klebsiella pneumoniae; identical to SEQ ID NO: 191358

SEQ ID NO: 247258 - DNA, 435 bp, Klebsiella pneumoniae; identical to SEQ ID NO: 10324

SEQ ID NO: 247259 - DNA, 252 bp, Klebsiella pneumoniae
atggctcaagaaatcgaactcaagtttatcgtcgctcaggatggggtagagacgctgcgcgagcagctcaatgcgctcgaggcgaaacatacgcccgcgggccagttgctgaacatttattacgaaaccgccgataactggctgcgtcgtcacgatatggggctgcgcatccgcggcgatcaggggcgttacgagatgacgctgaaaatcgccggtcgggtggtccggcctgcaccagcgcccggaatataa

SEQ ID NO: 247260 - DNA, 228 bp, Klebsiella pneumoniae
atggccgtaacaaaaatgatatgcgtcagttccactacgccagcctggtttactccgggcgccgtatacgactcagaaccccgcggtaccgatatctgcatttgtggtgacaacctcgtttcagacctcaacaaagaggactggtacgaaatgagtcagcgcgcagatgggctgtggttcttaatcggttttcagcaggcaattttatttcggggagccaaccaatga

SEQ ID NO: 247261 - DNA, 138 bp, Klebsiella pneumoniae
atgatgttgttggatatccagattgttaaagagcgaagcgtccactgggcgcttttttatttcagcaaatcatccacctcttcatatgccggtggcggctacttcgtgggcgtcctgcctgttcgctgtttcttttag

SEQ ID NO: 247262 - DNA, 546 bp, Klebsiella pneumoniae
atgaccgctatttcagatatgatcaggcctttgaaagcacacgcttcccataccagaccgtgtaatttactgctcatggctaccctctacttccctgaattttcgttgaaactgatcgagtgggctaaaacactcgtgcggatagccttccctgaggtaaatgacacgattcgtctcacgttcccaacgtataactctgacgggcttgccatagtggtctctgaactttcggttaacttcgcgcataacgcttttaccctccggttaaagacccccacaattgccgtggcccggctgtggttacatgaaacccatttaccgcataccatgcgttcataccgaaacagcgcagcacccgtcactggacgcatacgtagttgcggtaacctgagatttacgattaaattgctcatgcggattatttctccatacacgttgatttatctgccacgacgcccggagctgcacactcgcgggcgtcactcttttctggctgacaaaagacacggaaaagtaacgttaaatgctcctgccatttcgccatga

SEQ ID NO: 247263 - DNA, 411 bp, Klebsiella pneumoniae
atgcgtggttattgcaattcccacttttgcgcagccattaatagctgggacaaactcaacgccatcaataatgacccgcataattcaaatcaaccctttgttaagagacctgagcacctttcggtaattgcgaccagcggcctcttcgatggcttttttgatagcttcgatttgttcaagacaaggtgttgtatcaagagaaagcttgataaccagttcttttccctcacaaacgggagagctcagattaacagaaccatcaattgcaattcgatctgggaagaactcagggaagccaataaccttgccacggcttccaaatgcatcatattcggcgaatccggctccactatggagttcataaccggtctctttcacaataatgagaagcgatttgttggcttcttttag

SEQ ID NO: 247264 - DNA, 207 bp, Klebsiella pneumoniae
ttgggaagaaatgacctgcttattcgcaccttccttaagaaagataaaattacagatcgggaaatgaaaattatccgcatgaccgcccagggcatgcagccgaaatcgatcgccagaattgaaaattgtagcgtgaagacagtgtatacccatcggcgtaatgctgaggccaaactgtattccaaaatatataagttagttcagtaa

SEQ ID NO: 247265 - DNA, 213 bp, Klebsiella pneumoniae
atgaaagttaatgcactgatggcgctggcgatcctcgcgctgctctggccggtagccgcgctcagggcagcggtgaccaagaccacctggtcggatgcgccggcgcgcgagtttgtgtttgtggaaaacaactccgacgacaactttttcgtcacccccggcggggcgctggatccgcgtatgaccggcgctaaccgctggaccggcgcttaa

SEQ ID NO: 247266 - DNA, 372 bp, Klebsiella pneumoniae
gtggctcgtccaaagagtgaagataaaaagcaagcgttactggaagctgccaccgcggctttcgcccagtccggcatagccgcctcgacgtcggccatcgcccgcagcgccggtgtggccgagggaacgctgtttcgctatttcgccactaaggatgagttgctcaacgagctgtacctcgcgattaagctgcgcctggtgcgcacaatgatcgccgggctggatccggacgagaagcgcccgaaagagaacgcgcgcaatatctggaacagctatatcgactggggcgtgcgcaacccgatggagagcacaaagcgatccgccggatggcgctcagcgagcgcatcaccgacgaaacccgccgccaggtaa

SEQ ID NO: 247267 - DNA, 327 bp, Klebsiella pneumoniae
atggaagagaaaaaagcatacgggctggtcatggtgtttgtcggggtgtttgtccttatcctggtcagcataatgtcgtacagcctgtggcgggacaggcaggttaacgcatttatgaccaccaaccgggcctgggggatccagtgcgacactgtttctcaggccgcgtgggtggtcagggacggggagcgggtggaccttcagataaatcatctgcctctgtactgcagcggttaccgctttgaagcccgtgatgatgcaggaaagatacagcgccagctcgataaatacagtgtctatcagcatctgtcacgccagtcgcaataa

SEQ ID NO: 247268 - DNA, 726 bp, Klebsiella pneumoniae; identical to SEQ ID NO: 61250

SEQ ID NO: 247269 - DNA, 372 bp, Klebsiella pneumoniae
atgatatatgactttcaggaaattacgctgcacgttaccgagcctctggactggagctacgcgaatccccgctgctggatacagtttcagaacggtcgtccatcatcgcgaatgcttacgccgcagcgggtagatgatttcacgctcacggtgccgtacaacgacgacctgcatcccgacgactggattatggacgacccagatattgatctgccgaagttattgttctgcgacagtgaaaagggtgtgcggcatgggatagtccaggaggttgccccatcaggtgacagcagctgtcagattactgcacctgaatataaagaaatttactacctgtacgacgacgctacataccccggcgacgctgcttaa

SEQ ID NO: 247270 - DNA, 423 bp, Klebsiella pneumoniae; identical to SEQ ID NO: 10327

SEQ ID NO: 247271 - DNA, 486 bp, Klebsiella pneumoniae; identical to SEQ ID NO: 10073

SEQ ID NO: 247272 - DNA, 174 bp, Klebsiella pneumoniae; identical to SEQ ID NO: 235518

SEQ ID NO: 247273 - DNA, 552 bp, Klebsiella pneumoniae
  misc_feature (505)..(514): n is a, c, g, or t
atgtttcgtcttgatataaatggtttgcgcttcattgctgttgcgatggtcgtactttttcatttcaaaataggatatttttatggcggctacgcaggggtagatgttttttttgtcatatccggttttttgatgagtgaaatttgcaagaataaagttggaacaaaagaatgggttattgacttctataaaaaaagatttaaaaggatttatccagcgcttgcaatatgcgttttattttcttttctcttagccatcacatcgactcctccgtcgatgttaaaagggttattctatcaagttatatctgcgttaacatttacatcaaacctatattatttgaaagcaacatctggttattttactgatgctgcggatagttttgtttttttacacacatggtcattgtcagtcgagtggcaattttacttagtttttccactcttgcttttcttggcaagcaaagtgacgagaaaatttggtcaagttatattttatttaattnnnnnnnnnngtattgatatctttttccatttgtattctacttactaa

SEQ ID NO: 247274 - DNA, 372 bp, Klebsiella pneumoniae
atgatttacgacttccaggaaattacgctgcacgtcacggagccactggactggagctacgcgaatcctcgctgctggatacagtttcaggacggtcgaccatcatcgcgaatgctcacgccgcaacgggtagatgatttcacgctgacggtgccgtacaacgacgacctgcatccggatgactggataatggatgacccagatattgatccgccgaagttattgttctgcgacagtgaaaagggtgcgcggcatgggatagtccaggaggttgccccatcgggtgacagcaactgtcagattactgcacctgaatataaagaaattttctaccagtatgacgacgccacataccccggcgacgtcgcttaa

SEQ ID NO: 247275 - DNA, 183 bp, Klebsiella pneumoniae
atgatccgtcacacccctccggaagtgatttttcaccgtatctccgccagcgcgcgccgcccaacgctgctggcgccgctgtggtgtgagaaccgctggaccgggatggttgaactggataaatacctcaatgaacacggcgtgcaggggtctgctctcggtcgtcgctggatctctccatag

SEQ ID NO: 247276 - DNA, 906 bp, Klebsiella pneumoniae
atgttactcaccgccagaacaccttcccgatacgccagcgccctggccgcgctttctgtctttatggcggccttgctgctgccgttatgttttaccggcggcgtcatgaccacccccgcgatacagcagtcgctgggcggctctcccgcagcgctgtcgtggctgaccaatggctttatgctgactttcggcagctttttgctggccgcaggggtgacggcggatgccatcgacagaaaacgtatttttatcgccggcgccgcgctgttttgcctgagcagcctgctgttttgtctgacgcacaatctcttcctgtcaggcgtgttgagggcgctgcagggcctggccgcggcgatgattttagccagcggcagtgcggcgctggcccagctgtatgatggcgcccagcggaccagggcattcagcatcctgggcacggtgttcggcattggcctggcgttcggtccgctgctgatcggcttcatgatcgacgcggtgggttggcgcggcgtatacgccctgtttgcgctgctctcggcaggggttctgcttataggcctggtatctctgcctgcgacagaaaaaagcgagccgcggacacccgacaacctgggcttaaccctgtttacgctggccctgatgctgtttactgcatcgcttatggtcattccggcccgcggttttttatccctgaccacgctggccttgctcatcgcgtcggggggggctgttcgtggcgtttgtcgtacgctgccggagggtgaacaatccggtgctggaactctccctgctgcgtcatccgcgttttgtcggcgtactgttgttgcctgtcgccacctgctgttgctacgtggtcctgctgattattgttccactgcattttatgggcggagaggggatgagtga

SEQ ID NO: 247277 - DNA, 657 bp, Klebsiella pneumoniae
atgaaagaacgtggaatgatattcaacggggagatggtgcgggccattctcgacggccggaagacgcagacccggcggattgttaaagggactgacggcgccgtgaagttctgcaaggaatgggacatcaacggagaagaaattttcgttgttctaggcgaaaaagaccacaccggaatgaatcctgttttgggtgctatctcatgcccgtttggcgcagtcggcgaccgcatctgggtacgcgaaacatttcaggggccgcttgttcatgaggagttattcgaagaatacagcgcttatcctgaaaagttcgaaacaccggaatactgcgaatatgccgccgatggtggagttaggcctgaatactgtgaccttgacgataacctccgtcatggttggcgaccatctatccacatgccacgctgggctagtcgtattctgctggaaatcaccaatgtgcgggttgagcggttgaagaatattagtgatcgcgatgcgatatgcgaagggtgcagtaccgccgacatgaagagtggcgactgtgtagctgatgtgttcgcgcgcctgtgggcatcaatctacggttcagatagttggaatgccaacccctgggtttgggttatcgagttcaagcgcgttgaaggcggtgcagcatga

SEQ ID NO: 247278 - DNA, 327 bp, Klebsiella pneumoniae
atgactgatatcaccgaactggcgcagagcctgaaagcggcagcagtgcgcgttattaaaaattacgacagtgagtggtttgaggcaggccatcagatttgtaccgttcataagtcaaagataaatcttattagtcttgctaaccctgtcaacgttctcgcgctggtagaggcgctggaagccaaggataagcagattgctgattatgcgggacgcctgaatagactggaaaagcgctgcgaccacaaaggcagcgtgtattgggatgcatctggagttaagcgctgcgcgcgatgtgggtttggcatcaaggtggaggctgagtga

SEQ ID NO: 247279 - DNA, 204 bp, Klebsiella pneumoniae
atgaatgatattttatctatgactgaagaatatatgattactaataacattactcgttatcgtttatgcaagcttacaggaatgaatacccctgcattgtataatgtattcaatcgcaaaaccacaccagaacttaaaactattcagcgttaccttgatgctctgaatctcactataaccctgaaggaaaaagaacaatgctag

SEQ ID NO: 247280 - DNA, 552 bp, Klebsiella pneumoniae
atgcgaatcttaaatagtatggctcctgtattgctctgtattgctctcagtggctgcgcagaggtagggggaatggttttccctccattaactgctacaagcgctcagaatgcatcacaggctgctctgcttcgatgtgcgcgtgatgatgtggctgcactggatgtgaacagccatactctggcctgtgtcccagccgtggctgaaagtgaactatccagacgtgatgagcaggaagctaaagaactagatgaagcaaaagcgaaagcagatgcagaggccaaagcagctaaagctaagagtgatgcacaatggagagctgatgcacctaagcgacttgcagcgtctaacaagtgcaagccattcatttatgatgtgagaaataaatataactttggtgctgtagctcgcgtgaatggcacgcagatgtataactctgtgtattcctgtcagggatggttcagagacaaagttaacaatgctcctatccatttcgtttttctgcaagctaatgtaaataatagtgcatatgaaatagacaccatctattga

SEQ ID NO: 247281 - DNA, 372 bp, Klebsiella pneumoniae
atgaaaaagtatatattcgcccttagcttattggcccctcttgcagcacaggctaacatcatgagtaaaaattatatttacgattgcgtgtctggcgacaaggtgactacagcagggttaatgattgaacctttgaacggggtgcaaatggttgtccctgcatttctgcctgacggaattcacatggggatgtatccattccacagctacgcagagctggagaacggggtaatgagcactgtcagagattcagagattggcgttaaggtaaacaaaaattctgctcaggtgatttatgagaacaatgcaacaaccatcacagctcaatgcacactgaacgaggaatacaccgctaatgcgaatcttaaatag

SEQ ID NO: 247282 - DNA, 354 bp, Klebsiella pneumoniae
atgctcagcactaacgctttagcctatgaaacgttccagtgcggtgattatgccattgaggtagatattaccaattcatttatggtgaatggtagttatcagaatgcaggtacagcttacctgttcaaaaatggcaatcctattgataacgtgaagctagagaatgcaatgacttctgttcagtctcctgacgggcctacattacagaatatcaggcttaaagattttacctttattattaacaggggcttcattggtaattctggagagtttagtgaaggagcgtttatcctcactagctataacactggcaatattaattgctccaacaaatcaggacatacagagctatga

SEQ ID NO: 247283 - DNA, 543 bp, Klebsiella pneumoniae
atgaaacacttagctatgttggctcttttggtggcttcagcgtctgctgtggctggtaactgtgattcctactacggaacggcagcagatggttcacagtgcggcctacgctcccatgatagccgtgtacagccgggaacagtgcagcaagcaccacagagcacccatacaaactatgtagagtgcttacctactgatgcccctataggcaatatcacagagggtaaatcaatttatatttctgtggacactgacccacaaaataaatcgatggatgttaaagatattgatggctatacacatcattatttctatgctggctatcaggtagctgatgaaggggttatgggtaaactacacattcagttttatagcactcttcaggaaagtgatgatgctaataatgtgcacaaccaactgatgctaaattacttagtaacaggcagtgttacttcacctaattttaggcttcgggttgataaagttcagaatgggaaacagttagtagcctcacgctattacatttgtaaatttggggactaa

SEQ ID NO: 247284 - DNA, 360 bp, Klebsiella pneumoniae
atgaaacgcaaaattataattatgggattatccctgctatcgcctttggctgcacaggctaacgaatggattgctatttgtggtggtgtgaagcttgatatcatccagaccgctaagacagggttttacattaagaaggatgataagccttacgtgatagctggcggcgttactgctaacaacatggacacagacgtgtttgctcccctcgtaaggactgaaggtgaaatggtgctggcggatgtgacgcagagctttgaaatagagcaatacggaatagataacaaagctcattttcatttaatcgatggtagaggtaatcacccctgctctgttcaggcttttaaggcaggggagtaa

SEQ ID NO: 247285 - DNA, 432 bp, Klebsiella pneumoniae
atgaaacttaaattaattgcagcattagctctgctggcacccttatctgccattgcaggaaatagcaccatctcagatatcacggttttgaattgtggggaatatactgcacgcatctccactcaaactacctttaccaccagcaaggagccgcaaatatttaccaagctcacccttgaaaacagtcaagctgagcaggtaatgaatattgaaacctacgatgatttaatagacctcatccagcttaatgaccaactcagcacttcgatgtatggcaccatgcagaacgggaacaaaaacggcaataaagatttatataatatcgtctggacactagccagcgacggtgacgtgaaaggctctattaaaattataggttcctctcctaagttgtatcaatgcaccggccaatatattaactcaggactataa

SEQ ID NO: 247286 - DNA, 195 bp, Klebsiella pneumoniae
atggctaagtctgaagtggtagtgcatcacgtgcatttccagcttaacggcgttactggctgggttgtggtagctcctaagctgccaatgtgggtgttctatatgggtgaacgtatcgcctgtacggcaatgcagggagctttaaagaagcacgtgcatagcgtgatggttcagcactcgctggtaagtagctag

SEQ ID NO: 247287 - DNA, 999 bp, Klebsiella pneumoniae
atggctaaaccaaccgtggactataacaaagtgatgcaagctgcatttaagaagtatggtgtggatatgcagaaaatcaccagcaaggacaaagctgtacgtgatgctgaaatgctcaaaatggctaagggttggggtacagattggaaaaccgcaaacctgtgcaactggggcaaagaaaatggtgcttcattctttccacagggtgttaatgatgcaatgaaagcagcaggattcaccaatacacaggtaagccctaagccagttaacaccactccggctaatggtggcaatactaagcagcagtttttagacatgctggaaggtaagaagccatcagaaacgcatacaatttcacattcagaatatctgtttattggcatagctaaagaaaccttgctgagcgttggcaagctggaggatgcttatgcagaagtgaataaaatcatccgggaagaaactatcagtcaactggaagaactgaagaaaagaattgagcaggaagcactagcacgcgctgaagctgagatgtctgcactcaccggaaacaaacctgaccgggaatttttcttagacattaagctgtacgtaggcggggatgaatacacgcaagatggttggtattcactgaagccagcagataaaaaccgcttaattgatatgggtgaaaaatatcctcagtggacagatttacagaaattgattgcctcactggataaggatgcaaaggttaaaactgaagccaccaatccaatagaaccggatgatgaatttaaaatccgcatgtatgacgctattaaggccaatcctcccaccatcacggcagatgaagagaagcggctagaggcaatggctaagtctggtatggctgaagcaaaagaaattttagacgtgctatacaaaggccgtgaagcagcagcagaaaaagctgctgaagctgaggccaaagaacaacctacagatggtgctgtaagcccctcagagacttcagcagcataa

SEQ ID NO: 247288 - DNA, 504 bp, Klebsiella pneumoniae
atgcttactgagattgaattaaattccctgaaaaataaatttaattatgatggcaatactggattgctgctgtggaaaggtagtaataaaatagctggaacaatagctaaaactggatatgtgaaagttagctacaagactgaagagggcaaatataaaacctattcagctcacaggctcatctaccagatgcataatggattgattgatgatagccagcagattgaccatatcaaccgggtgaggcatgacaatagaattgagaacttacgactagctaccccttcacaaaactcttccaatgctatagctcaaaggggtgtaacgggtgtgaaaggtgttcagcctgctaagggtggtaaatttaaggtggctatagagcatgaagggaaacatattcattgtggcatgtatccatcacaagcccttgctgaaaaggtggctaagcttgtcaggcgtgaacttaaaggtgagtttgcttgctcagaggtaacgggtgaatag

SEQ ID NO: 247289 - DNA, 783 bp, Klebsiella pneumoniae; identical to SEQ ID NO: 199856

SEQ ID NO: 247290 - DNA, 525 bp, Klebsiella pneumoniae; identical to SEQ ID NO: 206965

SEQ ID NO: 247291 - DNA, 249 bp, Klebsiella pneumoniae; identical to SEQ ID NO: 199851

SEQ ID NO: 247292 - DNA, 3975 bp, Klebsiella pneumoniae
atgaccttacaagaattctatgcggctcgcttcggtagcgatccgtattcattgcttgaagcagcgcgggatgagctgtcagagctggccacaatggctggcattaactggacagcatgcgctgataacattcagttgaacccgcgcggcggggaagaacgttattcaaaatataacggtggcgcccccgaggctctggaaaagagcctcaaagggcgtgtggaaatctactcccgcaaggaacaacacaaaagcggcatcagctacccattcgtcaactttgtccagaaagggcatgacgaaggttcctggagcggcttctccttcctgttcgccgaataccgccgtgaacaacaaagaaatcatgcgaccgtggtcgcacaacctgctgaagaactggcgcgtattgaacgccaggctgaagcccgcaagcgccgcgccgaacaacaacggataaatgaacttaaaaacaatcagttagagcaagaacggttgctcggatggttggcgttccacagtgcatgggaacatgcgccagctgaggacgggtcgtggccttacgcagtgaaaaaaggcattcgtgacgtattcagcgcttgcgatattcgtcgcgtgaccagtcacgacaacgcaaaatggagccgtggaccgactacatacatggcgattccgctggcccacctggacggacgcaaagacggacaaattgtcggctggcagcgtatcgaccagcgcggcggtaaattccagaccagcgcgatcaccagcggtgatttcgtcggggcgtgctttgttatcggcaacctgaacggcgcgcaaaatattgcagtggtggaaggtttcgccaccggcgcgtccgtatggctggctacccgtaaggacccgaaaaaaagctttgatgctgtcgtggtcgcagtggccgcaaacaacatgacccatgttgttgagcagctggtgaatatgtacccggcagcaaaaattacctgcgccctggataacgaccgcaaatcatcggctgaaggtaaaggcaacacaggcctgcgcaccggatacgacatcatggagaagttttccggcgtcaaatgtgtttacccaacttttgaggatgaccctgagcaggaatgcagcgattttaacgacctgcacagcttgagagggctgaaggaagtcgctcgccagttaacgagaaataatctgagccgtgcaaccgacctgttgtcgattacgctgaataaactgcgtactctcccgcggctgaacagacgtacttttgccaaagagctgcttcgcgccgtcgatattggcatgctgacatgcccggtaccaaacagcccgaaagaacttatgcgcctgttcagcagcacgctgcgagatatggggatcgcagaaatttataacggtaccgttaaagatcacattacgcgccggttgaatcgcaaatgccgtgccgcgcaaacatcacgttcgttcagtgaacgcatcaccaacccgaaccttcgcccgtcacacatcacttacaaacggtttgaaacctccaggatgactgatgaggttatgacatacgccgcacagctgcagggcatcgttattgtccgcgccgggatgggctctggtaaatcgacaggtctcctgcgtccactgatgctgcagtccacgcgtggcgtttccgtcgcgcaccgcgtatcccttataggcggcctgcatgaaatgatgaccgaagggaaaggcgctaaagccgacattctgcattatcaggatcccggctatcaggaaatggcgccatatgccaacaagctgactatttgcatcaactccatacttaaaggctgctggcaaccgctgatgcgccagcatgacttcttcggcttcgatgaagcaacacagggcctgcgtgccattctggccgggcgtgcgatggaaaacccggtaggcgtattcaacacgcttatcgacgcgctagcgcgtactgaagagcatgccattatggtggatgccgacgccaacgatctgcttgtcgaccttgctgaactggcgatgaagcgacgcgaggagctgggcctacctgcctggctgcaaattcacgtgattgaactcccggtcgacgttcgcaaccgcgaaaccaacaagcctatccgcgtattttataccgagaaaaatcggatcatgaccgaggtcatcgctgcagtgcaacgcggcgaacgaatcatgctggccaccgacagttcgacgttcgccgaagacgttaccatgcagctgagactccatttccctgacaaaaagtttctctgcgttaaccagaaaaacaaacaggagaaggaagtcgacgatttcaccaaccagcctaaagtgatggtgaaaaaatatgacggcctcatctacagcccgtcgatatcttcaggtgtatcgattgaggagaaacacttccaccgccatttcggcatgttctgcggcgaagtggtccccagcgacgccatccagatgctgcgccgcgaccgtacagctcaggaatacatcatcggtttcgacaagcttcgcggtaaacgtgaaaccgatccggaaaaaatcaaacgcgcctacgcgcaggccttgctcgaaacggctggccactccgggctgctgacagacgttgtctttgacggtgaccgaatttcactcggtgtggctaactcttcattcatgcagctcaaaattaaagccgccgcgctcgaggcgtcggccagaaatgattatgccagcaacatgatttgcatcatgcatgatgatggctatcaggtcgcgcctatggctaccgacgcgcttgcaaacagcatcggtaaggatttacgtaaagaagcccgtgagctggtctttgagcagcttatggaacgccacctgagtgtcgatacccctgaccaaggcgaacacgatgagttgataaaaaaacgcaccctgtctctggatgagcaggcccagctggtccgctgggacatcgaaaaggagctgcagctggatgtcgacgaggaggcgttaaaattctatttcgacggcggcctgaaaaaagtgcgtctgtttgaaaccatgcagctggatgagataaccgcgcgtcgccttgaccgcgaggaagcgttgatccactttacctacgcttatcgcgtcgccggtcgctggcagcaatttgtcacaacagctatgacacgagaacaggccgacgaggagttccacgctaaattcccggccataaccgattaccgcgtcaaatctacaccagcggttgaaataggcatgcgtggtttttacactctcaaatcagcaacgctgcgacagtacttccgcgactgtggtattgatccagaaacactgaccggtgaggccgacatggacgccctcaaacgcgccagggataacctgctaaccccggaacggcgcgatctgctgaacaacgttttgcgcataggtggcttcaacacagagaagggcaaaaagaaagcccctgaagaactatgcaaaggcatcctggagtctatggggttatccagtaagaccagacgcgccagagatggtgatgctcgacctacaatgcgttctatcgactcacagtcggtcgagttcctcatgaatattgtggagaagcgccgcgaagcagggttatcaattcacgcccgcaaggtcgaaaaaaccaccatcgaagtggatcgcgatctggatctaaatatagatatacatggtaaccctcgatccaaaacaagccacattccggacaccccgcaatcagtaattattcaggcactggaggctatcccggtgacggtgccggaagcgtgggcggagaacgcgttgccagcaaccgaaatggaggcggtacgcctgtggccagtggccagcatcgcgagaacgttcgcctcgctgtacatgaccgaatttatggacctgctatcagtacgcgagataaggctgctgaaagcttttctgagccagcggcaagccgtggcgatataa

SEQ ID NO: 247293 - DNA, 477 bp, Klebsiella pneumoniae; identical to SEQ ID NO: 206981

SEQ ID NO: 247294 - DNA, 300 bp, Klebsiella pneumoniae; identical to SEQ ID NO: 180587

SEQ ID NO: 247295 - DNA, 1077 bp, Klebsiella pneumoniae; identical to SEQ ID NO: 199874

SEQ ID NO: 247296 - DNA, 1287 bp, Klebsiella pneumoniae
atgccacatattgaagaattgcgtcgtcagcgtgcgggtatcaacgaacaggttcaggccctggcaaccattgacgccagcggcggcacgctgactgcggagcagatgacggagtttgcgaacctgcagcagcagttcactgatatcagcgccaaaattgaacgactggaagccgccgaacgtgctgcggcgctggtcgcaaaacccgtgaaagcgactcagcaggcccccggcattattgttaagcaggagcctaaacagtacaccggtgctggcatgacccgactggttatgtctgtcgccgcaggcgcagggaatctgcaggacgcggcaaaattcgcttcagaagagctgaatgaccagtccgtatcgatggccatttccaccgcagcggcgtccggtggtgtgcttattccgcagaacctccacagtgaggtgatcgagctactgagcgaccgaaccatcgtccgcaagctgggtgcccgtcccgttccgctgcctaacggtaatatgacgctaccacgcgtggccggtggagcaacggcaagctacacaggagaaaacaaagacgccaagacatcagaaacacgctttgatgatgtaaaacttacggcgaaaactctgattgcgatggtgcctatttccaatgcactgattggccgcgccggattcaacgtcgagcagctggtcctgcaggatattctgaccgccatctcagtgcgtgaggataaagcctttatgcgcgatgacggtaccggcgatacaccgattggtatgaaggcgcgcgcgacgcagtggaaccgcctgctgccgtgggaagctgatgcagcgatcaacctgaacacagttgacgagtacctggacaagatcattttgatggcgatggacggcaacagcaatatgatcagcagcggctggggcatgtcgaaccgtacctatatgaagttgtttgggctgcgtgacggcaacggcaacaaagtctatccggaaatggctcagggattacttaaaggatatccggttcagcgtaccagcgcgatccctgcgaatctggggaccgggggtaaggagactgagatttactttgctgacttcaatgatgtggttatcgctgaagacggcaatatgaaagtcgacttctcgaaggaagcctcttacatcgatgccgatggcaccctggtatctgcgttttcccgtaaccagtcgctaatccgcgttgttactgagcatgatattggcttccgtcatccggaaggcctggtgctgggtaccggcgtcctgttctaa

SEQ ID NO: 247297 - DNA, 261 bp, Klebsiella pneumoniae; identical to SEQ ID NO: 241657

SEQ ID NO: 247298 - DNA, 618 bp, Klebsiella pneumoniae
gtgaagaaaccagcgcctgtaaaggtgaaaacgtacaaaccgaagaagtgcgccagctgtggtgaaaccttcactccggcccgcaacctgcaaaaggtttgtggcccgctctgtgctatagcccacaacagggcgctgaaacaaaaaaaagcggaggcggaacagaaggacaagctgaagatgcgcaaaaaggcgctgcttacccgtggcgactacatcaaaaaagcccagtcagcctttaatgcctttatccgtgaacgcgacgaggggaaaccatgcccatcatgcgggacttatcacccacctatgatctttggcggccagtgggattgcggtcatttcatgggggtaggcgctcgtcctgaattgcgctttgaagagaagaatgcgtaccggcagtgcaaagcctgtaatggtggatcgggtcggtttgctgcaaagaatgccactgtacatgcccgctacagggaaacgctgatcgagtggtatggattgccgctggtggaatggctggaaggcccacacgaagcgaagcattactcaaaagaagatttagaaaacatagcggctaaataccgccgtaaaacccgcgaactgaaaaagcagagggcagcatga

SEQ ID NO: 247299 - DNA, 774 bp, Klebsiella pneumoniae
atgactacaacagtatacgaccgtgttaatcgcctgatcgccaccgactctcgttggtctaggaagctcgacgaatttggttatatcggacatatcgcatatgtcgatgatactggattcggtaaaatttcaactcgtgacgatcatgtgttgacattagctggaaacggtctgttgattcagcactggaaagagtggtggacaggtgacctatcgttaccaagacccccaatattgattaatggtgaagaggcgatcagccttcacatcgtgaaaatgtcagataattcaattatttttgacatcggcgagaagctagcagcacaaaatgttgatgatgaaggcaataaagtcattaacgctgtatttgctggatcgggtgcgatttacgccggtggtgtatggttaaaaacaggttgtgcgcgaacggcgattgaagaagccaagtccagggacatatgtacaggcggcgatgtcagatatgtggactttagtagcggacaacaaaacatcgaaagtgaaaagcatcttatttctgacgttaatgatgctcttttgcaaaaggggatgatcatggatacaaacaacccattgagccaaccagtaccaattacagagcaagaagtctctcatattcgacagctgattactaatggtgggatcactccgtgcgcgccgactggcgggagagctgtagtctgggatagcagagctatagcacgtctagatgccgctatagatagcatcaggaacgacgaagccaagaagaagtag

SEQ ID NO: 247300 - DNA, 237 bp, Klebsiella pneumoniae
atggaaagcgattgggaaaatgagcggccagcattcatagctggcgaggtcggtagagccgcaatctggctaatactgaaaggcgaagaggtctgcagagctgcaatagcggagtatttggagaagaagcgccgtgaagtgggcaacacaatccacaaaggcgtgttgcgagatgcagctaagcttgcgagggttggtaaatacttaataaaaaaccagcattatgctggtttttag

SEQ ID NO: 247301 - DNA, 12705 bp, Klebsiella pneumoniae
atggcaaataacataattaaagggcgcaagggtggcggctcaaagcagcgtaaaccgacggaacagccggatgatttacagtccgttgcgaaagccaaaattctgctcgcattaggtgagggtgaatttgcaggtggtttaaccggtaaagatatttatcttgatggcaccccgcttgaaaatgctgatggttcgcaaaacttcagtggcgtgtcctgggaatttcgacccggcacgcaggctcagacttatattcagggtattcccggcactgaaaatgaaatcagtgtgggaacggaagtttccagcaagacagcctggacccatacctttactaatacccagctttctgccgttcgtgtccgcctgaaatggccgtccctgatgaaacaggaagatgacggcgacgtggtgggcaataccgtcaagtatgcgattgacctgcagaccgacggcggcgcctggcaaacggtgctggaaaccgctgtcacgggtaaaaccacctccggttatgagcggagccatcgtattgatctgccccaggccggcagtaactggacgctacgcctgcgtaaaatctctccggatgcaaacagtgtcaaagttggcgacgtgatgacgctgcagagctataccgaagtgattgacgcgaagctgcgttatcccaacaccgcgctgctttatatcgagttcgactccagccagtttaatggctccattccgcaaatttcctgtgagccgcgtgggcgcgtgattcgtgtgccggataactacaatccggaaacccgcgaatataccggcgtctggaccggcgggtttaaatgggcctggacggataacccggcctggatctattacgacattgttatagctgaccgttttggtctcggtaatcgtctgagcagcgccaatatttcgaaatggacgttgtaccagattgcacagtactgcgatcagctggttcctgacgggcgcggtggtgacggcatggagccgcgctatacctgtaacgtctatgtccaggaacgcaacgatgcttacaccgtgctgcgagactttgccgccattttccggggcatgacctgctggaacggtgagcagattgttgtgcaggctgatatgccgcgtgatgtcgattttacctatacgcgcgccaatattatcggcaaaccccgttattcgagcagcagcagccaggttcggtacaccaacgccctggtttcctggtctgatccggataatgcttatgctgatgcaatggagccggcatttatcccggaactggtttcccgctacagttttaaccagctcgaaatgacggcgattggctgtacgcgccagagcgaagcccaccgtaaggggctgtggggcatactgaccaacaataaggaccgcatggtcgaaattgatgtggggctggacggtcgcattcctcaacccggttatatcattgccctggcggatgagttgctggccggacgggtcaacggcgggcgaatcagcgcggtgaatggccgggtgattacgctggatcgtgatgtggatgccaaacctggcgaccgcctccagctaaacctgccatccgggatctcacagagccggactattcaggctgttaacggacgccggcagattacggtcacaacggcgtacagtgagacaccagaacgggaatgcgtctgggccattgaatccgatgacctcttcctgcagcagtaccgggttacaggggtaaaagagaacagcgatgccaccctcacgatcaccggcgtggcacatgacccggataaattcgcccgcatcgataccggcgcgattatcgatcagcgcccggttagcgtattgccggcgggcaaccagtcacctcctgacgatattgtcatcacatcccgctcggtcgtgaatcaggggatcagcgtcgaaacgatgcaggttaactggtcagcggtcagcggcgctattgcctacgaggcgcagtggcgccgtaacgacgggaactggattaatgtgccgcgcagctcgaccacctcgtttgaggtcagcggcatttatgccggtcgttacctggttcgcgtccgtgcgatcaatgcggcggagatctcgagcggctgggcgtattccgaagagaaaaccctgaccggcaaggtcggcgagccgctggcaccgctggcgctggcaacccgttcgctggttcatggggtccaggttagctgggagttcccgaccggctccggggatacgctgcgcacggaactgcagtacagcaaaaaccaggacggcagtgcgccaatgccgttatcagacgtggcctatccggggaaaagctatcagcagatgggcctcagtatgggcgccgaattctggtaccgggcgcgccttgtggatcgtcttggcaatgaaagcccgtggaccggctgggtccaggggatggccagcgataactttgatgactactacgaaaacctgaccgacgcgatcaaggatacggctgcctgggaggaaacgcagcgcaccattagcgaaacgcaggaaggtatccgcaacacacagcaggaactggagcagaccgctgaagctctgcgtaaggaagccgaagaccaggcgaagcaggtcagccaggatattgatgcatcggcgaaaagcatcactgctgatgttgacgggaagatctccgccgtgaataaaaccatcacggatgagataacctcggtcaatgaggctctcgattctggtctggctcaggcaaacaaaggcgttcaggaggcaaaatccgccgtcgcagatgcgaacaagcagatcgcaactgtgaacaagtcgctgaccgacagcatcacccaggtaagacagtcagtcaccgatacggctgcggaaatcaacgccaccatcgacctggagattgccagggtcagcaaaacgctggccgacggcgatgccgcattgaatgcgcagataaagactgccgaaaatggcctgaagcagtcgctgtctcaggtcaacaccacgctgaccaatgcggtgaagcaggagaccgcggatcgtattgccgatgttaacgcgaaggcgtcacaggccgctgatgaactgctggcggcaacgcaggggattgaggcgagtatcgagagcctgactcaggtgatgaagaccgccgatgaaaatctggcgcgggaaatgtccagcctcgcagccggcgctaatatccagttcgattcgcaggttatctggcatttcaacaatcagacgaccgagggctggaccggcagcgccggcgtaccgggtgtgtcacaggatggctggttacgcccggcggacagcgccaccgatccgtacattacctctcctggcgggctggctgtcgatggtgcggcgtaccgtttcatcatgctgcgctttcgtaaaaccggcaaaccagtctgggcgggtgagatccgctgggtgtctgccggcgaaaacttcaataacacgaagcgatacattgttgctgagccggaatatgccgatggggtggcaaccctgacggtgcgtgatattccgtggacagggaacattgatcgtattcgcctggacctgacgaaccagcaggatgccagcaactttatcgaattcgactggatcgccgttggccggccagcacccggcgccagtacggcggctctgcaggatgtgcgcagtacgctgagtaacgcgctgaccgccgaagcgcaggcacgcagcacgctggcggcgcagatgcgtggctcctatgatgggaacgatctggagaaagtcacctccgggctgctgtaccaggaaaaaaccgcgcgcgttaccgccatctcggcggaagttaaggccagagagtccctgcagacgcagtttaacgacaacaaagctgctgtttctggtgaactgagttctctgacgacagagcagagcgcgcaggcgagccgtatcggtggcctggaaaccagcctcgggaaaaaagccgatgcagccgcgctgacgtccctgacgcagaaagttgagcaacagggcgccacgctgacatcgcagggcgccgcgttaacatcgctcactaaccgggttggccagacggaaacgggcctggctggtacgaatgaggcactgagcgggctgcagtctgttgttacccagcagggcgacaggataaccagccagggtcagtccatcacgaaactgacgagcgatttgggcacgacaaattccgcgctggcgaagaaagctgaagcggctgcggtcactgccttaacgcagcaggtagagcaaaacgggcgggatattcgcagcaatactgacagcatcaccagcctgtcgaatcaactggtcaatggccagccgaatcgctggtcccgtcggatctatccggtgcagctggctaacgccgggacagtcccgtcattcagcgatgttcgcgctgtggcaccaacggtagtggatgaggtggccgacgcggccaaactggactttacgtccgccggcagctatctgatcgcgctgtattcctgccaggtgaaagtggccgcagataccaccatcacactggcgcccggcgccagggtttttgatgataccggcgccatatttgtgaatggggttcaggtcgcctggggtaacgccagcaggaataccgtcagttttgaactgaaagtcggctggaacaccgttgagtttctggtgaatcagtggaccggccaggcgtatatcaacctgggcctgaagctgtcagacaaggttgctgagatgtactccggtctcggggtttccgcgctggcaaacgcagccggcgtgctcagctcgaatgtcagccagattggcaacgaggtggtcagcaattcgcagagcatcacccaactccggaatgcgctgacgcagacagacgcgaacgtggacagcaaagcggatcagacggcgatgaactcgctaaccggacgagtggagaagacggaatccgggctgacggctgctaacgccaacattacctcgctgaaatccgctgtacgggccggaaacgcatcaggcggagatttaattcccaacccgacatttgacccggcttacgaccagatggggtttagcgtcgtatccacgacggctgaggaggtccctcctggctgcccgtatggttatgcggccagaattgccagtcgggatcaccatcctaactttgccgcgttcccggccacgcttaacgatgtgattgagatcagcgcactggttgcctgcggcgctggcacggcgaattttaatctgtatgttggcaccgccgttcggccagatacgagcaccggtgcgccactcatggcggggggcggaaaatcaccttctgcgacctggcagagaaccacctggcgcttcaaggtcacgcaggcgatggtagacaggggttatatccgcccgttcctgcagatctcgcagaacagcccgtatggcaccgtatggttcgttacggactggcatatgcgaaatgtgacagcggcgcaaaaggttcaggatactgcggatgccacggcggcggcggttgactcgctgaccaccaccgtgacgcaacagggtaatctgctgacctcgaccggcaaccggacaacccagctggaaaacgggctggccaccaccaatgccgcagtggccaaaaaggctgatgcgacagcggtgcaggatttgaccaataccgtcacacagctgggcaacgatctgactgctgcgaacagcgccatcacgaaactgaccggaaatctggcgaataccgataaagcgctggcgcagaaagccgatgcgactgcgctggccacgctcgacacgaaagtgacgcagcagggtaaaacgctggagagccagagcaattcgctgacgaatctgtcgaacagtctctcgcaagttgcggcagatatcgatgccagcggtcagataccgggtaaccaggtcgtgaatccctcgtttgaacgcgggctggatggttataccgggcggtcaaccgcgaccagtgtggtggaggtttccgctcctcacagcgggacgcgggcgctgaaggttgatccggggagcgtgtctccggggcaatacatcccgtttgttcaggggcgaacctatgaaatcggggtgtgggtcaaggaacccggagcgacgacggataatggcgcggggaacaacaagttgcggatcggtaactctgccggccagccggtctttgagcgtccgtacaacagcggcacggtggggacaaactggaccctggtttccggtcgctggaaagcgacggagacagccagcctgccggtgacgctgagcaactatctgattagtggcagccgctacttcgatgatttttacgtcactgacgttaccgaccgggtggacatcgatgccaccgccggcgccgttaccggactgacgagccgggtcagcacagcggaaggggctatcacctcgcaaagccagcagctgacgaacctgcagaacagcctgaacacgaccaacagcaatgtgtcgaagaaggccgatgcaacggcactgacttcggtcgataaccgggtgacagaggcggaagggaaactgaccacacagagccagcagctgacaaatctggcgaatgtgctgacggccacccgcaacgccggcgacaacctgatcccgaactttgattttctgcagggcagcactgcctgggatattcagtatccagccggtgtgacttttggcgatttcggggacgggaaagcgggggtccggctgaaccggacgactaacaccagtccggggatcttctccaacaacaacaagccggtgccgctgaatggccagcgcaagtaccgcgtggtggtgaaggccaaaggtgtttccggcgcgatgagtctgctgatccgtcgccagaacaaaatcggccagacggacagtacgtatgaggataaaacggtcacgctgaccactgactggcaaaccatcacctgggaaaccggattgacggctgccggcgcggacgggcagaacttcaaactttattctcatccgacaaacggtgaaatctggctcgattccgtccgggtttttgatatcaccgatgaaaccaacatcaaggcgaccagcgatgctgtttcgtctctgaccgggacggtgacgaaccaggggaacaccctgacatcacaggggcaatccatcacggcgctgaataacgcgctggaaggggtcaaaggcgatgtggcgaagaaggctgatgcgtcggcggtcagttcactgaccaaccgggttacccagactgaaaaggatatccgtagccaggccgacagcctgaccaggctgaatacatcgctgaagcaacaggcaacacggggagccaatgtactgccggacggcagttttgaatcctatgccgtcggcgatgttctcagtaatgcccgcgctgttatcaccagtgaagctgcgcacagcgggaccaaaagcctgcgtgttacgcgcagtacggagtacaacccgaacgcgacggataataacgatacccatatcttttctggtatgcaggttcgcgataatgcggtctattacgtggaggcgtgggttaagttgccggctggctcgaccgccgatccgaccgtttatatggtgctcggattttccttccaggattctgccaatggctggtcgtggcctggcctgaacgtgaaagtctccgagttgtcggtggacaactggacaaaggtcagtggctatctgaccaacaaccgaaccgcactgaaacaggcaatggtgaggatctccatcccgaatacaccagaagttcgcctgggtgacgccttcctgattgatgatctgatcatcactgacgtgaccgatgcgaaagcggcgctcgatgccgccgatgcgaatgcgcaggcgctttccagtctgtccgcgtcagtcacgcagaacgggaagaatattacgtctcagggcagcgcgatcacgaagctgcagtcggatgtgacgcaacttggtaaggatatcagcggcaaggccgatgccagcgcgctgacgaatctgacgacccgcgtgacggctaccgaaggcagcctgaaatcgcagggagacagcctgaccaacctgcagaacagcctgaacacgactaacagcaatgtggcgaagaaggctgatgcaacggcgctgcagagcctgcagaacaccgttgaacagcatggcagggatctgaccacgcaaagcagcgcgctgacgaacctggaaaacaacttttcctccctggccgttggcgggaccaaccttatccgcaatgcggacacactggagggatggagcagccgccacgccacagagacgtatctgggcgaccgcgtggcctacacccggctggcgaaaggtgcatccggttatatccagctggatgaacagacgctggatgttaccgggcgtactgaatttgtattcagcttctatgcgaaaggtgcctataacggacaggaaatggcgagttatttctataacccgtcgaacactaccaccacggaaaccagccagggggttaaaggcggggccggtgacggcaaggcggtcacgaaactgaccaccgcatgggcgcgttactgggtgaaatgggttattcctgccaccagtggcaccaaacggctgattgccgcgcgtctggaaagcgcgacgtctgccgacaaagaagtctggctctgtcgccctcagctggaaaccgggaccgtgatgactgactggtcaccgagtccggatgatgcggccagcggtattaccgcgaacacatcggccattaacagcctcaccagtcgggtgacgaatgccgaggggcaactgaccgcgcagtctcagagcatcacgaatctgcagaacagcctgaacaccaccaacaacaacgtggcacaaaaggccagcgcgcagtcggtgagtgatctcaccagccgggtcaccagtgcggaaggcaaaatcacctcccaggggcaggctatcacgaagctgcagggcgatttgagcagcaccaccgataaggtcaacaccaaagcggatcagacggcgcttaacgcgctgactggccgggtggagaaaaccgaggcaggcctcacggcagccaacagcaacatcgtcagcctgacggcggcggtgaacgccgggaatgctgccggggatgattacatcccaaacccgtcatttgatccggcgtatgaccgcatgggttatgacgtggtggagaccactgctgcaggtgtgccggctgactgcccgttcaggtatgccgtccggctggccgggcgagaccatgtgccaaaaatcaacaacatcgctgtgacgccgggcgacgtttacgaaatgtctgctctggtagcgtgtggtaccggcagcgctgactttaatttctacatcggtcgggccaccactgctactggtggtattagggcgagagcgtccgggggaaacaccaggaccaccaccgcgtggaaacgagccacctggcgctttactgtgccggcaggcacgaacttcctgcgaccgttcctgcaggttaatcagagcagcccgttcggcactgtctggtacgctgccgactggcatatgcgtaacgtgacggcggcgaacagtgcgcagaaaaccgcagatgcgaccgcaaaagcggtggattcactgaccaccacggttagccagcagggcgatacgctcagcagcatcggcacgcggaccacctcgctggagaacagcctccggtcgacaaacgatacggtgagtaaaaaggctgacacgacagcggtgacgcagctgcagggcacggtgacgcagcaggggaatgacatcgcggcagccaacagcgcgctgacaaaactcagcagcgatctggccacgacgaatgcgaatgtgaacaaaaaagcggacgcaagcgcgatgaacaccctgcagaaccaggtcactgagcagggcaaaacactcagtgcgcaaggggattctctaacgcaacttagtaacagcctgagccagacggcagcggatattgacgccagcgggaaaatgccgggcaacctcattgtcaacggcagttttgagcgcggcgcggcgggctttaccggctggagcagtaccgcgacggtggccgatttacaggttccgcattcgggtaacaaggcgctgaaaatgtccgccggccagtcgaacctggtcgggcaggaaatcagtatcacgcagggtcgtacctaccgcatgggggtatgggcgaagcaggacccgggaaccacgattaaagatgcgggtaacacgaagtttcgtgtggccgacagcactggcctgctggtcggctcaaactacggaccgtttagttctggctggcaactggtaacgtttgactggaaagccacgaagaccacgacggccagtttccagctgacgaccttcctcagcgcgggggcaatgtatttcgatgatttccatgtcctcgatgttacggatgaaaaggatatcgcagctaatgccggggccatttctcagatgaatacccgcgtcaccgctgctgaaggggctatcaccacccaggcgcagcagctgacgaaactcagcggcgatctggccgtcacgaatgcggcggtcagtaagaaggccgagcaaagcgctgtcaccgggttgaccacccggatgacgtctgccgagggtaaactggattcgcagtcgcagcagctcaccagtctgcagaacagcctgaccacgatgaatactgagctgggtaaaaaggctgacacgtccgcggtgagttcactgaccggtcgcgtaagccaggtggaaaacaccatcaccagccagtcgcagagcatcacgtcgctgaccagcaccatcaataccatccgcactcagggagctaatccgtgggttgacggtacgtttgaaagctacagcgatggccaggtgctgggcgggaacggcacagccgttgtggtggcgtctcagaaattcaccggcaataagagcctgcaggtgagtcgaggagcgaacaataacggcaacagcgataaacagcttgggagctggcagtcagtccgtgaggatgcgaagttccggtttgagttctgggctatgatgccggcggatcaggcgccatcctccgggtggacaacgctggtcggcattaactcactgaatgctgccggtcaaaactcctggcagtcggcggtcactgtcagcgaagccgctcttggtgcgcgtgataagtgggtgaaatttacgggtattgccagtaacaacgggggtgggagaacacgcgcagtggtctggatctctacccgtggcgcctccggcagcggcacccccggttattcgctgtatatcgacgatctggttatcacggatgttaccgatgcgaaagctgcacaggatgcctctgacgcgacggcgagtgccgtgagcggtctgacggctcgcgtaacggatgctgaagggaaaatcaccgcccaggcgcagcagcagacggcactggccacgaaagtggataatgccaactcccgcgtcgataacatggcgaagacgctaagcgacagccagagcacacaggccagcctgaatacctcgcttcagtcgcagattgacgcgcaggcggccgccaacatcaaaaaccagacgacgctggacaacacgattaaatcggtggccagtatcaccagtacccagcagacgcatgcaacggcactggaggcgctggcaacgcagcagacgaccctgacatccagtgtcggggatctcagcgcttccgttcagaacaccgccaaaaccgtggcggatgtgaatggtacggtgagttcgctgtggtcgatgaaggttgagacggttaacgggaagaatgttggcgcggggattacgctgggcagcaatggtgaaacgagcgacatgatcctctacgctgaccgcttctcgctgtttaaccgtaataatgcgacggctgttccggtgatggttgccgaaggcaatgagctgtatatcgatacggcacgtatcaaaaacagttccctgacctcaaccaaaatcgcggacggttccatcacgaacgcgaagatcggcaacgagatccgctcgaatgactttgttgacgggtcacgcggctggcgtatcgccaaggatggctcttcgcagttcaacaacgtgatcgttcgcggtgcggtttatgcgactgacggctggttccagggtacggtatatgcgaaccacatcgagggcgacatcgggtcatttgcgatcaacatcgctcagcaccgcacgcgcaaggtgccgaaggctacatggcagtggtttgagctggcccggttccggcggcagaatttcgaccaggtgatcaatattcgcggtggactcctccagacggatagcatcactatcgacggcggcgcgaaactcagagcggggatgtcctacgcgccaggggctgacggcggactgaatcctggctatctgtcgtatgcaatgcttcttcgtggcacaggcgctacgtctggtggcggcagtatggagctaggcattgagcttatgtatgaaacaggtggagcaacacgcctgttaacggcgcaagagtcaatgaacgtagacaacatgtcatttgtcgtccctgccggtactggcgacgctgttctgcgatatggctgttacctggaccgtaacggacagatggtattaaccatcctctcaagattcgacgccttcgccgcgcgcaataacaacgtaattcgcggttcatcaacctga

SEQ ID NO: 247302 - DNA, 666 bp, Klebsiella pneumoniae
atgctcactcatgatcctttcaatattgcaagagatgtaaacaactttaaaacagaggtgcaacagcacctcacatccactgatgaaataaataaatcagtatcaatatttaggcaaataagcctttgcaacaccatgttaagtcacacccctaacctaaatcattcttcatatataaaaggttttatatatgatactttaaactctttaattgccattataaaaaaaagagaacgatatctccaactaaatttcagatcgatggtggagcatgtggccagaataagtctcaataaaaactataatggtggggattttgaccaaactgtacgtcgcagagactttgacttcttaaaagcccatcagaatgatgaaggctgggcctatttacataatgtctatattaacgcctgttattatgttcattcttcaccacaagcgaacttaaatgtcacatcaacatttatatcacttatggatggagattgtaattcaacacagcataaaatggtgaaaaaacttcatgaagtagtatcagcgcttatgaagatcattataaaatattatcatcagcatatctcaaacattttctttagaaatatgaaggatttaaagaaaataatggggaatagcctttatttatattataccagtttagacaattaa

SEQ ID NO: 247303 - DNA, 249 bp, Klebsiella pneumoniae
atggatccttttgtgattccacgggtatccctgccgccgcagaacctggaaaagttttggaaaaccgtaccgtgggtatcgttctgccactgcctgcaacgcgacaataacgggttcgtcacgcgtggtatccggacggtaatggtaaaccgttctgctcaggttcagactccggcaggcctgacggatactgagtccaaatgtcgttatcagatgagtgaccagcgcacgcttaaaggctggttttaa

SEQ ID NO: 247304 - DNA, 834 bp, Klebsiella pneumoniae
atgtcatcatccatcaaacaaataattaatgatcgtcaagaaaccatagccgccattgaaaaatgcttttccaatgctttgcaatgctacgtgatccattattcatgtgaatccttctacaatcttcagggcgggcaatccacccgaataacttcaatcgctatacgaaatttaggaagcgcacaaactcatcattgggctctgaaccgctctgctgagttgttaaaactgaacgtttcagatcctgctaacttagatactttggaacatcatctacttaaaaattacttcgatttcctatcaagatacgcaacctgtacgtttatgcattggaatatgcgtgacaacaactatggtttccaggccttgcaacaccgctttgaagtgttaactggaatcccattcatccttagcgatgatagaaagctagatttagcaagggctgccgtttcgatttatggacgtaactatatagctcacgccgcaaaaaatggacgaagcggcagattactagcgcttgtagaaaagaatcacatcgcagacaaagatgttatgaccggacaagaagaagcagaagcttatatcaatggaaaatatagagaacttgaaatgtctacccttaggaaagtagacattctttgtaacattgctgaacgcatgcatgaccgcacattgaaaactaactcggtatggtataaacccagaagctttcatccttactggctgtttaatcgattaaaagagcacccagttatgtccggcttggtagcaattggcatcttaattggggttattagcaaaagcttggatctctattcaaagttccaacactag

SEQ ID NO: 247305 - DNA, 846 bp, Klebsiella pneumoniae
atgactgcaccagtaattagttttataaacatgaaaggtggggttggtaaaacaactttatgcgttgggattgctgaatttttagccaattatatggggcacagggttctcgttatcgatatcgatcctcaatttaatgccactcagtccttaatggggcattatgatcgagttgaagaatatatgactgcccttcgacctaataatcaaactattcgaaaaatttttgagcttccaaattcattaatggaggatgaaaagaaagcgacaccagaacaggtcattacaaaagtatcagacaatcttgatattatcttaggtgatataaatattatctttgatactaaccaagaaggaattagaataaaaatgttgcgtaaatttatcaatgaaaatgatctaaaagaaagttacgactacatttttatcgatagccctccaactatttcattatttacagacacggcactccttgcttctgattattatcttacaccggttaaaattgatcattactcggtgctaggggccagcagtttaaatagcgtcatacgaaatatgcgcacacatcatgagaaagaaatcaagcaggtcggttacatttacacaaatactgacgctgaaatgactaataaaacaagggaaattaaagaacaattcgagagccatacacagtttacgaatttctatttctttgaaaaccaattaacctacgtgcgagatttaatggtagggtatcaaggaaatattccttcttgttactcaaagtcgcgccaagatatagaaaacatctgtaatgaatttattagcagagtggctcatttggaaggtgatacaaatgaataa

SEQ ID NO: 247306 - DNA, 315 bp, Klebsiella pneumoniae
atgggctaccgcctgcaggggcagccgctcaagcgcacaaccgaccgggaaatgctctctcatggcctgctgcccggcgtggtacaggtaccgcataacggccagccgattgtgttgatgaacgatgcgcaaaccaccggcggctatccgcgtatagcctgcattattgaagccgatatgtaccaactggcgcaaattccgctaggtcagccgatccatttcgtcccctgttcgctggaggaagcgctaaaagcgcgcgccgaccagcagcgctaccttgaacaactggcctggagattaagcgatgaaaattga

SEQ ID NO: 247307 - DNA, 504 bp, Klebsiella pneumoniae
atgctagatatatttgaactagcagctgaatatgaaggccttcaggaaattgacgacaacgaaattgataaactaaatgaagtcgaaattgaagctctatttaagctgcacaaactaaaagaaacatttaaacgagaaaacaaactagctttctataagccttacgctttccagcgtgaatggattgaagcaagcaatacgcatagacaacgttatttttcagcggctaatccaattggtaagacgtatggtgcatgcatggagcttgcctctcaaattacaggcctatatctgctcctgtctaatcacttcgtcacggtactgtttcagagccagatacatagcctcgtatgggatgttcattggctcaagctccagataccggatagagacagcagcaccacgttgtgcagccatggctgcttctttggttctcagggcaaggtagagtgttccagtctggtagcgtttacggaacacatagccatctttgttagtcagtga

SEQ ID NO: 247308 - DNA, 273 bp, Klebsiella pneumoniae
atgcctcgcaagaaacgcaagcctgtagaaatcagtgcagatgtgcgtgagtatgcagacaataacaatctaatcctaatggctacacagatgcttgagaagattgctatgaatcagcgaggtgcttatgacgttaaagaccagattaaggcctgtgacctgattattaaacagtttggaattgctgtagaaaaagacttagaccgtgaggttcaggaaacaacgaatgaaacagcggctgagatgattaagattttgaaaaaagctaagtag

SEQ ID NO: 247309 - DNA, 282 bp, Klebsiella pneumoniae
atgattgagatgaaagttggtgaaactctggttattgatgcacgtgaaattttaacttctccagaagatattgagcgtaaagagttctatgcagctgctgaaatgcttgaggaacgcctgattgctcagggatgcacagacaaagctattcatacagtgatggtaggctttggtattggttatgctgccctcagctctcaagctctccgtgatgagattgcatatgatattgctcattcagaggatgaagagaaagctattgctgctgaaaaagctgcttaa

SEQ ID NO: 247310 - DNA, 249 bp, Klebsiella pneumoniae
atgatgaatggaaatgaggtgagggcactagaaggccttccctataaagcctctctaatggctaatctaattacttgcatgttgtttaataaactctctcagcgacagttagcagggcttgctaatgtcccgcatgagacggtgaagaagatgattaaacagcctgctcatggttccctgattatgtgggagcatctattaaagacagctttaaaatatgaagctgaacacaaggaagatacaaaatga

SEQ ID NO: 247311 - DNA, 519 bp, Klebsiella pneumoniae
atgacgctgacagaaaaaacaggccatctggcatggtgtgcactggtcgcgctggcactggccagacaggagcagggagaactctctcccgcacaggaaaatctctttctcacccgctggctcgcggcagcactgaagcaacggcgattctcgcgcgatgtggcacaggatatcgggtggttactgaatcaggggcgtttgctgggtgtgagagctaagctggccgacaaactgggctatgtctggcgctcctgcagcggcgagttgactgaacagaacgacatgttccgcctgacgtatgcgctggaaacagcgaaagacatgggctggaattaccgcgtaatgagcgacagagaatgggccggacgatatgctttggtactcaatcctggagtaaacggtgtttatctcttacggacaaaccttgatgccgcttttgacgacaatggccaacagacaaatccgctgacagtacgtctgacagggaacgtaactgggatggcactgttgcaaagttag

SEQ ID NO: 247312 - DNA, 483 bp, Klebsiella pneumoniae
atgtcgccctggctcggcggcgggaaaatgatcgccgaggtcagctttgacggctttacgccgcagccggccccctatggcctcgaggccggtacgccgaatgtcgccggggttatcggcctcagcgccgcgctggagtggctggcgcagagcgatatcggccaggcggaaaactggagccgcagtctggcgagcctggcggaagaggaactggcgaaacggccgggcttccgctctttccgctgccagcagtcaagcctgctggcctttgaatttgtgggtattcatcacagcgatctggtgacgctgctggcggagtccggcattgccctgcgcgccggacaacactgcgcccagccgctgctggctgccttaggggtcagcggcaccctgcgggcctctttcgccccctacaatacccaagacgatgttgcggcgctggtccacgcggtggatcgcgccctggaaattctggtggattaa

SEQ ID NO: 247313 - DNA, 765 bp, Klebsiella pneumoniae
gtgaggcctgtcactcatttacccacttgcgcgactgaaactgccggtgctggcggcctcaaaatcgctgagacgttcccggaaggccggggcagcccgcatggatgcgggctgagggccgtgttttgcagggacgctgcctcggcccggcccgcagcctgcagggataagtcgaaggtaccacgcagtggcgattttgctggccggagcccgggggtacagggggcggcggcgactggccgccccctgtgcgctccctgcgccatacgagacataacgcagaagatcaaccgggagcgcaatctgcccggaattaacatagaagttgtagtcctgccaaacatagtgcgaacagggacatttccggttgggccgccatttcgccgggtggcggctgcgccttacccggcctacggggtctacaggcgatcttcgcttcccaggcccggcaagcgctgcgccggagggcaatctatcggcgccatacccgccatttcgccgggtggcggctacgccttacccggcctacggggtctacaggcgatcttcgcatcccaggcccggcaagcgctgcgccgccgggcaatctatcggcgccgtacccgccatttcgccgggtggcggctgcgccttacccggcctaggggttcgtgcggcctgtcactcatttacccacttgcgcgactgaaactgccggtgctggcggcctcaaaatcgctgagacgctcccggaaggccggggcagcccgcatggatgcgggctga

SEQ ID NO: 247314 - DNA, 258 bp, Klebsiella pneumoniae
atgattgatgatgacataaagaagaaaatgagttcaaaaatgaaacttgagttattagcaagatttctttattacatagaacaagataaagatatactttttaaggaaataaataataatgagcgagatttatgttattttgttgctcatagacttattgaagataataaagctgatgatcttctaaattcattgattgatgaaaatgacgaggactatataaaagctataaaagattatatgtttacaggtgggtaa

SEQ ID NO: 247315 - DNA, 126 bp, Klebsiella pneumoniae
atgttgagactgccggcggtatttattttacaaattgcattgaaccatactcagaacgcaacctggttactgatgtgggcgctaacggaattaagttccgcgccgatactctcgggcaaacggtga

SEQ ID NO: 247316 - DNA, 303 bp, Klebsiella pneumoniae
atgttcactgaattcgtcctagagaacgtcaccggaggccgtaaaaaagcccaggtgtgggggaatggtgccacattcgataacgccattttgcgttcgtcatttgatatcgcctgcctcgattgtccgtgggactactggaacgaccgcgacgtcagaacgatggttgaactcggcaaagccattggcttcgatcctaaaatcgccatcccgttcgaaggtgaccggcataacgcgctggcggatgcacagcaccaggcacggtacgtttctgctatctggcagcgcctgattaaaaactga

SEQ ID NO: 247317 - DNA, 2436 bp, Klebsiella pneumoniae
atggctggcaagtccctcggtacgttaacaatcgatctgatcgctaaagtaggtggatttgttcagggcatggataaagccgaaagatcttctcagaagtggcgcgaccaggtaaaaaaagacgctaaagaggtaagttcgtcaatcattgctgttggggctgcggcggctacagcagctgttggcattggtgctgctgggttagccattgttaaaaatactgcacagcaggttacagaagctgatcgctgggcaaaatctcttaaaatgtccacccaggatttgttatcctggcaatacgctgctgaacaagccggtttaaccggtgacaacatagccgatattttcaaagacattaatgataaggtcggcgatgcggtcctgaataaatcaggtgaggctgctcaggcgctggatactttgggtctttcagctcagaagctggctcaacaatccccagataagcagctgatggcaatcagtgaagcattacagaaaatccccactcaggccgggaaaacaaatattctcgaaagtctgggtaatgatctgtcaaaaatgctgccgttgttcgataacaacaacgaaaagctgaaacagtttatccagctatcaaaagattttggtgtcgctccaccgcaagaagatattgataaccttgttaaggttaatcagttctttcaggacatagagactagcgcccgcggccttaaaatggaaattgcttcggggctggctaaggttgaccttacaccattgcaggatgggcttgatgatattcgtgacgtcttcaccgatcctgctgttcttcaggggctatcagacctggttggtgaagccataagccttgccggggttgtggggcgtattgctggtggcctgggggccattgcaacttatacccgctctcgtatcggtgctgtatctggtaattataacgctgctgatgaaagtgatattgcacagcgcattgaattccttaacaaacgagggaatcaaagtaaggaacaaaaagacgaattagactttttaactaaacgtcttcaatttcttcgcgcgataaagtcaagcatgactccggagcaggtagatagaggagcgaaagggctcacatctctactttctgatcttggcattgacacttctaaagataatgatttttcgttgggcaaaggggagtctaaccagaaccagccaaaaacaaaaccaaaaagcaatcctactgacaatgctttcaaaaatagactgcttgatttacaaaagcaggccgccctaattgaaacaacaggtaaaaaaactgcagaagtaaccgaactggagaagattaattttgatataaccagcggaaacctgaaaaaattatcagaagggcagaaggaacaacttcgaactgcggctaaaatccttgattccaagaaggaagagttacggcttaatcaggaaaatgcgaaaatagctgaatatgtttcagatctcgaaagacagaataagttagtccgccaagggtttgataaccaaatagtaggccgttattctggtagtcgtgaacgttcacgcatgcaggataataatgacattcagcaagattttgctgctcgacaggaagagattttaaatcaatttcagtctggagatattgataaaagtctatacgataaaaagaaagaagcgcttcaaaactcgctgaatgaaaggctaagaattcaagaggaacattataagaagttagatgagttacaaaacgatggtgttgcaggtttcgtttctggaatatcagatcaagctgctgcatattcaaacctatatgcaaatatgcagcaagtaggtgcccaaacgtttagtagtttaactgatatggtaattaactgggcggaaaccggtaaattaaacgctcaggactttgcggcgacattcattcaatctgttggggctgcattactgcaatatgcggctgctcaggtagcaatggcagcgttgagtgccttcactgcctggattggtgttccctatgtagggcctgtggtggcgtcaacccaagcaatagctgcggcagctgctgctggtgtgttcatgactgctatcggatcggcgcttcagggccaggctcatgacggtatcgactctgtgcccgaaactggaacctggctcctgcagaaaggtgagcgcgttacgacagctaaaaccagcgcaaaactggatgccactctggatcgagttgcaaaccagtcaacaggcggcggcgcgatttattcgcccacaatcaatatccccattaatggcaacccgtccgatgcgacagtagccctcgtgcgcaaagccgctgctgaaggtgctgagcgcggctaccgaaaagctgtcaactcggtgactaccgggcaaggtgatctacacagggcacttatggtgaaaaccaactcggggaggaaaattcgctga

SEQ ID NO: 247318 - DNA, 567 bp, Klebsiella pneumoniae
atgaaaatacttcccgttatctctcccaaaggtggagaaggcaaatccacgtttgctgcttaccttgccggttttcttgccgatgccggcctgaacacccttcttgtggatgcagactattcccagcccacagccagcagtatcttcgcgctggagcatgaatcccctttcggtctctatgaattgctgatgcagatggtcagtgaccatacgcaatgcatttcgcagaccgccataaaaaatctcgatgtcatctactctaacgacccggacgaactgttgccgaccgcgatgctccacgctgcagacggccgtctgcgcctgcgtaacatacttcagcattctttctttaaccgttatgacgtcattattgtggattcgaaaggcgcaacaggcgtcatgaccgagctttccctcctttcctctaccggtaatgtgatgggcgttgttaaacccatccttccggatgtccgtgaatttatccgcggctcccttcatatgcttacccgcctgaaaacctatgaaaattacggtattcgccttccttgtatcttgaagactgattaa

SEQ ID NO: 247319 - DNA, 267 bp, Klebsiella pneumoniae
atgtaccgcttatatttgatttatactgtcactctcagcactgacagccattccagcaattctcgtaattctctcccggttaaacgggggattgtcacccggctatttgttccggcgttgcacagcgcgagcgctaacgccataatgctgctgttcggcatttccttctctccgttgggaatgttgaatacggcgggggcgggcttcttggtggttggctgcccctgccacttgttgagcaactgcttttctaagattggttggtaa

SEQ ID NO: 247320 - DNA, 123 bp, Klebsiella pneumoniae
atgatcatactttattggacattatttatctacataacagtttattattcagggatgttctcctcatacaaggaaaaaaataataatgagcagaaaagaacgcaacgtattagcacgtattga

SEQ ID NO: 247321 - DNA, 408 bp, Klebsiella pneumoniae
atgagcagaaaagaacgcaacgtattagcacgtattgaacgacaatccacagtattaccccccgccaaatcattagcaagcagaaaagagtttcgggagctatcccgcctctctatgctatggaatagcgttcccggagaatggcacacagaaatcattgaacatgactcccctccgttatcagaggaagaggaaggtattattaacgacattctctcatcctgtgatggtggtgtgtatttcaaacctcgtaaacgaaaaaaatacatcgtcgatagttcagatttgaagaagtggcaggttatgggctttgaggaccatgtgtcattttgtgggtatttatcgattaacggcctcaacaacctggtgaaggacttcgacgcagtatacggcgataaggaggaatga

SEQ ID NO: 247322 - DNA, 330 bp, Klebsiella pneumoniae
atgaaaattcagctcgcaaggctttaccgtggaggtcgcttctatggcttcggtatcgctgtaaacggtcagcttcttgatgggctgacatccgtcattatcaacaccgaaacgcgtggcacccctactgcgacagccgtattcaatctggataaagacagcgctgaaaatcaggtggtaattaatctggaggctgttgctgttcggatgggtatcgacggacaaccatcaactgaaacagttgaggttatcaagcaagccgcagatgaaggcgctaagcgcggttaccgcaatgcggttaacaagctttttacagggaaaagaccatag

SEQ ID NO: 247323 - DNA, 195 bp, Klebsiella pneumoniae; identical to SEQ ID NO: 229908

SEQ ID NO: 247324 - DNA, 465 bp, Klebsiella pneumoniae; identical to SEQ ID NO: 109387

SEQ ID NO: 247325 - DNA, 966 bp, Klebsiella pneumoniae; identical to SEQ ID NO: 109388

SEQ ID NO: 247326 - DNA, 1644 bp, Klebsiella pneumoniae; identical to SEQ ID NO: 109389

SEQ ID NO: 247327 - DNA, 393 bp, Klebsiella pneumoniae; identical to SEQ ID NO: 109390

SEQ ID NO: 247328 - DNA, 504 bp, Klebsiella pneumoniae; identical to SEQ ID NO: 109391

SEQ ID NO: 247329 - DNA, 447 bp, Klebsiella pneumoniae; identical to SEQ ID NO: 109392

SEQ ID NO: 247330 - DNA, 516 bp, Klebsiella pneumoniae; identical to SEQ ID NO: 109393

SEQ ID NO: 247331 - DNA, 909 bp, Klebsiella pneumoniae; identical to SEQ ID NO: 109394

SEQ ID NO: 247332 - DNA, 975 bp, Klebsiella pneumoniae
atggcaggatacaaagataatctgctgggcgaagcgaacagctttattgaagtgctggagcaggtttctcgtctcgcgccgctggataaacctgtgctggtcattggggaacgaggaacagggaaagagcttatcgccaaccgcctgcactacctctcaacccgttggcaaggcccgtttatttcacttaactgcgccgcgctcaacgaaaatttacttgattccgaactctttgggcacgaagcgggcgcctttaccggcgcgcagaaacgtcacccaggtcggttcgagcgcgccgatggcggcacactgtttcttgatgaactggcaaccgccccgatgctggtacaggaaaaactgctgcgcgttattgagtacggagagctggaacgcgtaggcggtagccaacctctgcaggtcaatgtaagactggtttgcgcaaccaacgccgacctgccacgcatggtgagtgaaggcacgttccgcgccgacctgctggatcgtctggcctttgacgtggtgcaacttcccccgttacgcgaacgtcaaagcgatatcatgttaatggctgaacattttgccattcagatgtgccgtgagatcgggttaccgttgtttcctgggttcaccgatgaggccaaagaaacgctcctccactaccgttggccgggcaatattcgtgaactgaaaaacgtcgtggagcgttcggtataccgacacgggaccagcgattacccactgaatgagattgtgattgacccgttcaggcgtcacgccgcaccgccgctggcgcaagaaaccagacatacatcagtaaccctaccgctggatctgcgtgaattccaacagcagcaggagaaggaatttttgcaaaccagcttacagcaggcgaaatttaatcagaaaaaagccgctgaattattaggtctgacctaccatcaactccgcgcattactgaagaaacaccaaatttag

SEQ ID NO: 247333 - DNA, 669 bp, Klebsiella pneumoniae; identical to SEQ ID NO: 109397

SEQ ID NO: 247334 - DNA, 225 bp, Klebsiella pneumoniae; identical to SEQ ID NO: 109398

SEQ ID NO: 247335 - DNA, 360 bp, Klebsiella pneumoniae; identical to SEQ ID NO: 109399

SEQ ID NO: 247336 - DNA, 231 bp, Klebsiella pneumoniae; identical to SEQ ID NO: 109400

SEQ ID NO: 247337 - DNA, 348 bp, Klebsiella pneumoniae; identical to SEQ ID NO: 16878

SEQ ID NO: 247338 - DNA, 138 bp, Klebsiella pneumoniae
atgaagcagattaaagagctgcagcgcctgttgggcaagaaaaccatggaaaacgagctgctgaaagaagccgttgaatatggccgacaaaaaaagtggatagcgcacgtgcccttgttgccggaggatggcaaatag

SEQ ID NO: 247339 - DNA, 174 bp, Klebsiella pneumoniae; identical to SEQ ID NO: 121643

SEQ ID NO: 247340 - DNA, 801 bp, Klebsiella pneumoniae; identical to SEQ ID NO: 96018

SEQ ID NO: 247341 - DNA, 1524 bp, Klebsiella pneumoniae; identical to SEQ ID NO: 32314

SEQ ID NO: 247342 - DNA, 741 bp, Klebsiella pneumoniae; identical to SEQ ID NO: 32313

SEQ ID NO: 247343 - DNA, 255 bp, Klebsiella pneumoniae
atgattgacgtcgtgacccacggcgcggagtggtttatcggcctgtttcagaaaggcggcgaggtatttaccggcatggtgaccgggatcctccccttgctgatcagcctgctggtgatcatgaacgcgctgatcaactttatcggccagcagcggatcgagaagctggcgcagcgctgcgctgcgcaggaaacccaatctcccgctacctgctgctaccctgcatcggcaccttcgtgttttgtaacccaatga

SEQ ID NO: 247344 - DNA, 1404 bp, Klebsiella pneumoniae; identical to SEQ ID NO: 138599

SEQ ID NO: 247345 - DNA, 354 bp, Klebsiella pneumoniae; identical to SEQ ID NO: 151234

SEQ ID NO: 247346 - DNA, 1221 bp, Klebsiella pneumoniae; identical to SEQ ID NO: 151236

SEQ ID NO: 247347 - DNA, 738 bp, Klebsiella pneumoniae; identical to SEQ ID NO: 186070

SEQ ID NO: 247348 - DNA, 213 bp, Klebsiella pneumoniae; identical to SEQ ID NO: 186071

SEQ ID NO: 247349 - DNA, 174 bp, Klebsiella pneumoniae; identical to SEQ ID NO: 186072

SEQ ID NO: 247350 - DNA, 147 bp, Klebsiella pneumoniae; identical to SEQ ID NO: 128798

SEQ ID NO: 247351 - DNA, 357 bp, Klebsiella pneumoniae; identical to SEQ ID NO: 128799

SEQ ID NO: 247352 - DNA, 336 bp, Klebsiella pneumoniae
atgagaatagttacactcgtaatatctgctgtagctttgatgccgggagttacagtccctaatgcgatagccggttttattgaagacagtaaggccaatctcacactccgcaatttctatattaatacagataatcgcagtggggacgggttcagtaaacaggaagaatggggacaggggttcatcctcaattacgattcaggttatactgaagggccagtgggattcggactgagcactctggggctactgggcatcagacttgacggaggaggtaaagcaggctcaccggcgtcaggtcggcaacccggtacagtatttccgctaaataactga

SEQ ID NO: 247353 - DNA, 438 bp, Klebsiella pneumoniae
atgatgaacaagtgcgcattaatagctttgctaacctccagtttactggtggccggatgttcaacccaggcggtcaggacgagtgctgccgacccagtcccagcttcgagaatactgtcgaccaaatacaatacgccgtcagagaatacgcaaaaaatcatcgtgaaacgagactctggcagtaagggcgcgctttgtaccagccggctttctgttgatggtgagccagttgctgatatcaaaacatctgagaaggttgagttaaacctgccttatggcgagcatattctgtctgtagatctgcagggtatgtctattatgtgcggcaagatgaacaccgaaagagaaatcatggtgtcaaaagataagcaagacgaatatcggatcggggtgacggtgtcggcagagctgttcatcatgaaaacagcctataaataa

SEQ ID NO: 247354 - DNA, 315 bp, Klebsiella pneumoniae
atgacgattaaaatttccggcttagctgctggtggccgcgctcaccctgaaatcaggccgggcgataaatggaaggacagccggggtagcatcgtaattatcgaaagttaccgattcgacagagtgacatattgccgtgaagggtacagctcaccgtgtttttgtacgcccgaaagactggtgcgggagtttgaatttgtttcttccgcgccggttgccggcgagaaagatatcgatcggattatgcgggtacagggcatcgaacgaattcgggttatgcgggaaatcatcagggagcgagggaacagaaaatga

SEQ ID NO: 247355 - DNA, 357 bp, Klebsiella pneumoniae
atgaacaaaaaaatggtctttctggccgcttttatgctaacagcttgtagcgctaactccttacaacatggcgctgagggagtacgtataacacataacgaacctgatgcttcgtgcacctatttaggggacgtgactggtagccagggtaattttttcacgggaggatggacgtcaaatagcaacctcgagacgggggcccgaaatgatctaaaaaataaagcgtggaaaatgggggggaacgtcgtggtactgttaacccaaagagcgggtcagaccggtagcgtctatcatggcacaggttcaagccagcaaacaaacgttacattaagcggcacggtttatcggtgtcggtga

SEQ ID NO: 247356 - DNA, 900 bp, Klebsiella pneumoniae
atggcgattgatatcttccagtctctgaaaaattgcgtttttgacctccagcgtgctgacgttcagaactaccagcagcctctcaaacaactggctcggctattaaaatctgatagtctgcaagcagtgaattcacgcctgacccgtaatattgagctcgatgcctttctggctgggaatgaagacacaaaatccggtatggcgggctctgcagtgctgcactggcctgaagagcccgccgaggtactgggtctgaagttgctgctaatcgagaaaatggcagccgatagccagttttcctttaatttctgtcatacatttttctatgatcgcaggactattgaatctgttcgcaaatttacttcatcgttacttattcccttcgttcgtgattaccagcagtatgttgagaatgaactcgacccggagcctgtagtgcttcgtccggtttccagaaaaatttttattgttcatggtcatgataatgaggcccttcagtcagttgcacgcttcatttctcgcatagggcttgaggaaattattctttctgaacgccctgatggctcaagaactgtgatcgaaaaatttgaagctgagtcaggagatgtcagctttgccatcgtgctgatgacaccagatgacagtgggactgccctggcatctgaaagcacacgacttcgtgctcgccagaatgtcctgtatgaactgggatatttcgcggggaagcttggacgagggaaagtactggtactcatgaagggtgatatagaaatcccttccgatcttgctggcgtgctgtataccgcacttgatgagcatggaggatggaaacgtaagctgctgagcgagcttgcgtacgccaaagttccttttgataaggaaaaagcgcttacagcctga

SEQ ID NO: 247357 - DNA, 291 bp, Klebsiella pneumoniae
atgagcgtcaaaattagaggtataggcaaattgcagcagcagttaaaagaggttgagaaagctacggaagccttaaacggcagttacgacgttcgttttgatgctcacgatcctgtcagcattgagaatgcgattcaggaagcctacaacatggtggacgagcgcgtttctgactatgctactaattctttggtcagaccgttaatcgaacacatgaaagaaaacctgcgccagcaaattctggacagtgcagaacaacaaagacaggagagcgggcaggatggcgattga

SEQ ID NO: 247358 - DNA, 531 bp, Klebsiella pneumoniae
atggaaataactgaagcagatgaaagacatgtctccgcgattcagcacatatacgcctggcatgtatcgcatggcactgccacttttgaaacagagccacccgatgtggcagaaatgaccgcccggcaaaataagatacatgctgccggactcccgtggtttgtcgcgacagagaatggagaggttctgggttattgttacctttcactttaccgtgaaagatgcgcataccggttcactctcgaagattctgtatacatagcccctgcgttacaggggcgagggatcggaacggtgttattgtcacgagcagtgtcctgggcagaggaacatggttttcgccagcttgtcgcggtagtcggtgacagtaaaaatacagcctcacttgcattgcacaagtccgcaggcttcagccatacgggaacacttaaatccgtggggtttaagcacggtcgctggcttgatacagttatactgcaacgcacacttggtttcggtgatgcaacgcttccgcacatatcatctggctga

SEQ ID NO: 247359 - DNA, 723 bp, Klebsiella pneumoniae
atgaacaaattgaatgacagcctgccaaatattatccctgacattttcagcgtgccggacttcacagattaccccgtatccgggatgccagggcatgcaccgcgtattttgatgctgtatggatctgtacgtgaacgttcttacagccgcctggctacggaggaaggcgcacgcctgctcaccgccatgggggctgaagtccgtatttttaatccgtcagggcttcccctgccagatgatgctccggatacccacccgaaagttgccgagctccgtgaactggtgcgatggtcggaaggaatggtgtggtgttcccctgaacgtcatggggcaatgaccgggattatgaaagcacagatagactggatcccactgagcgaaggtgctgttcgcccttctcaggggaaaacgctggcggtgatgcaggtcagtggtggttcccagtcctttaatgcggtaaaccagatgcgtattcttggccgctggatgcggatgatcaccatcccgaatcagtcatcagtcgccaaagcctggcaggaatttgatgaagaaggcagaatgaagccctcagcctattacgacaggatcgtagatgtgatggaagagctgatgaagtttacattgcttacccggggaagaacagccagcctggttgaccgttacagtgaacgtaaggaaagtgcagaagcgctatccaggagggtaaaccagcgcagcatatag

SEQ ID NO: 247360 - DNA, 324 bp, Klebsiella pneumoniae
atggatattgttaaggcggcagatgcgctgaaggaactgggtcatcccacccggctcggcatcttcaaggagctggttaaatttggatatacaggcttgcctgtcggggagttacagaagcgtctcgatatcccggggtcgacgctaagccatcacctgtcggcgctgttgtctgtggggcttatacgccaggaaaggcaggggcgcaccctgtactgccagccacagtatgaacaactgagtcagatcgtcgaatttttactggatgagtgttgcatgggcagcgcagccagtgtttcaacagttacatcaacccgtgagtaa

SEQ ID NO: 247361 - DNA, 1014 bp, Klebsiella pneumoniae
atgtccgcagaactgcaggatgtcgccagcatgtttgccttgctcgccgtcgaactgtcggctttatttttacttatcagtttgctggttggtgtactgcaaaggcatgttccgccggctcgtatcgaggcattgctcagtgccggccgcttcagaagttattttctggcggcgggcctgggggccatcacgccgttttgcagttgctcaaccattccggtgctgaagggactcatccgcgcccgcgccggatttggcccgatgatggtgtttctctttgcatctcctctactgaacccggtcattattgccctgatggctgcgacatttgggttaagcctgacgctgatttatgccggcgccgcgcttctggtatcacttatcgcgggatggttactgcagattctggggtttgataaatacatacgcagcggggtgtatgagggggaggctccctgccagacggttgaacgcggcagtcatgtgggcagtgaactcccctgctgtggcgaacgcctgtccgtaatccgttcccgtcaggctgacatgacggcagctgtaccggagaattgttgtaaaccgcagtctgacgttaatgccttcccccgccgttacggcggcttatggcgtgatacctgggctgacttcagaggtgttttaccctacctgatcgccgggatagctatcggaagtataatttatggttacctgcccacgacgttacttgaacggtatgccggaccggcaaatccttttgccattcctgttgcggcaattattggtgtgcccctttatatccgggctgaagcggttattcctctggcggctgcattactggccaaaggggtgggggccggtacggttctggcccttatcatcggcagtgcaggtgccagcctgacagaactgatcctgttgcgcgcccttttcaggttcaggctagtggcagcattcgtgctggtcattatttcgatggcgataatggcaggctacacagcttatctctttttctga

SEQ ID NO: 247362 - DNA, 498 bp, Klebsiella pneumoniae; identical to SEQ ID NO: 97266

SEQ ID NO: 247363 - DNA, 510 bp, Klebsiella pneumoniae
atgataagtaaaacatacaatgtcctgttcctgtgctccgggaattcggcacgaagcctgtttgcagaagtgctgatgaaccagctcggcgggggaaaattccgggcattcagcgccggtactcaaccagccagttcacctcacccgctgacgctcagggtgcttaatgatcagggattcagtactgaatccctgaaaagcaaacacctgcaaaactttcagcatccggatgcaccgcaaatggatttcatttttacgctctgtgaccagatggcgggagaaggatgtccggtgttcccgggcggccccataacggctcactgggggttcagggatccggcttccgcagagggtaccgataaggagaagtaccacgcctttgtggaggttgaaaaacagatagccacgcgcatccggctttttctgagccttcccctggataaaatcgaccggctttcattacagcatcagctgcaggcaatgggtaataccggatctgacgaacattaa

SEQ ID NO: 247364 - DNA, 429 bp, Klebsiella pneumoniae; identical to SEQ ID NO: 120141

SEQ ID NO: 247365 - DNA, 1290 bp, Klebsiella pneumoniae
atgtggctggctgcagctatttttattctgaccattgtactggtcatctggcaaccccggggactgggaataggctggagcgcgatgctcggggccttacttgcactgattactggtgtggttcaccccggtgatattccgaccgtctggcatatcgtctggaatgcgacagctgcattcattgcggtcatcattatcagtctgttactcgacgaatcagggttctttgaatgggcagccctgcacgtcgcacgctggggaaatggccgtggacgatggctgtttacctggattattttactgggtgctgcggtcgcggcgctgtttgccaacgacggtgcagcgctcatcctgacgcctatcgttatcgccatgttgctcgcactggggttcagtaaaggcaccacgctggcgttcgtcatggcggcaggatttatcgcggactccgccagcctgccgctcatcgtttcgaacctggtgaacattgtctctgcagatttctttaagctcgggttcaatgaatatgcatctgttatggtgccggttgatatcgcagccattattgccaccctggtgatgctgcatctgtatttccggaaagatattcccgcaacctatgaaatttcgcgcctcaaaacgccggaagaggctatccgtgatcggagtaccttccggacaggctggggggttctggctcttttgctgcttggattctttggcctggaacccctggggatccccgtcagtgcggttgccgccgtcggtgctctcgtcctgtttctggtcgccaaaaaaggacatgcgattaataccggaaaggtgcttcgcggagccccctggcagattgtgattttctccctgggtatgtatctggtggtctacgggctgcgtaatgccggactgactgactacctgtcagctgtgcttaatcagtttgccagccaggggttgtgggtggccacgctgggcacgggcttcctgaccgccttcctctcctcgatcatgaataacatgccaaccgtcctggtgggggcactgtctattgatggcagtaccgcgaccggggtgattaaagaggccatgatttacgccaatgttattggcagcgacctggggcccaaaatcaccccgataggcagtctggccaccctgctgtggctacatgtgctggcgcagaaagatatccggatctcctggggatattacttccgggtcggcattgtaatgaccctgcccgtgctgtttgtaacgctggtagccctggtattacgtttatccatttcgttgtga

SEQ ID NO: 247366 - DNA, 1767 bp, Klebsiella pneumoniae
atgaattatctcaacgcgatcccgaaatttctcttttttacagggaaagggggggtcgggaaaacctcgctttcctgcgcaacggctattcaccttgctgatgacggtaaacgcattctgctggtcagtaccgaccccgcgtccaatgtaggccaggttttcgggcagcagattggtaataccctgacgtccatcacggctgtccccggactcaccgcaatggaaatcgatccgcaggcggcagcgcaacagtatcgtgcccgtattgttgatccggtcaagggagtcttgcctgacgaggtggtccgcagcattgaagaacagttatccggtgcctgcacaacagaaattgccgcttttgatgagtttaccggtctgctgaccgatgacgtgttactgaatgattttgaccatgtgatttttgatactgcccctacaggacacaccattcgcctgctacagctgccgggtgcctggagcagttttatcgagacaaatcctgatggtgcatcctgccttggtccgctggccgggctggaaaaacaacgggagcgctacgcgcatgccctgtcggtactggcagacggggaaaagacgcggttaatcctggtggcccgcgcgcaacagtcaacgctggctgaggttgcccgcacgcatgatgaactgttgcatgtcggtctgaagcaccagtacctggtcataaacgggatcatgcctgccggagaagcctcacaggacagtctggccagcgcactgtatcagcgtgaacaacgtattctttcccgcatgccgcaggtgctggcatcgcttccgacggacaggttaagtcttcagcaggaaaatctggttggcgtgacggcgcttcgccgcctgctgacgggaaaaaataagccatgctcactgccagcagtgaaatccgtgtcagagcctctctctgtaccgtccctggaaatgctgattgaggatattgcccgtgacggacatggtctggtgatgttgatgggaaaggggggcgtgggtaaaacaacgctagccgccgcggtagccgtagccctcgcagacaaaggatttgatgtccatctcaccacatcggatcccgctgcgcaccttgaaagcacgcttaacggacaattgcctcatctccaggtcagccgtatcgatccgcataccgagacagcccgctaccgggaacatgttcttgccaccaaaggaaaggatctggacccacagggacgggcgctgctggaggaagatttacgctccccctgcacggaggaaatcgccgtattccaggcattttcccgggtgatccgggaagccgggaagcgttttgtggtcatggataccgcccctaccggccacaccctgttactgctggatgccacgggagcctaccatcgggaagtggttaaacgaatgggtgaaaaagggcattatctgacgccaatgatgcagttacaggatcctgagcgaacaaaaatattgctcgtaacgctgcctgaaaccacccctgttctcgaggctgccggcttacaggaggatttacgcagggccggtattgaaccctgggcatggctcatcaataacagcctggttgcgacagaaacaacatcccccctgttgctcacgagagccgcacacgaagctgctcagatcgataaggtcaggacggagctggcatcacgcatggcgctgatccctctccagcaggaagagccaacaggtactgaacagctcaaacgtcttacccgtcaggctggaaaataa

SEQ ID NO: 247367 - DNA, 366 bp, Klebsiella pneumoniae
atgaaaacactgtcagtgtacgacccggcactttgctgcagttctggcgtgtgtgggacggaagtggaccaggctttagtgtcattttccgcagacgtcacatggctgaaacagcagggtgtgccggtggaacgctttaacctgtcgcagcagcctctggcatttgccgagaatccgtcagtcaaagcctttcttgagcgctccggggctgaaagcctgccgttaattctgctggatggtgaatttgtcctgtccggtcgctacccgacacggcaggatctggctcgctggtttgagattaatcaggagaaaacaggcgtggcaccagagaaaagctgctgtggtggcaaaacgtcatgttgctga

SEQ ID NO: 247368 - DNA, 480 bp, Klebsiella pneumoniae; identical to SEQ ID NO: 120145

SEQ ID NO: 247369 - DNA, 354 bp, Klebsiella pneumoniae
atgaccccgattaccgcgcttcagcttttcaagaatctctcggatgaaacccgcctgaaaattgttctgttactcagggcgtcaggagaactctgtgtttgtgagctttgcggaacgcttgaggaatctcagcccaaaatatcccgccatctctccatgctgcgggaaagtggactgcttattgaccgtcgcgaaggcaaatggatccactaccggctttcagcgcatatgcccgcctgggcggcagccgtcattgagcaggcttatttaagccagaaggaggaaatctcgcttctggccgggcggatagcccgtaacagcgcgacaaccggtggcagagcggtttgtctttaa

SEQ ID NO: 247370 - DNA, 174 bp, Klebsiella pneumoniae
atgcgtatcgaaaacgtcacaggctggttattcatgctgatcccggaacgcgtttttgacgcgttatccgggagcgtatgcgcggaaatagatggtattgcgcaagaccgtctgccggaagagacagagcggaaggccacacgccctgcaacaggacaggagcggcgaaaatga

SEQ ID NO: 247371 - DNA, 543 bp, Klebsiella pneumoniae
atggtgcaaccgacaggctcactgccttgcctgatgaaggcatggaagctgcacgaacacgaactttattgctggttactcagacaaacgcgtaatcaggctgataccgatgatctgatacaggagatcttcctcagggcagtacagcaacagcggaaattctgcgccatcgtgaataccagagcctggttgtttgaagttgcccgccatcttgtcattgataaaaaccgccggcggcgcgcataccagccgctccatgagggtatatgtataccggataacgtcacagaaacagtcgactcactcgccgaatgtctgtcccgaatactggataaaatgacagagtcggatcggactatccttagactctgcgatctggaagggatgaaacaggctgattttgccgaccgaaagggtctcacgcttgctgcaaccaaatcgcgattattacgggccagagcaagattgcatcagaaactctccactgaatgccaggtcagactggacgagtccggtcgggtatgttgttttactccccggtga

SEQ ID NO: 247372 - DNA, 231 bp, Klebsiella pneumoniae
atgaagcatgtaaaagtactgggtacagggtgttccagttgtaaaacaaccatccggcttatccagcaagtagctgatgagcgaggcgtcgctgttcagcttgaaaaagtggagtcactacctgaaataatgaaatacaaagtgatgtcgacaccggcagtggtcattgacaacatcgttgtacacgcaggaggaataccgtcaagagatctgatcgaaagctggctctga

SEQ ID NO: 247373 - DNA, 204 bp, Klebsiella pneumoniae
atgcagaaacatcttatgattgatgaaattcttgcacttgcccggctagccaccctggcatttgagaagcccttaaaatatatggatgacacagatgctgaaatcattgcccgttttaaaaaaacgatgacccctgagcttattgagcagatgtgcatccggatccttgagcttgaagcgaaacgtcagagcgcgaacgaataa

SEQ ID NO: 247374 - DNA, 474 bp, Klebsiella pneumoniae
atgaccgatatttattatcctcatgattgtatccccggccccacgtacgataattatggatttgaaccgactgatcctatgattcgaaccgatagggtgggggggcttgccaggcagcgtagaaaatatacatcagtgccgactgataatacggttgtctggcagtttaaaactgacgcgcaagcacaggcatttgaagcatggtacagggatgtattaactgatggtgttgcatggttttacatgaaatgcaaaacacctgtcggccttaaattttttaaatgccgatttgtaggtatttataaggggcctacctttattaaacccggtctttggcgttattctgcaactgttgagttaagagagcgtccacttgctccagttggctgggggaaatatcctgagtggattgtcgggagttctttactcgatatagctctgaacagggagtggcctaaacatgacagcgattaa

SEQ ID NO: 247375 - DNA, 198 bp, Klebsiella pneumoniae
atgacgatgttgatcgcgagctgcgcgaaaagtttacccgccccggtagtcgttgatacggcctgcagctgggtgagggtcatctacctgaccgaccacgatatcgacgtgctggataagcagaccaagcgcgacattctggcgcacaacatatcggtgcaggctaactgcccgaaccttaaccccactaagggataa

SEQ ID NO: 247376 - DNA, 963 bp, Klebsiella pneumoniae
atgcaaaataaaaccacattaccgcttaccgaaaaatctctctcttttcaaagagataatcctatttatgtctttggccatcgaaaccctgacagcgatgctatctgcagcgcgctggttgtggctgcctggctcaattacaccggtcgtcctgcaacgccctggcgcctgggagatatcaccccggaaacccgttatatcctcaacgcggcgggtgtttcacaacccgatttactcaccgtcgacctgaccgataaaaccgtatggctggttgattttacggatgcggagcaggggccgtcctcgctgatggatagcaacgtcatcggcgttattgaccatcatcgtattggcaccctcattacccgcaatccaccggatgtctgggtccgggcggtaggatgctgcggaaccgtgattctctcgatcctgatgcatgacattccgatgccgctgacggccagtcaagctgtgctgctgatgggggcgatcctcagtgataccgttgggctgaccggccccacaaccaccactcaggatcagaaagccgtggctgttttgcgggaaatcgccggcatcaattatgacctgtttgtggccggactgctgcgggccaaaacagatataacagggcaatccgcgtcgattttactcaatcgtgacgccaaaaactaccggatccatgatgtgccgctgttgttgtcacaaattgaggtacacgacatggctgatattactcccctgttgcctgagctactgcaggaaatggataaaacctgcaaggacagtgcgctggaaatggtgatcctgatggtgacagacattaccagccggaactccgttttgcttttttcagacagcagactgacaggttccagccaggtatcgcttcccggtatgacaagccggaaaaaagaaatcctcccctggctgaccgaacgcttcgcttcttataagaggtga

SEQ ID NO: 247377 - DNA, 429 bp, Klebsiella pneumoniae
atgcaaatttaccggcatgccttgttacttgtacagaatgaaaccgacggcctgctgttgcttgagcaggcagaacgtctggcaaaagagatgggtacccgtattactgtcggccatctcagcgctgactaccgggagctggattacaccagtgattcattaaccaaagatcgtcagtcacgggaagttattgatgcaaaggcaatgctgagccgtctggtggagtccagcagtattgatatcaacgtcaagtccatcgtcagcattcatcgtttccgggacgtcgaagccgttgttcagcaggaaggtattgatctggtcatgctggggcataaaaaccgcctgttcggggttttttcctctttctctttcgaattcatcaatcacctttctgtagatgttctgattaaacacattccagtcccttaa

SEQ ID NO: 247378 - DNA, 261 bp, Klebsiella pneumoniae; identical to SEQ ID NO: 97272

SEQ ID NO: 247379 - DNA, 279 bp, Klebsiella pneumoniae
atggctaagcgcgatttttacccaactggtgcgacatgctggcagggcgggagttgcacacgcagggggatcacacgtcgtcatcgttatgtcactggtggggatggacgaaaattcgaatcgtgcccctacactgacgactggtacgaactcggcgacacgattgacacctttggaaatccataccggtatagaattactggtgagaaggccagagttcttactcagttctgcatagacaatttaaaacatgagaaatctgacaatgacaaaatataa

SEQ ID NO: 247380 - DNA, 243 bp, Klebsiella pneumoniae
atgcccatttttacgcggatcaaacgtgatgatggctggaagcatttagaggagttgcgcggccagttctatgggcagatgtacaaaatcaatcctgaaataattagccggttcctgattaagtctactcctacgatcatatcggttgaaggaacctacttcaaagtacagcagtttgctcaggcagatgtacgcgagtatacgcgtataaatcagcaatcagaaaaagaggccgctcaatga

SEQ ID NO: 247381 - DNA, 300 bp, Klebsiella pneumoniae
atgactctgatgactctgacggtactgatgactctgacggctctgatgactctgacggctctgatgactctgacggctctgatgactctgatgactctgatgactctgatgactctgatgactctgatgactctgacggctctgacggctctgatgactctgacggctctgatgactctgatggctctgatggttctgatggctctgatggctctgatggctctgatggctctgatgaccctgacggctctgacggttctgatggctctgatgactctgacgtctctgatggttctgtaa

SEQ ID NO: 247382 - DNA, 375 bp, Klebsiella pneumoniae; identical to SEQ ID NO: 23508

SEQ ID NO: 247383 - DNA, 906 bp, Klebsiella pneumoniae
atgcaggatctcaatgacttcgcctggtttgtccaggtggtagaccatggcggtttcgccgcggcggggcgagcgcttgaccagccgaaatccaaactcagccgtcgcattgcgcaactcgaggagcggttgggcgtgcgtttgattcagcgaaccacccgtcagttcgcggtcaccgaggtcgggcagaccttttatcagcattgcaaagcgatgctgattgaggccgaggcggcgcagcaggcggtcgagacgctgcgcgccgagccgcgcggtagcgtcaggatcacctgtccggtcaccttgctgcatgtccatatcggaccaatgctggcgcgatttatggcgcgctatcctggggtaacgctgcatcttgaggcgaccaaccgccgggtggatgtggtcggggagggcattgatgtggcgatccgcgtccgtccccggcccatcgaggatagcgacctggtgatgcgtgtgctggcggaccgcgggcaccggctggtggccagcccggatctcattttccggctcggacgtccgcaggcgccgtccgagctgagcgcctggccgggcctcagcctgggtgcgaacaagcatcagcataaatggcagctcaccgggcccgggggagcgagagcggaagtgtatttcacgcctcgaatggtgaccaccgatatgctggcgctgcgcgaggcggcgatggccggcgtaggcgtggtgcagcttcctttattaatggtgcgcgatcagctggcgtcaggggaattagaggtggttctggacgagtggcagccgcggcgggaagtgatccatgcggtatttgcctcacggcgcgggctgctgccctccgtcagggcgctggtggactacctcagcgaagagtatcagcggatggaggaagattga

SEQ ID NO: 247384 - DNA, 729 bp, Klebsiella pneumoniae
atgcagaatgctaacaggaatgaatgggttgattacgccaaaggttttgggatagtacttgtagtctatggacatatttcaagaggtttatataattccggaataataagcgatactaaatggtttcattttatcgattctttaatatattcctttcatatgccgttgttcttcttcctttctgggcttttcttaatgaaaagtctgcaagttcgcggtcttccatactttatttttaataaagtagatactatactttatccttatcttatttggagtgttatacaaggcctgactgaattcttactgtcaaaatatactaacggaaatgtaagactttctgatgtttttgagttactttggcatcccagagctcaattttggtttttatattctctttttttaaattttatattgatctctttaatattgagtttaaaagaaaaactgaaaataaatacaactattgttattgctttttcttttctttttgcaatttttatttatctggctttttcaaatatccttgatacaaatccccttaattatattgtgcacaactctgtgtttatactatcgggaattgttttctcttactatagattagatataaaaatacaaaacaatattgttttttttgcgactggttttatagtgccttttatttttcaagctatatatactgtctcttatacacatctgacgctgccgacgatctactctgtgtag

SEQ ID NO: 247385 - DNA, 336 bp, Klebsiella pneumoniae
gtgaccaatgtgaaatatatccagcgaggtatcgatgaaaacctggccaatgccgcattgatcaaactgaaccagataggcaccctgagtgaaaccatcgaagccgtccagttgtgtcaggataacaactggggaacctttatttcgcaccggagcggggaaaccgtggacagcttcattgcagatatgaccgtcggcctgcgggctggtcacctgaaaaccggtgcacccagccgtggggagcgcattgagaaatacaatcaactgatgcgtattgaagatgaattaggtgatgccgccatctttgccggtaaagccgccttcaaaaaacgctga

SEQ ID NO: 247386 - DNA, 399 bp, Klebsiella pneumoniae
atgaataagcaactaatcagagctattaataaagctcaccatatgcctatggctaaagaaaacttcttaggcctagtaattatgttgattctttcaaaagatgtttttagatcaaatttcgatgttgccgaatttattaacaaaacattcaaaatatcttttttgaaatatgctgtaagatcaagaactttgatgtgcgctaaaatttgcaggcatatcaatgaattaagtgaaaatgacgtaaaaatgacatatatgcatttcttaaataacattaatacattagtcattaagcttgatgatgaaattaaatcaagccaaaaatctacatctaaaaataagcatgccataaggaatttaaatatatggattgatgcaaacaaaaaggataaagaataa

SEQ ID NO: 247387 - DNA, 1389 bp, Klebsiella pneumoniae
atgagtcaatcttccctcccggagaaggctaaccgctcggtcataaccgactggcggcctgaagatcctgaattctggcaacagcgcggccatcgtgtggcaagccgcaatttatggatctccgttccctgtctgttactggcgttttgcgtttggatgttgttcagcgcggttgccgttaacctcaacaaagtaggctttcagtttacaaccgatcagctgtttatgctgaccgcgctgccggcgctgtcaggcgccctattacgcgtgccttacgcctttatggtgccgctgttcggcggccgtcgctggacggcgttcagcaccgggatcatgattgtgccgtgcgtctggctgggcttcgcggtccaggatacctctacgccgtttagcatcttcgtgattatctctctgctgtgcggcttcgccggagccaactttgcctccagtatggccaacatcagcttcttcttcccgaaagcgaagcagggcggggcgctcggcgttaacggcggcctcggcaatatgggcgtcagcgtgatgcagctggtcgcgccgctggtggtctcgatctctatctttgccgtttttggcggtaacggtagcaagcaaccggacggctcgatgctgtatctggaaaacgccgcgtggatctgggtgcctttcctgattattttcactctggcggcgtggttctttatgaacgacctgtcggcttcgaaagcgtcgctgagcgagcagttgccggtacttaagcgcctgcatctgtggattatggcgctgctctatctcgcgaccttcggctcctttatcggcttttccgccgggttcgcgatgctgtcaaaaactcagttcccggatgtgcagatcctgcattacgccttcttcggcccgttcattggcgcgctggcgcgttcgatgggcggggcgatctccgaccgcctcggtgggacccgcgtaacgctggtcaactttgtgatgatggctgtcttctgcgcgctgctgttcctgaccctgccgaccaacggccagggcggtaactttatcgccttcttcgcggtgtttatggtgctgttcctgaccgccgggctggggagcgcctccaccttccagatgatctccgtgatcttccgtaagctgactatggaccgcgtgaaggcccagggcggcagcgaagcgcaggcgatgcgcgaggcggcgaccgataccgcggcggcgctgggctttatctccgccattggcgctatcggcggcttctttattccgaaagcgttcggtatctcgctggatctgaccggctcgccggccggggcgatgaaagtgttcctcgtgttctatattgcctgcgtggtgatcacctgggcggtatacggtcgtaagcgtcagtaa

SEQ ID NO: 247388 - DNA, 1779 bp, Klebsiella pneumoniae
atgttaaaacgtctttttaccccgctgacgctggtcaatcaactggcgttaatcgtgctgctcgccacgattattggcgtcgccggcatggcgatctccgcgcgcctggtgaacggcgtgcagggcagcgcgcacgccattaacaaggccggttcattgcgtatgcaaagctaccggctgctggcggcgatcccgctgaatgaaaacgatcaaaaactggtggcggacatgaccgccaccgtcttcagcccggagctgcaaaattccgcccgccgcgacggccaggaaatccagcttaaagccctgcagcagtactggcagctggcgctggcccccgggatgcagcgcgcagtcaatcaggcggaagtggcccaggatgtcgccgactttgtcgatcgtatcgaccagttggtcaccgcattcgaccacaccaccgagcagcgtatcgaacgggtggtctggatccatcgcatcctcgccattggtatggcgctgctgctgatcttcactatcatctggctacgcgcccgcctgctgcggccgtggaaacagctgctgagcatggcgcgcgcggtgagtcagcgtgatttcacccagcgggcgcacatcagcggccgcaacgaaatggcgaccctgggcatggcgctgaataacatgtcggaagagctggcggaaagctatgccgtgctcgagcggcgggtgcaggagaagactgccggactggagcagaagaacgagatcctcgctttcttatggcaggccaaccgccggctgcactccagcgccccgctctgcgaacgtatttcgccggtactgaatggcctgcaggggctgacgctgctgcgcgatatcgaggtacgggtttacgacctggaagacgaagataatcaccaggagtttacctgccactcggatgatgactgtgatgataaaggctgctacctctgtccacgcaatctgccgccgctgccggatggcggaacaacgctgaagtggcggctgtcagatgcgcatagtcagtacggcatcctgctggcgacgctgccggttggccgccatctcagccacgatcagcagcagctggtggataccctggtggaacagctgaccagcaccctggcgctggaccgccatcaggagaagcagcagcagctgatcgtcatggaagaacgggccactatcgcccgcgagctgcacgactccatcgcccagtcgctatcctgtatgaagatgcaggttagctgtctgcagatgcaaggcgacgccttgccgacggaaagccgccagctgctggggcagatccgtaacgaactgaatacctcgtgggcccagctgcgggagctgttaaccaccttccgcctgcagttgaccgagccggggctgcgcccggcgctggaggccagctgtcaggagtacagcgcccacttcggctttacggtgcagcttgattaccagctcccgccgcgctttgtgccctcgcatcaggcgatccacctgctgcagatcgctcgcgaagcgttgagcaacgctctgaagcatgccagcgcgaccgaagtgaccgtgacggtgtcacaacgcgataatcaggttcgtctggtggtagcggataacggccgcggcgtaccggaccacgccgaacggagtaaccattacggtttaattattatgcgggatcgcgcccagagcttgcgcggtgactgtcaggtacgacgccgggaaaccggtggaaccgaagtgatcgtcacgtttatcccggaaaaaacgttttccatccaataa

SEQ ID NO: 247389 - DNA, 1383 bp, Klebsiella pneumoniae
atgcctgtgtcgttccgtttgttgccaacgttgacctttctcctgctgttgccgggcgttcccgtctgggcgctgaccgccagcgacaccacccgccctgcgcaagcgcaagatccgctgcccgatatggggattgctccccaggttgatgacgacgcccggcactttgccgaagtggcgaagaagtttggcgaggccagcatgagcgacaatggtctgacggcgggtgaacaggcgcagctgtttgccatcagtaaaatcggcaatgaagtgagtcatcagctggagagttggctctcgccgtggggcaacgccaatgtcgacctgctggtcaataaagaggggaaattcaccggcagtaaagggagctggttcgtgccgttgcaggataacgaccgttatctgacgtggaaccagtactcggtgacccggcgcgagcacgatctggtgggcaacatcgggcttggccagcgttggcgggtcggcggttggctgctgggctataactcgttttacgataaagtgctgagcgaaagcctggcgcgcggcagcgttggcgccgaagcgtggggagaatatctccgcctgtcggcaaactattaccatccgctgggcgactggcagctacgcgataatcagactcaggagcagcggatggccgcagggtatgacgtcaccgcccaggcgcggctgccgttttaccagcacatcaacaccagcgtcagcgtcgaacagtatttcggcgatagcgtcgatctgtttcactccggcaccggctaccataatccggtggccgtctccgttgggctcaattacaccccggtcccgctggtcacggtgaccgctaagcataagcagggggaaaatggcgtcagccagaacaatgtgggcctgaagctaaactaccgctttggcgtaccccttaagcagcagcttgcggcagacgaggtggcgatcagcaactcgctgcgcgggagccgcttcgatagtccggagcgggataatctgccggtggtggagtatcgtcagcgcaaaaatctgacggtctatctggccacgccgccctgggatctgcagtccggggagacggtgcagttgaagctgcagatccatagtctgcatggcatcaaggcgctgcactggcagggagacacccgggccctcagcctgacgccgccggtagatgccagcagccccgatggctggagcatcattatgccggtgtggaacagtgaaccgggcgccgcgaaccgctggcgcctgtcggtggtggtggaggataaacaggggcagcgcgtctcctccaatgagatcgccctggcgctgaccgagccgctggtcaagtttaccacgccaggcgtctcctggacggactcgccttag

SEQ ID NO: 247390 - DNA, 2601 bp, Klebsiella pneumoniae
atgaagaccatccgaacgacctgcccctactgcggcgtaggctgcggggtgctggcgagcgtggacgacgcggggcaggtgagcgtgcgcggcgacgatcagcacccggcgaacctcggccgtctgtgcgtcaaaggggccgccttaggggagaccacgggcctggcggggcggctgctgacgccggaggtcgacggccagcaggtagcctggcctcaggcgctggcggaaaccgctgcgcgcctgagacagatcatcgaccagcacggaccgcaagcggtggccttttacgcctccggccagctgttaaccgaggattactatgccgccaataagctgatgaaagggtttatcggcgcggcgaacatcgataccaattcacggctgtgcatgtcgtcagcggtcactggctacaagcgggcctttggcgccgacgtggtgccctgcagctacgatgatgtggaaaacagcgatctggtggtgctggtcggctcgaacgccgcctgggcgcatccggtgctgttccagcggctggcgcaggcgaagcgggataatccccgattgcggatcgtggcgatcgacccccgacgcaccgctacctgcgagatcgccgaccgccatctggcgctggccccgggaagcgacggcgggttgtttgcggggctgcttaacgccctggctgaggcaggagcctgcgtcgatggctttcacgacggcccgcaggcgctggccgccgcccgcggctgggacgtggcgagggtggcgtccttttgcggtctgcctgccgatgaggtggcgggattctatcgcgagttcatcgccgccccgcgggcgatcaccctctacaccatgggaatcaatcaatccgccagcggcagcgacaaatgtaacgccatcatcaacgtccatctggccagcgggaagtatggccgccgcggctgcggccccttttcgctgaccggtcaacccaacgccatgggcggccgcgaagtcggcgggctggcgacgatgctggcggcgcacatggattttgtgccagacgatctgcagcggctggcccgcttctgggggacggaacggctggcgcagacccccgggctgaccgccgtggagctgtttgccgccattggccgcggcgaggtcaaagcggtctggatcatgggtaccaacccggtggtgtcgctccctgacagccacgcggtgagccaggcgctggccgcctgtccgctggtgatcgtctcagatgtcgccgcccagaccgataccggacgtttcgcccacatccgctttccagcgctggcctggggcgagaagaatggcacggtcaccaactcggagcggcggatatcccgtcagcgcagctttctgccgccgccgggggaggcgaaagcggactggtggatcatcgccagagtgggccaggcgctggggtatcgcgaggcgtttgcctggcagcatccgcatgacgtcttccgcgagcatgcggcgctgtccggtttcgaaaacgacggccagcgggcgtttgatatcggcgcgctggcggatctcagccgtgaggcgtgggacgccatgccgccggtgcgctggccggtcagccgcagcgaggtcgcctgggatatcacgcgcggctggcatggcgatggcaggctgcggatggtgccggtgacgcctcaaccgacccgggcgacaaccgatgccttttatccgctgatcctcaacagcgggcggatccgcgatcagtggcacaccatgacccgtaccggcgcagtgccgcggctgatgcagcatatcgcggagccaatggtggaggtggcgccgcaggatgccgttcgctatcagcttcccgctgacgggctggcgcggatctggtcgcggcatggggtgatggtggcgaaagtggcgatcagcgaagggcagcgccccggctcgctgtttgttccgatgcactggaacaaccagtttgcccgtcaggggcgggtgaataacctgctggccgccgtcacggacccgtattccggccagccggaaagtaaacaggcggcggtggcgatcgccgcctggcaaccggcctggcacagcgagcttttttgccgcgaaccgctaccatttcctgcggcctggcattggcggcggcgggcggcgccaggcgtgctgcactactcgctggccggggaggcatctgcccgacagtggctcagcgcgtggtgcgcccggcgcggctggcagttacaggtggctgacggcggcgcggtgtggaacctgctggcctggcatcagggaaggctgatgctcggctggtggagcgatgcgcgcgagccggcggtggattgcgcatggataagcgctgcctttgccgcgccgccgtccgatgctgtccaacgacatgccttgcttagcggccgaccgggcgccgccgtcgcgccgcgggggcggatcgtctgcagctgctttggggtgggggaatggtcaattaacgaggccatcgccagcggctgcgccagcgtcggggcgctgggtgggaagctgaaatgcgggaccaactgcggctcttgcgtgccggagctcaacgcgctgctggcggcgcaacgaacccgggcgtaa

SEQ ID NO: 247391 - DNA, 4068 bp, Klebsiella pneumoniae
atgacgcggcgactggtggtgatcggtaacggcatggcggccacccggctggtgcagcggctggttgagcgcgaccccgcgcggtttgccattaccgtcgtcggcgacgagccgcacccggcctataaccgcattcagctctcgccgctgctggcaggtgaaaaaacggcggcgcagatcccgttgctgccggcggagtggtacacccggcacggggtgtgcctgcggtctggcgaggcggtcgatgaagtcgatattcagcaacggcggctgcgcatcgcggaaacctggctgccgtgggatgaactggtgttcgccaccggttcgcggccctttatcccgccgctgccgggcattgatcgtccgcaggttatgcccttccgcaccctggcggacgtggaacgtattctggcgatacccggcccggcggtggtgattggcggcggggtgctgggggtggaagcggcggcggcgctgcgtcgtcacggcggagaggtcactcttctgcatcgcggcagcggattaatggcgccgctgaccgacgcttttgccgccgatgagctcaggcagcagcttgaagcgcgcggcattcgctgcgtgctggcgtgccgcatcgccgccatcgacgccgatggcgtgcggctggcggacgggcgcgtattccgcgccgccagagtggtgctggctaccggcgtgcagcccgacagccgtctggcggcgcagtccggcgtgctgtgccagcgggggatcgtggtcgaccgtcagatggcctcctcgctgccggggatcagcgccatcggcgaatgttgcgaaattgacggccagacctgggggctggtggctccctgcctgcgtcaggccgaggtgctggcggatcgcctgtgcggcgcccccggcgagggctttgtctggcaggacgccgggacccgcctgaaggtcaccggcattgaactcttttgcgctggcgagcagcaggccggcgaacaggatgacatttataccagctgggaccccatcgaccgccactatcgccgcctgctgctgcgcgatggccgcctgcgcggcgtgctgctgatgggcgactgcaccgccgccgccgcgctcaccgcgcgcctggaaagcgatgagcctgccaccgtggactggctttttgacccctcttcaacgcagccgcaggctgcaggaataatgacgatgacgaaacctgtattagtgctggtgggacatggcatggtcggccaccattttctcgagcaatgcgtgagccgcaatctgcatcagcaatatcgaatcgtggtgtttggcgaagagcgttatcccgcctacgaccgggtacacctctccgagtattttgccggacgcagcgccgagtcgctgtcgctggcggccggggacttctttattgaacatggtattgaactccgcctcggcgaggcggtggcgaccatcgaccgcgacgcacggctggtacgggacgccgaggggcatgaaatccactgggataaactggtgctggcgaccggctcgtatccctttgttccgccaatccccggtaacgatctcgcggggtgctttgtctaccgcactcttgacgatctcgaccgtatcgccgcccatgccgccgcggcgaagagcggggtggttatcggcggcgggctgctcgggctggaggcggccaacgccctgaaacagctggggctggagacgcaggtggtggagtttgccccgaacctgatggccgtccagctggataacggcggggcggcgatgctccgggagaagatcgtcgccctcggcgtgggggtgcataccagcaaagcgaccaccgccatcgtgcgcgaggccgacggcctgcggctgaactttgccgacggcggcgcgttgcggaccgacatggtggtcttctcggcggggatccgcccgcaggacgcgctggcccgcgactgcgcgctgcaggtgggcgaacgcgggggaattcacatcgacggccagtgccgtacctctgacccggacgtgctggcgataggcgaatgcgccctgtgggacaataaaatttacggtctggtggcgccgggctatcagatggcgcgcatcgccgcggccactctcgcaggagaggacgcctgctttagcggcgccgacatgagcaccaaactgaagctgctgggagtcgacgtggcctcgtttggcgatgcgcaggggcgcacgccgggctgtcagagctatcaatggaccgacggtccgcagcagatttacaaaaaaatcgtcgtcagtcaggacggcaaagccttgcttggcggcgtgctggtgggggatgccagcgactatgccacgctgctgcagatgatgctgaacggcatggcgctgccgccgcgtccggagagtctgatcctgcccgcgctggagggagccgcgccgaaggcgctcggcgtcgcggcgctgccggacagcgcgccgatctgctcctgccataacgtcagcaaaggcgatatctgtcaggcggtgaacaatggggcgggggatatgtcggcgataaaaagctgcaccagagcggctaccggctgcggcggctgcagcgcgctggtgaaacaggtgatggagtatcagctggcggagcagggcgtcgaagtgaaaaaagacgtctgcgaacatttcccgtggtcgcgccaggagatctaccacctggtgcgggttaaccatatccataccttcgagcagttgattagccgctacggccaggggcacggctgcgatgtctgcaaaccgctggtggcctcggtgctggcctcctgctggaacgagtacctgctgaagccggcgcacctgccgctgcaggataccaacgaccgctatttcgccaatatccagaaggacgggagctattcggtggtgccgcggatggcggcaggggaagtgacgccggacggactgatcgccatcgggcagatcgccaaacgttaccagctctacagcaaagtgaccggcggccagcgcatcgacctgtttggcgcgcggctggaacagctgccggctatctggcgcgagctggccgacgccgggtttgaaaccggccacgcctacggcaagtcgctgcgcacggtgaaatcctgcgtcggctcaacctggtgtcgctacggcgtgcaagactccaccgggctcgcggtacggctcgagcatcgctataaagggctacgcgccccgcacaaaatcaagatggcggtctccggctgcacccgcgaatgcgctgaagcccaggggaaagatatcggggtgattgccaccgacaaaggctggaatctgtacgtctgcggcaacggcgggatgaaaccgcgtcacgccgacctgtttgccagcgatctcgacgaagcgacgctgatccgcagcatcgatcgtctgctgatgttctatatccgtaccgccgatcgcctgcagcgaaccagcacctggatggataacctggagggcggcgtcacctatctgcggcaggtggtgctggaggatagtcttggcattggcgaggagctggagcaggagatggcccggatcgtcgacagctaccagtgcgagtggcagaccaccctcaacgatccgcagcgtctggcgctgttccgctccttcgttaatagcgaccagcccgacgaggctgtgcagcgccgcgatctgcgcggtcagccgcagccgctgctgactgagacgttgcccgaaggcgaactcccatcccgaccgtggcaggcggtatgcgaccttgacgccattccggcgcaggcggggatcggcgcccgcttaggggagcggcagattgccctgttccgcttcggcgagcgggtctacgccctcgacaaccgcgagccgggcagcgcggccaacgtgctgtcgcgtgggctgttaggggacgtcggcggcgagccggtggtgatctccccgctgtacaaacagcggatacgcctgcgcgacggctggccgtgcgacggcagtgaacaggcggtacgcgcctggccggtgaaagtggaaaacggcaaagtgtgggtgggcaaccagcagctgctggcccgcgcggaggcctcctga

SEQ ID NO: 247392 - DNA, 789 bp, Klebsiella pneumoniae
atgaaaccattaattcaggtgcaggccgtcagccaacgcttcaacaccgccagcggcgagttcctggcgctgcagaatgtctccttcgatatcgtcgaaggggagaccattagcctgatcggccactcgggttgcggaaaatcgaccctgctgaacctgatcgccgggatcaccacccctaccgagggcggactactgtgtgataaccgggaaatcgccggtcccgggccggagcgggcggtggttttccagaaccactcgctgctgccgtggctgagctgtttcgacaatgtggcgctggcggtggatcaggtgttccgtcgcaccatgagcaagagtgagcgccgggagtggatcgaacacaacctggcgcgcgtacagatgggtcatgcgctgcacaaacgtcccggggagatctccggcggcatgaagcagcgggtgggtatcgcccgggcgctggcgatgaagccgaaagtgctgctgcttgatgagcccttcggcgccctggacgcgctgacccgcgcccacctccaggacacggtgatgcatatccagcaggagctcaataccaccatcgtcatgatcacccacgacgttgatgaagcggtgctgctctcggatcgggtgctgatgatgaccaacggtccggcggcgacggtcggcgagatcctctcggtcgatctgccgcgtccgcgccaccgcgttcagctggcggacgacagccggtatcaccatctgcgccagcagatcctccatttcctgtatgaaaaacagccgaaagcggcgtaa

SEQ ID NO: 247393 - DNA, 885 bp, Klebsiella pneumoniae
atgaagcaggcacaacgtaagcaaccggtcgtcagcgtggacaacgcgcctggcgaagtgattatcctgccgccggtgcaggtccggcgcaccacgccgaccgtcacgcgctggctgcgtgagctcacccagcgcctgctgcccccgctgttggggctgggtgtgctgctgctggcctggcagctggcggcgatgcatagcaaaggctttcccacgccgctgagcacgctggactcggcgctgaccctgtttgccgatccgttctatcaggacgggcccaatgacatgggcatcggctggaacgtgctggcctccctgcagcgcgtggcggtgggcttcggcctggcggcgctggcgggcattccgctggggtttttgatcggccgttcgctgttcttcgcccgcatgtttaatccgctgattgctctgctgcgcccggtcagcccgctggcctggctgccgattggcctgctgctgttccagaaggcggagccggcttccagctggaccatttttatctgctccatctggccgatggtgatcaacaccgcggagggtgtgcggcggatcccgcaggactatctcaacgtcgcccgcgtcctccagctctcggagtggacggtgatgcgcaaaatcctctttccggcggtgctgccggcggtgcttaccggcgtgcgcctctccatcggcatcgcctggctggtgatcgtggcggcggaaatgcttaccggcgggctggggatcggcttctggatctggaacgagtggaacaacctcaatgtggaaaacatcatcatcgccatcgtcattatcggcgtcgtcggcctgctgctggagcagggcctgatgctgctcgctcgccgctttagctggcaggaaaaataa

SEQ ID NO: 247394 - DNA, 1257 bp, Klebsiella pneumoniae
atgggcgacaaattttcaatttcccggcggcgcttgctgcaggcaggggccgcgctgggcggcgcgatgctgctgccgggcgtgatgcaggccgcctgggccggcggctcggacaaaccggagcaaacccgcgtgcgggtcggatttattccgctgaccgattgcgcgccgctggccatcgccgcggcgaaggggtttgaccaaaaatatggcatcaccctggtggcgagtaaggaagccagctgggcggcggtgcgcgacaagctggtggccggcgagctcgacgcggcgcatattctctatggcctgctgtacggcctcgaactggggatcgccagcaagccgcaggcgatggccaatttgatgaccctcaaccgcaatgggcaggcgattaccctctccagcgagctgcaggagaaaggggtgaccgacctcggcgggctgaagcggctgatcgaccgcagcgcgccgggcagttacaccttcgcccatacctttcctaccggcacccatgccatgtggctttactactggctggcgagcgccggcatcgatcccttcaacgatgtgcgcaccgtcgtggtgccgccgccgcagatggtgatgaacatgcgcatcggcaatatgagcggcttttgcgtcggcgagccgtggaacgcccgcgccattaacgaccgtatcggcttcaccgcggccacttcccaggatatctggcccgagcatccggaaaaggtgctgggcacccgtcgcgactgggtggaacgcaacccgaacaccgcccgcgcgctggtggcggccctgatggaggcgcagcgctggatcgccgcctcgccggagaacacccgggagacggcccgcctgctcgccagacgcggctggctcaataccaaggagcaatacctcaccggccggatgcttggagagtatgacaacggccttggccgccgctggcaggatgcccatccgatgcgcttctgggccgggggcgaggtgagtttcccgtggctgtcggacgggatgtggttcctcacccagttccgccgctgggggttgctgaagcaggctccggattacctcgcggtggcgtcgcgcattaaccgcatcgatgtctggcaggctgccgcccaggcggtaggagggatcagcgcgccggcagccaggatgcgcagcagcacactaatggacgggacggtctggaacgggtccgacccggaaggctacgcccgccatttctctattcaacgtaagggggcatga

SEQ ID NO: 247395 - DNA, 1182 bp, Klebsiella pneumoniae
atgaataatacgactggtcatgcgcacgatgcgacggcctggctgcagctggcgcgtcgcctgcaaaaacaacagcttcagcagcttagccaactgggggaactggccagccagctcagcgcgctggtgcatatgctgcagtgtgagcgcggggcgtcgaatatctatctttgctcgggcggcttgctgtatacagcggagtgtcgggcgggaggggcgctggttgacgagcggctagccctgttttatgccagcctcgaacgggcgcgcgcggtagccggcagcgcgctgtgctggcgtatcgccagagcggttgacgagctggcgcagctcccggcgctacgcgcgcagatcggccgccggcaaattgccgctgaagccgcgacggagcagttcagccgcgtcatccgccatctgctgaacatcgccccgcagctcaatgacagcattgacgatccgccggtggctggtcggatggtcgccctgtacagctttatgcagggaaaagagctggtgggccaggagcgcgcgctgggagcattgggctttacccgcggcgagttcagcgacagcctgcgccagcagctggtggaccgtattgacggtcagcagccctgcttcgacagctttcaggcgctgggcagcccggcgaccgtccagttgttcagaacccagtgccacgccggtctggatattgaacagctgcggcggatcgcctgtacccgccagccggctgccgacggcggggaaacggcgctgcgctggtttggcctgcaaacccaacggcttgagcaactgcgcgaagtggaagagcaactgatcgacgatctgctggatgccaccgacgcgctgttagcagacgacgcgcctggctggcaggccggagaggaggacgatagcgtgacgccacgactcgataaacagctactgccgctggtgcgccagcaggcctatgagctgcagcagctctccagccagctggcctcgctgaaagacgcgctcgaagagcgcaagctgatcgaaaaagcgaaaagtctgctgatgacgcaccagggaatgcaggaggagcaggcctggcagacgctgcgcaagatggccatggacaaaaatcagcgtatggttgagatagcccgcgcgctgctgatggtgaaggcgatttggccgctaacaccaaaggagtag

SEQ ID NO: 247396 - DNA, 354 bp, Klebsiella pneumoniae; identical to SEQ ID NO: 138919

SEQ ID NO: 247397 - DNA, 243 bp, Klebsiella pneumoniae
atggcgatggttaaagcaagtttgacgttatttggtggtgacacgctggtggtgcggtgctcagagcgctgccatattcatctgatgagcgcgaaggtcccgggcgacagtcatgcggatattctgagcgtgcaggatcgggacagcgcctatctgacagtgccctacagcggcacctggaacgtgcttatcgacagtcacagccagtcgctggagcactccatcagctacgtgccggcctga

SEQ ID NO: 247398 - DNA, 681 bp, Klebsiella pneumoniae
gtgttaactcgtgatttcttaatgaatgcggattgtaagacagcgtttggcgctattgaggaatcgctactctggtcggcagaacaacgtgcagcctcgctggcggcgacgctggcctgccgcccggatgatggctcagtatggatctttggctacggttcgcttatctggaacccggcgctcaattatcgcgagtcctgcaccggcacgctgccgggctggcaccgcgcgttttgcctgcggttgaccgccgggcgcggtagtgcctgccagccgggacgcatgctggctctcaaagagggcggccgaaccaccggcgtcgcctatcgtctgcctgacgacacgctggaggaggagctgaccctgctgtggaagcgggagatgatcaccggctgctatctgcccacctggtgcaagctggagctggacgacggacggacggtgaatgccctggtgtttattatggatccgcgccatccactgtttgaaccggataccagtgctcaggttatcgccccgctgatcgcccgggccagcgggccgctcggcaccaacgcccagtatctgttttcgcttgagcaggcgctgcgcaagctgggcatgcacgatgccagtctcgatgacctggtggccagcgtccgcgcgctgttgggcgagagtccgacgccgggcctggcctga

SEQ ID NO: 247399 - DNA, 231 bp, Klebsiella pneumoniae; identical to SEQ ID NO: 138916

SEQ ID NO: 247400 - DNA, 1101 bp, Klebsiella pneumoniae
atgacccatgcacatgaggcggtaaaaacccgccataaggagtcttccctcgtctttccggtgctggcgctggcggtgctgtttttctggggcagcagccagtcactgccagtggttatcgcgatcaatatcctcgcgctggtcggcattttgagcagcgccttcagcgtggtccgccacgccgacgtcctcgcccaccgcctgggcgaaccctatggctccctgattttaagcctgtcggtggttatccttgaggtcagtttgatctctgccttaatggccaccggcgacgccgcgccgaccttgatgcgggataccctctactccattattatgatcgtcaccggcggtctggtcggtttctctctgctgctgggcgggcgtaaattcgccacccaatatatgaatctgttcggcattaagcagtatcttatcgccctgtttccgctagcgattatcgtgctggtctttccgatggcgctgccgggcgcgaacttcagcaccgggcaatcgctgctggtggcggtaatttcggcggccatgtacggcgttttcctgcttattcagaccaaaacccatcagagcctgtttgtttatgagcatgaagacgacagcgacgatgacgacccgcaccacggtaaaccgtccgcccatagcagcgggtggcataccgcctggctgctggtgcacctggtggcagtgatcgcggttaccaaaatgaacgctaacccgctggaaacgctgttgaccagcatgaatgccccggtggcctttaccggcttcctggtggctctgctgatcctgtcgccggaaggccttggcgccctgaaagcggtgctcaacaatcaggtacagcgggcgatgaatctgtttttcggctctgtgctggccaccatctcgctgacggtcccggtggtcaccctcatcgccttcctgaccggcaatgagctgcgctttggccttggcgccccggagatggtggtgatggtcgcctcgctggtgctgtgccatatctccttctccaccggacgcaccaatgtgctgaacggcgcggcccacatggcgctgttcgccgcctatctgatgaccattttcgcctga

SEQ ID NO: 247401 - DNA, 855 bp, Klebsiella pneumoniae
atgaaacaaaaagtggttagcattggtgatatcaacgtagcgaacgacctgccgttcgtgctgttcggcgggatgaacgtgctggagtcgcgcgacctggcgatgcgtatctgcgaacattatgtcaccgttacgcagaagcttggtattccctacgtcttcaaagcctcctttgataaagccaaccgttcctccatccactcctatcgtgggccgggtctggaagaagggatgaagattttccaggagctgaagcagacctttggcgtgaaaatcatcaccgacgttcatgaagccagccaggcgcagccggtagctgacgtggtggacgtgatccagcttccggctttcctcgcgcgccagactgacctagtggaagcgatggcgaagaccggggcggtgatcaacgtcaagaagccgcagttcgtcagcccgggtcagatgggcaacatcgtcgataagtttatcgaagggggtaacgacaaagtaatcctctgcgaccgcggcgctaacttcggttacgacaacctggtcgtggatatgctcggcttcggcgtgatgaagaaagcctccaacaactcgccggtcattttcgacgtcacccacgcgctgcagtgccgcgacccgtttggcgcagcctccggcggtcgtcgtgcgcaggtgagcgagctggcccgcgccggtatggcggtaggtatcgccggtctgtttattgaagcgcatccggatccggaccacgcgaaatgcgacggcccgtccgcgctgccgctggataaactggagccgttcctcaaacagatgaaagcgattgacgatctggtgaaaagcttcgacgagctggataccagcaagtaa

SEQ ID NO: 247402 - DNA, 813 bp, Klebsiella pneumoniae
atggggtcattagcggatttcgaatttaacaaagcgccattgtgtgatggcatggtcctcatttctgaacaggtccgcgacgattttccgtcgcgttttgtcgaggaagagctgcagcgattgctgcgcctcgcgcaggaggagattgcgccgtcgtgggaccaggagcgccagatagaacgattgctggagctgttttacgacgagtggggctttggcgcctcgcagggcgtgtatcgtctttccgacgcgctatggctggataaagtgctggttaaccgccaggggagcgcggtgtcgttaggcgcgatcctgctgtggatcgcccagcgcctggcgctgccggtggtgccggtgatcttcccgacccagatgctgctgcgtgcggacccggaaaccagcgaagagatgtggctgattaatccgtttaacggcgagaccctcgacgagcataccctggaggtatggctgaagggcaacatcgggccggtggcggaactgtttaatgaagatctcgacgaagcggataacgccgaggtgatccgcaagctgctggacaccctgaagtcggcgctgatggaagagcggcagatggagctggccctgcgcgccagcgaagcgctgctgcagtttaatccggaagatccgtatgagatccgcgaccgcgggctgatatacgcccagctggactgcgatcacgtggcgctgttggatctgagctatttcgttgagcagtgcccggaggatccgatcagcgagatgatccgcgcgcagatcaacacgatttcgcataaacaaattacattgcattag

SEQ ID NO: 247403 - DNA, 393 bp, Klebsiella pneumoniae; identical to SEQ ID NO: 225847

SEQ ID NO: 247404 - DNA, 849 bp, Klebsiella pneumoniae
atgacctttcaggcctggctgcagcaggcgatcgcccgcctggcggagagcgacagcccgcgacgcgacgccgagatcctgctgggacacgttaccggccgggcgcgaacctggattttggccttcggtgaaacgacgctctctgctgacgaggcggcgaggctggaggcgctcctggtgcgacgccagcgcggggaacctattgctcatcttgtcgggcagcgcgagttttggtcgctgccgctgttcgtctccccggcgacgctgatcccccgcccggataccgaatgtctggtagagcaggcgctggcgcgtctgccaaccgcgccgtgccgtattctcgacctcggcaccgggaccggcgccattgccctggcgctggccagcgaacgtccggactgtgaggtcaccgcggtggacgtgatgccggacgccgtggcgctggcgttgcgcaatgccgaacatctgagcatcgctaacgtgacgataagtcaaagcgactggtttagcgcgctggccgggcagcgcttcgccacgatcgtcagcaatcccccctatatcgacgccgccgacccgcatctcgccgaaggcgatgtgcgctttgagccgttgacggcgctggtcgcaggcgaccaggggctggccgatctggcgcatatcatccgcgagggacggcagtatctgcagcccggcggttggatgctgctggagcatggctggactcagggcgaggcggttcgcgcgctgttccgcgaagcgggctatctggacgtcgcgacctgtcgcgactatggcgacaatgagcgtctgaccctcggacgtttacccgacatggagaatgttggctga

SEQ ID NO: 247405 - DNA, 1083 bp, Klebsiella pneumoniae
atgaagtcttctattgttgccaaactggaagcgttgtacgagcgccatgaagaagtgcaggcgctgctcggcgatgccgcgacgattgccgatcaggataaattccgcgcgctgtcgcgggagtatgctcaactgagcgatgtggcgcgctgctataccgactggcgtcaggtgcaggaggatattgaaaccgcgcagatgatgctcgacgatccggaaatgcgcgaaatggcgcaggaagagctgcgtgacgccaaagaaaaaggcgaccagctggagcaacagctgcaggttctcctcctgccgaaagatcctgatgacgagcgtaacgccttcgtggaagtgcgcgccgggaccggcggcgacgaagcagcgctgtttgccggcgatctattccgcatgtacacccgttacgcagaatcgcgccgctggcaggtagagatcctcagcgccaacgaaggtgagcacggcggctttaaagaggtgatcgccaagatcagcggtgacggcgtctatggtcggctcaaatttgaatccggcggtcatcgcgtgcagcgcgtgccggccaccgagtcgcaggggcggatccacacctccgcctgtacggtggcggtgatgccggagctgccggaagccgaaatgccggacattaacccggcggatctgcgcatcgataccttccgttcctccggggcaggcggtcagcacgttaacaccaccgactcggctatccgcattacccacctgcccaccggcatcgtggtggagtgccaggacgagcgttctcagcataaaaacaaagccaaggcgctgtcggtgctgggcgcgcgcatccgcgccgccgaagtggccaaacgtcagcaggcggaagcctccacgcgccgcaacctgctgggcagcggcgaccgcagcgaccgcaatcgcacctataacttcccgcagggccgcgtgaccgaccatcgtatcaacctgacgctctaccgtctggatgaggcgatggagggcaaactcgacatgctgattgagccgattgtccaggaacatcaggccgatcagctggcggcgctgtccgagcaggaatga

SEQ ID NO: 247406 - DNA, 1257 bp, Klebsiella pneumoniae
atgacccttttagctcttggcatcaatcacaaaacagctccggtcgccctgcgagaacgcgtcacgttttcgccggaaacgctcgataaggcgctggagagcttgctggctcagccgatggtgcagggtggggtggtgctgtcgacctgcaaccgcacggaactctatctcagcgtcgaagagcaggataacctgcaggaagcgctgatccgctggctgtgcaactaccacggcctcaacgaagaagacctgcgaaaaagcctttactggcatcaggataatgacgccgtcagccatctgatgcgcgtcgccagcggcctcgattcgctggtgctgggcgagccgcagatcctcggccaggtgaaaaaagccttcgccgactccagccgcggccatcttaacgttagcgagctggagcggatgttccagaaatcgttttcagtggctaagcgcgtgcgtaccgaaaccgatatcggcgccagcgcggtctctgtggctttcgccgcctgtaccctggcgcggcaaatctttgaatcgctctccagcgtcaccgtgttactggtcggcgccggggaaaccattgagctggtagcgcgccatcttcgcgaacatcacgtgcgcaaaatggtgatcgccaaccgtacccgtgaacgcgcccaggcgctggcggaggaagtgggcgccgaggtgatagccctcagcgatatcgacgaacggctgaaagaggccgacatcattatcagctccaccgccagcccgctgccgatcatcggcaaaggcatggtggagcgtgcgcttaaggcgcggcgtaaccagccgatgctgctggtggatatcgccgtcccgcgcgacgttgaaccagaggtcggcaaactggctaacgcctacctctacagcgtcgacgatttgcaaaacatcattcagcataacctggcgcagcgtaaggctgccgcggtgcaggcggaatcgatcgtcgagcaggaaaccagcgaatttatggcctggctgcgcgcgcagagcgccagcgagaccattcgcgaataccgttctcagtctgagcaggtccgtgaggagctgacggcgaaagcgctggccgcgctggagcagggcggtgatgcccaggaaattatgcaggatctggcgcgcaagcttactaaccgcctgatccacgcgccaaccaaatctcttcagcaggccgcccgtgacggggacgacgaacgtctgcatattctgcgcaacagcctcgggctggaatag

SEQ ID NO: 247407 - DNA, 612 bp, Klebsiella pneumoniae
atgaatcgactgttccgcctgctgccgctggccagcctcgtcctcaccgcctgttctcttcatacgccgcaagggcctggcaaaagcccggattcgccgcagtggcgtcagcaccagcaggctgtccgcagcctcaatcagttccagacccgcggggcgtttgcctatctttccgatgagcaaaaagtctatgcccgcttcttctggcagcaaaccggccaggaccgctatcgcctgctgctgaccaacccgctgggcagcaccgagctgtcgctgaccgcgcagccgggcagcgtgcagctgatcgataacaaaggccagacctataccgccgctgatgccgaagagatgattggccgtctgaccgggatgccgatcccgttgaacagcctgcgccagtggatcatcggcctgccgggcgacgccaccgactattcgctggacgatcggtaccgtctgcgtgaactgaactatacgcaaaacggcaaaacctggcacgtgacctacggcggctataccagcgatacccagccagccctaccgtccaatgtcgagctgaacaatggcgctcagcgcatcaagctgaagatggataactggatcgtgaaatga

SEQ ID NO: 247408 - DNA, 852 bp, Klebsiella pneumoniae
atgatgacccgctggccctctcctgcaaaactgaatctgtttttatatattaccggccagcgggccgatggttaccataccctgcaaacgctgtttcagtttctcgattacggcgatacgttgaccatcgaaccgcgtagtgacggccaactgcgcctgctgacgccggtggccggcgtgccggacgaggagaatctgatcgttcgcgccgcgcgtctgctgatgcatgccgccagcgaaagcgatcgcctgccggcgggcagcggcgccgatatcagtatcgataagcgcctgccgatgggcggcggcctgggcggtggctcctccaatgccgccaccgtgctggtggcgctcaaccatctgtggggctgcggtctctcggaagatgagctggcgactcttggccttcagctgggggccgatgtgccggttttcgtgcgcggccatgccgccttcgccgagggggtgggtgaaatactgacgccggtagaacccgaggaaaaatggtacctggtggcccacccgggggtcagtattccgacgccgatcatttttcgcgatccggagctaccacgaaataccccgcgccggtcaattaatacgttattaaattgtgaattcagcaacgattgcgagcttatcgcaagaaaacgttttcgcgaggttgatgccgcgctttcctggctgttagaatatgcgccgtcacgcctgaccggcacaggggcctgtgtgtttgctgaatttaacaccgaatccgctgcccgtcaggtgctggacactgccccggcatggctaaatggctttgtggcgcgcggagttaacctttcgccgctcaagcaggccctgctctga

SEQ ID NO: 247409 - DNA, 948 bp, Klebsiella pneumoniae
gtgcctgatatgaagctttttgctggtaacgccaccccggaactagcacaacgtattgccaaccgcctgtacacttctcttggcgacgccgctgtaggtcgttttagcgacggcgaagtcagcgtacaaatcaatgaaaacgtacgcggtggtgatattttcatcatccagtccacttgtgctcccaccaatgacaacctgatggaactggttgttatggttgatgctctgcgtcgtgcttcggcaggtcgtatcaccgccgttatcccttacttcggttatgctcgtcaggaccgtcgtgttcgttctgctcgtgtgccaatcaccgcgaaagtggtggcggattttctgtccagcgtcggcgttgaccgcgtgctgaccgttgacctgcacgcagaacagatccagggcttcttcgatgtgccagtcgataacgtgttcggcagcccaatcctgctggaagatatgctgcagctgaacctggacaacccgattgtggtttctccggacatcggcggcgtcgtgcgtgcccgcgctatcgctaaactgctgaatgataccgatatggctatcatcgacaagcgccgtccgcgcgccaacgtctcccaggtgatgcacatcatcggcgacgttgccggtcgtgactgcgtgatggtcgacgatatgatcgacaccggcggcaccctgtgtaaagcggcagaagcgctgaaagagcgtggcgcgaaacgcgtattcgcttacgcgacgcacccaatcttctccggcaacgctatccagaacatcaagaactctgtcattgatgaatttgtcgtctgcgataccattccgctggcaccagaaattaaagcgctggataaagtgcgtactctgacgctctccggtatgctggctgaagctattcgccgtatcagcaatgaagaatctatctctgctatgttcgaacattaa

SEQ ID NO: 247410 - DNA, 1653 bp, Klebsiella pneumoniae
atgcctttccgcgccctcatcgacgcttgttggaaagaaaagtacaccaccgcccgcttcacgcgtgacctgatcgccgggatcaccgtcgggatcattgcgattccgctggcgatggcgctggcgattggcagcggcgtgccgccgcagtacggcctctatacctcagcggtggcagggattgtgatcgccttgaccggcgggtcacgctttagcgtttccgggccgaccgccgcctttgtggtgatcctctatccggtttcccaacagtttggtctggcgggactgctggtggcgacgctgatgtcggggatctttttaatcctcttcggcctggcgcgctttggccgcctgatcgaatacatcccgctgtcagtcaccctcggcttcacctcggggatcggtatcaccatcggcaccatgcagattaaagatttcctcggcctgcagatgccccatgtgccggagcattatctgcagaaagtggcggcgctggcgatggccctaccgaccattaacgttggcgatgccgccatcggcgtcgttactcttggcattctgatcctctggccgcggctgggtatccgcctgccgggccacctcccggcgctgctgggcggctgcgcggtcatgctggtggtcaacttgctcggcggcgatgtcgcgacgatcggctcgcagttccattatcagctggcggacggcactcagggcaatggcattccgcagctgctgccgcagctggtattgccctgggatatgccgggctcaaactttaccctgagctgggcctcgctgcaggctctgctgcctgccgccttctcaatggcgatgctaggcgccattgaatctctgctgtgcgcggtggtgcttgatggcatgaccggcaccaagcacaaagccaatagcgagctgattggccaggggctgggcaacattgtcgcgccgttcttcggcgggatcactgccaccgcggcgattgcccgctcggcggcgaacgtccgcgccggcgccacatcgccggttgccgccgtgatccacgccctgctggtgatcctggcgctgctgatcctcgccccactgctctcctggctgccgctgtcggcgatggccgccctgctgctgatggtggcatggaatatgagcgaggcgcataaagtcatcaatctgctgcgccacgcgccgaaggacgacatcgtggtgatgctgatgtgcatgtcgctaacggtgctgtttgacatggtgatcgctatcagcgtcgggatcgtgctggcttcgctgttgtttatgcgccgtatcgcacgcatgactcatctggcgccggtcaacgtcgaggtgccagacgatgtgctggtgctgcgggtaattgggccgctgttctttgccgccgccgaaggcttgttcaacgatctggagacccggatcgccggcaagcgcatcgtggtgctgaaatgggacgcggtgccggttctcgacgccggtggtctggatgccttccagcgctttgtgaacaagctgccggaaggctgtgaattgcgcgtatctaacctcgagtttcagccgctacgcacgctagcgcgcgccggcgtcaaaccgctgcccggacgcctgagcttctaccccgatcgtcaggccgcgctggctgacctgtga

SEQ ID NO: 247411 - DNA, 1047 bp, Klebsiella pneumoniae
atgttaattcaggtgggagagctggcgaagcgtgccggactgacggtacgtacgctgcatcattatgaacagacggggctgttaacgccttcggccagaagcgaggcgggctatcggctctataacctgtccgcggttcagcgcctgcatatgataaaggcgctggcgcaggccgggctaacgctcgccacaatcaaggactatctcgatcggcaaacgctgtcgctgcccgagctgctgacgcagcagatagatatgctcaacgcccagctacgcgatgttggcaggctgcgcgaccgactattggtgctgcgcgagacgctggcgagcggcaatgaacccgatctggagtcctggctacagacgctggagttaatgaaaatgtacgatcgttggtttagtcaacaggagttagccgcgctgccgtttgcggcacaggatgaacagcgggcgcaggcgtggcgcgagctaacggaggaggtgcagacgctgatggcgagcggctgcccgacggacagtccgcaggcgatgcgtctggcgacgcgctggatggagcgcctggagcaggatacggccgggcgtccggagtttctgacccgcctgaacgagatgcatgccgccgagccgcagatggttgaacagaccggcgtcacgccggcaatcatcgcctatatcaccgaggcctttgccgaaagcaaactggccatctgggcgcggtaccttgacgaagaagagatggcgttcacccgccagcactattttgaccggctacaggagtggcctgcgctggtggcgaagctgcatcaggcgtgccgggagggcgtagcgccggactcggcgtcgggtcaggcgctggcccgggcgtggcttgaactgtttcagtcctacgccggtacccggccgcagacgttgcagaagtttcgtcgggcaatggagcaggagccgcatttgatgaagggcacctggatgacgccggcagtgctgagctggctgcagcaggcgaccggatccttgatgcggcaggcgcagggacctgccgccgggtga

SEQ ID NO: 247412 - DNA, 276 bp, Klebsiella pneumoniae; identical to SEQ ID NO: 225856

SEQ ID NO: 247413 - DNA, 585 bp, Klebsiella pneumoniae; identical to SEQ ID NO: 137146

SEQ ID NO: 247414 - DNA, 1092 bp, Klebsiella pneumoniae
atgggattcaaatgcggtatcgtcggtttgcccaacgtcggcaaatccaccctgttcaatgcgctcaccaaagcgggtattgaagcggccaacttccccttctgtaccattgagccgaacaccggtgtcgtaccgatgcccgatccgcgtctggacaagctggctgaaatcgtcaaaccgcagcgcatcctgccgaccaccatggagttcgtggatatcgcgggcctggtgaaaggcgcgtccaaaggtgaaggtcttggcaaccagtttctgaccaacatccgtgaaaccgaagccatcggccatgtggttcgctgctttgaaaacgataatattattcacgtcgcggggaaagtgaacccggcggaagatatcgacgttatcaataccgaactggcgctgtctgaccttgatacctgcgaacgcgcgattcaccgcgtctccaaaaaagccaaaggcggcgataaagacgcgaaggttgagctggccgcgctggaaaaatgcctgccgcagctggaaaacgccggtatgctgcgcgcgctggatctgaccaaagaagagaaagaggccatccgctatctgagcttcctgactctgaagccgaccatgtacatcgcgaacgtcaatgaagacggtttcgagaacaacccgtacctcgatcaggttcgcgccatcgccgagcaggaagggtctgtggtggtgccggtatgcgccgccgttgaagcggacatcgccgagctggacgatgaagagcgtgacgagttcatggctgagctgggcctcgaagagccgggcctgaaccgcgtgatccgcgccggttacgctctgctgaacctgcagacctacttcaccgcgggcgtgaaagaagttcgcgcatggaccatcccggtcggagcgaccgcgccgcaggcagccggtaagatccacaccgacttcgaaaaaggctttatccgcgcgcagaccatcgcttatgaagacttcattgcctacaaaggcgaacagggcgcgaaagaagccggtaaaatgcgtgctgaaggtaaagactacatcgtgaaagatggcgatgtgatgaacttcctgttcaacgtctaa

SEQ ID NO: 247415 - DNA, 330 bp, Klebsiella pneumoniae
atggcaacggcaagaagcggctatacgctgcaggtgataaaggcagggcagcaggggcatgttgaaatgagatgggggcatctcgcagacgttgatacgcgcgcggcggcggcggctatcatgcagcatatcgggcgttcttcgtcctcgcggggccagcaggagatcagcctgtcgctgaccaatgccgccagcggcatctcggtggagcttcatcacccggcctctggggaaagcgccaccccggcttttattgaggctgagttaaagaaaattgtgcagatcgttgatggctacgaggcggcagaagatacccatattgtggagtag

SEQ ID NO: 247416 - DNA, 915 bp, Klebsiella pneumoniae
atgaagcactgtaaaatcatcctgttagtaggccttctggccagttccgcttcggcattagcggagaagatcggcgtctcaatggcctacttcgatcaaaactttctcactattatccgccagtccattgagaaagaagctcaagcccgccacgtcgacgtacagtttgaagacgcccgcggcgacaccggacgccaggccgatcaggtgcagagcttcatcgcctccggcgtggacgcgatcatcgtcgacccggtggactccgccagcaccccgcagctgacgaagatggcgcagcaggccaaaatgccgctggtgtatgtgaaccggacgccgggggataaaacgttaccgcccggcgtggtgtttgtcggttcggacgagcgggagtctggcacattgcagatggaggcgctggcgaagctggcaaactacaaaggcaacgtcgccatcatgatcggcaatctcaccgacgccggcgcgctgcagcgcaccaaagatgtggagcaggtggtggccaagtatccggcaatgaaagtggtgcagaaacagccggccaactattcccgcagcgagggcatggatctgatgcagaactggacgggcaacggagaagcgattgatattgtggcggcgaacaacgatgagatggcgattggcgcggcgatggcgctggagaaaagccagaagaagctgctgatcggcgggatcgacgccaccccggacgggctgaaagccctggccagcgataagattcaggtgacggttttccaggacgccgtcggtcagggcaaaacggccttagcggtagcgctgaagctgattaaaggagaaaaggtcgagtctcatgtctggatcccgtttgagttagtgaccaaagaaaacatgcagacctatgtggaaaagagtcattaa

SEQ ID NO: 247417 - DNA, 1416 bp, Klebsiella pneumoniae
atgatgacaacacaccacgaccgtcactataaagccggtggcgacccgcgcacgctggctgattttatggccctgcgtgcggaaatgaacaagctcagccacccggcgcggccggatattaactggccgtatgccgagcagcttgcccgcgggctgttggagcatcacggcgcggacctgcagactgtcgcctggtataccctggcccgcgcccggctgggcggggtggcagggatcaatgaggggctgacgctgatggagtcgctgctggttcgtcaggggaaaaacctgtggccacaggcgctcccggcccggacagagatcttccgcaccctgagcaagcggctgcggcaggtgatccgtaccctgaatcttaccccagaggatgttgagtcgcttgagcaggctgaacgttcgctgcaaagcttcgacgcagtgctccagcgccttgagatcgcccctgaaaaccagctgagcgacctgcgggcgctactgcacagcacggcaactcgcttcgagagcctcgaccctgcgccagcgcttcccaccgcgccgccggtggcggtgtctgacgcggaacttcccggcactctggtcagcgaagaggatgcggcgaaggttgagccagtgccagacctaaaacgtagaccaaaagctgagccgctggctccgccttcacctgcaaagcggcccgcgccggtggcggcgtctactccggcaaccgcgccgcgctggaagccgtttatcgccggaatggttaccatgctggcggtaacgggtatcgccgtcggcggatggctggcgctgcgtcagtccgacttgccgcccatttcggtcacccaaaatgccggaccgataccgggcctgccggcgacaacgcccccggggccggttgatctgccacagacgcagcgccagcttggcgagcttgcccgcctggcgccggactgggcggtcagctacggcgaccagctggtccaccaggcccttatccgctggccggatcaggcgcaaccgctggcgcagcagtggcggcagcagctgagtgctggcgcattgcccgcggaaaatcttaccggctggtcggagggcatgcagcagctgcagcggctcgccgaccagctcaatgccctcgacgagcagaaggggaagtacctgacggtgagcgaactgaaaaccgcagtatttgccatcacacagtcgtttaaccgcgctgttccgctggaggagcagctgcgccagctggccgcgcttcccgttgatcaaccctggccagccgcgcggggaagcctcgtggagctgcatctgcaacagctgatagtggagtatgccctgctgaagcgaaaacagccggcgtcgccgaccgctgcgctccccgcaaccggtgagccctcggtgagtgaggcggtgaaataa

SEQ ID NO: 247418 - DNA, 990 bp, Klebsiella pneumoniae; identical to SEQ ID NO: 92388

SEQ ID NO: 247419 - DNA, 270 bp, Klebsiella pneumoniae
atgaaactattgataaagtatgcagcagttgtttcttcaattacaatcagtcaagcctatgcaaatgagttttattatggtgtagcagagcatctcttcaggagggattatacttatagcgaacaggcaatattgaagtcaaaagaaatatgtgcaagtgtaatgcgaattgatgcaccttgggaagatgttgaaaaaaaaaaggggatttatcacattccaaaaaaatgggacgatgtaattaataagatggtattaaaccgcttttaa

SEQ ID NO: 247420 - DNA, 126 bp, Klebsiella pneumoniae
ttgttgctagtggaactgttgatggttcaactcaatatcgcctcgacctttggcaacgagcttgggatttggtacttaattatcctttattcggtgtcggtatgggacaagaatcatggatgttaa

SEQ ID NO: 247421 - DNA, 333 bp, Klebsiella pneumoniae
gtggacctgcgcgactggaaagtggtgctgttcatgcaggggcactgtccctactgtcataaatttgacccggtgctgaaacagttggccggacagtatggcttctccgtgttttcttacaccattgacggacagggtgatgatgcgtttcctgaagcgctgccggcgcctcctgacgtgatgcagacctttttcccgaatatcccggtggccaccccgaccacgtttctggtgaacgtaaacacgctggcagcgtacccgatcctgcagggcgccacggatgcgcagggctttatggccagagtggatacggtatttcagatgatgcactga

SEQ ID NO: 247422 - DNA, 123 bp, Klebsiella pneumoniae; identical to SEQ ID NO: 139695

SEQ ID NO: 247423 - DNA, 123 bp, Klebsiella pneumoniae; identical to SEQ ID NO: 239650

SEQ ID NO: 247424 - DNA, 1992 bp, Klebsiella pneumoniae
atgcagataataagtggcgaaactaacataaatgatgttggcataaaaaagagatttaaaaattgcgagccatttcagtgtattgttgagctagcatggaatggatttgatgccaaagctcggaatgttactattgaggtgcgtagaactgatttaggcggcctgtcatcagtttatattcttgatgatggtgatggaatagactttaatcactttgatttgaactttaatagatttgatgattcactaaaaaaagataacattgaattacatggctcacaaggaagaggaaggcttgcatttcataagctcagccgtcaagctatatggtttactaaatataacgatataaatgctaaaatagaaattgatgatgctgatcttaaaaattatcaagcttatattaatattccgtatcaagaacagcatacaacattaatcggacaaaaaagtggcacatgtgtcatgttgaatcattttcataatgatttgccaagtgataatgaaataataaaaagattacagagtgagttttgctgtcatttagcactgaatgagcagataacgttatcttataatggggttgttataacggcaccagaacatgattctcactcattagaaaaagaaattgatggaaatccattttcaatcaaggctctccggtgggatgaaaaaccctctaaagaaagatcgtatgtatatttggtaaactcgcagggtaaaaaagttcacgaagttccaagcaaatttaatcagaaaaaagatttctatctttctatattcgtcagttctgactgggctgataattttagtaataaaggcgatgatatattttcagatgctaagtataattctgactcaaaagtttggaaagatgtcataaaatttgtttggggattatcaaaaaagatatatgatgatttccttcaaaagaaaattgacgaaactttagagcgttatcaacaagagggagtattcccttcttatagcgaatattcagatcctaaatatgctgagtggcgcttgaataatatcaaggctatcgttcgtgatatatatatagccgagccaggcatgctcgataatttgaatacaaaacaaagaaaggtttttgtaaggctattagataaactatcctcatcaaataataatgaggatttatttaatatacttgaaagcgttttagatttgagtaaagagggtttatcaaaactttctaatcaattaagagttacaaaactcgataatataattagtgcgattgaagaactacaaaaaagaaggcttgtagtggacaagcttcgttatttaatggatcatcattataaggaaataagagagactccagatcttcaaaaaataattgaaaacaacacatggttgttcggtgaacgctatgaaactatcggggctgaggaagatacatttaccaaaatagcattagaattaaggaatagtgtaaaacatatcaacgatattgatgaagatgatgttgagaatgaggcagaattagctggttcaaaacggcagaccgatctatttttagccagaaagtacccagcccttgattccaatggtaacccatattacaaatgcattatcattgagataaaaagaccaagtatttcattaaatataaaacatctaagacagcttgatgattatgcggcaataattcaaagacatccggggtttagtagtcaaaatttgcattttgaactcatacttataggtcgtaaaatatctaaagatagtttcgaaatagaaagtagattgaattcacatatacaaaaaggggatatgggattagttggggatgatcctaggatgaagcgctacgttaaaaactggtataccatttttgatggcttcgagctcacaaatagatttatgcttgataaattgaaattagaaagagatagcttagaacttggtgaaatatcttcgaaagaaattgtttcagaattacaaggtaacttaagtaaataa

SEQ ID NO: 247425 - DNA, 2448 bp, Klebsiella pneumoniae
atgaaaaaaatgactgactgtgagaacgtattaaaagaattagttaatacctttacggacattgataaaataagaaacgaggctcaaaccagacatcacattatagatgaaataatatataatgtgctcgattggccaaaggatcaggttgaggttgaaggctatgagcagaaaacttttacagattatgaattaggaaaaccaagacaggtaattattgaggcaaaaagggagggaagaacgtttgaaatacctgctgggctatcaaaaaagaatattattgatattcctgctttgttaagatccaatgaggacttagccaatgcaattcaacaagttcaaatttactgttcttctagaggaaccccgattgcgatagccacaaatggacaccaatacatttcgtttatagcaagcaaccaaaatggctcctcacctttggaggggaaagcattagtctttgaaagtttacaaagtatgctcacaaactttactttggtatggaatatgctttcctattatggcgtaaaggaacaaagactaataaagtaccttagttctgatgccagcggaatccccaataagctgtcgtcatacttaactatgtatccgaaagttaggtatgctagtgatattcagacctcattacgtcaaatatccgagctaataatccaagatgccttagaaagtaaagagttagaagaaacattctatcagaaatgttattgtgaaagtggtgcgctttcaaaatatgcacttttgagtaaagagatgcttcaggcacggtatgctgcgttatttagcgatagtgaattatcgccgcagattgcatctgttaaacctgatcgaaaggaacaaggtttagaccctagtataatggcggaagccttatcaaagcggccaattgtattaattggtgatgttggtgtaggtaaaacatcatttgttaaaaaccttatatattctagcgcatttaaagagtttaacgaggctatatatatttacattgacctaggtgctagcgctactttatcagataacctccaggcttttattcttaatgaaatagaagagcagcttttaaataaatacgataccgatattactgagcttaaattcattaaaggagtttactctagagatatacagcgcttttcttcaggaatctggggggcattgagagaaacaaatagagaaaaatatgaagaaaaacaattggaaatgctcgcagaaaaaataagtcttaaagatgaacatataaaaaactctattacccacatttccaaccagactaaaagacaaattatcatttgcttagataatgctgaccaacgtgatttcgacacccagcaaagagcttttgtaatatcacaagaactagctaaagagtggaactccttagtttttatttctgttcgcccacaaacatttttcaaatcaaaatcatctggggctctgaccgcttatccacataaagtattcacgatcgcccctccaagaattgaccaagttcttgataaacgcctccagtttgctctcgaaatgtccgaggggaaaatacctttggaacaggctgagtttgtaagaattaacattgataacctttcaatttttattaaagttcttcttgaatcccttagaaaaaacaaagcactcggcgaattcattgaaaacattactggtggaaatgtaaggcaggcattaagttttattacaggatttattggtagccctaacgttgaagcagagaaaataattcgcacatttgaaactgaaggacgatatataattcctgtacatgaattttccaaacaagctcttcttggtgagttttctcatttcgaccccaatacatccttagccatgaatctatttgatatatcaatcgctgatgaatcagaacactttttagtacctatgattgttgctttcctgtcagaaaaaaatgagattcaagatagagatggattttgtgagacatcaaaaataattgaggaaatgcaattattgggttacatacccgagcaaaccgagaatgctttaagacgctctacgaataaaaagcttatcgagacatctcagagatttacattcgaagaagatgagacagggttaataggtgaaatgcctaataaattcagaacaacatcaatcggccaatatcatcttaaacgctggatcagcgactttgcttatcttgatgcgatgttatttgacacgcctatatttaaccccgaaatagtgagtaatatgcgttcttcgtgcgaatccttcaatattgaagaccgatacaaacgcgcattggctttcaaaacctatcttaaatctgcctggaacaggcttataaataaaccaagttatttcgatatgatcgagtccctgaaaatgggtgatagttctttcgaaagtgtcaaacgagttgttgatattagccaaaattcaaaatag

SEQ ID NO: 247426 - DNA, 189 bp, Klebsiella pneumoniae
atgaagctgcaactcttctcgggttgtcactatgttcagcacgtcagtccggatacgatgcgactgagattttggacgggaaagaatatagagttcaaatcaaaggtcgatatatgcctgatcctaaaaaagtctctgcgagaattggtgctattgatatatctaagccatttgattctgttcttttag

SEQ ID NO: 247427 - DNA, 360 bp, Klebsiella pneumoniae; identical to SEQ ID NO: 190581

SEQ ID NO: 247428 - DNA, 918 bp, Klebsiella pneumoniae
atgaaaatatcccttgtcgttccggtatttaatgaagaagacgccataaccattttctatagggaaatccgtcattttcagcccttccagggggaagaggttgaaattgtctttgtagatgacggtagcactgactacacagctgttctgatgaaagagatggcgcaggaagatagtctggtcaaaaacatattctttactcgcaactttggtaaagaagctgcgttatttgctgggctagcagaggccagcggcgaggtggtaatacctatagacgtggaccttcaggacccgctggaagtcattccgcgcatgattgagaaatggcgagaaggggctgatgttgttctggcaaagcgcatggataggtcttgcgatagctacctcaagagaaaaagcgctgaatggttctaccatcttcacaacttaatcagtaatcctcaaattgaagagaacgtaggcgattttcgtcttatatcccgagaagttgtcgaacacatcaagctgctgcctgagagaaacctttttatgaaggggatactatcctgggtaggtggtaagacagatgtggttgaatacgtaagagccgaaagagccgcaggaaaaagtaagtttaatggctggaagctttggaatctggcgcttgaagggataacgagcttctccactttcccgctgagaatgtggacgtatatcggactcttcgtagccggttgctcatttttttatggggcatacatgattgtggataccctttgttttggcaatccggtgaagggatatacatcgataatggtatcgatgctattccttggcggcgttcagctgataggtattggagtgctcggcgaatacattggccgcatttacatcgaaaccaagaacagaccaagatacattactaagtcaaaggaatga

SEQ ID NO: 247429 - DNA, 1473 bp, Klebsiella pneumoniae; identical to SEQ ID NO: 190583

SEQ ID NO: 247430 - DNA, 402 bp, Klebsiella pneumoniae
atggccgtagaagtgtatgcagtgatcgactctgaagggaatgtggtcagcacaagtttgtgggacggagaggcggaatgggcgccaccagagggaatggaagctgttaaaaccggggatagtggcgcaggtatcgggtggacctataaaaaaggcaagttcacaccgccaccgccacctgaggtgccaaaagaagatttgatttctcaggctgagctgcaaaaggctaaccttatagctgaagcaagccagacgatctccatacttcaggatgcggtagacctagacatggcgacagatgaagaaagaacacagttaactacactgaaaaaatatcgcgtgcttttaagccgggttgatacttccaaggcgcctgatattgactggccgacagccatataa

SEQ ID NO: 247431 - DNA, 918 bp, Klebsiella pneumoniae; identical to SEQ ID NO: 190585

SEQ ID NO: 247432 - DNA, 303 bp, Klebsiella pneumoniae
atggcaatcagcgaaattcctctctctccggaaaatcagcaattttctatatcgctggcgggccagagcttgcagatggcggtaacgtggcgggctgtattctggtgcctggatgtcatggatagcagcggcgcagatctgataaaaggcatcccgttaatcactggcgctgacctgctggcgcagtatcgctatctcggtttgggattctcgctttatgttgattgcgacgatccggcaaatgataaccctaccgaaacagacctcggcattaagagccacctttacgcagtaacggagtga

SEQ ID NO: 247433 - DNA, 576 bp, Klebsiella pneumoniae
atggatattctttctactctctttcagcagcagagcaggcggatcgggctgatagtccccagtgttgttatttcggaaaagcacgatgactcgcttgaaataaccgagcatcccgtagaggttggcgcagcaatttccgaccatgcctatcgccgaccttctgaagttgtaatgcaggttggttttgctggtggcggctcattgctggatttgctggacacaacttcctttgggctaagtgctggattaagcccgagggaggtttaccagaatctactggatctccagaacagccgggtgccgttcgatgtggtaacaggcaagcggctttacagcaacatgctgatccgggcgattgaagtcacaaccgaacgctccacggaaaatgttctttcggctgtgttgacgttacgtgaagtcattattaccagcaccaccaactctaaggttgcagcgaaaacagatatgaaggagggggctaatacgtcagcaatgcagaactctggggtgaaaacgccagtgcaaaaaaatgaatcaatactgagccgattaagcggtgtagtgtcaggagggtaa

SEQ ID NO: 247434 - DNA, 1923 bp, Klebsiella pneumoniae
atgaacgctgaaacgctcaaggactttctgatctcgcttgggttcaaagttgatgaggctggcgccagaaaattcgatgccgtcgttgccgggataacgcttaaagcgattgagctgggcgtcaaagttgaggcagcggcgctttccgtcgttgcattcgccgcgaaaattgccagcggtctcgacgacctgtactgggcctctcagcgcacaggcgcgacggtggagggcattaagcagattgggtatgcggttagtcaggttggcggcagtgtcgacggggcccgcggctctctcgaaaatcttgccaggttcatgcgtaataatcccggcgctgagggtttcctgaaccggctgggggttcaaacgcgtgatgccagcggcaacatgcgggatatggcgacgatctttaccggcgtcggccagcgtcttagcagtatgccgtattaccgcgcgaaccagtacgctcaaatgctggggctggatgaaaacaccctgatggcaatgcgtcgcggtatcggccagtttagtggcgaatacaccgcgatggcgaaggcgatcggttataacgccgatgtggccgccgtcagctccaataaattcatgacctcgctgcgctcttttgggctgatggcaggcatggcgcgggataaaataggctccagcctcgctgatggccttgctggctctctcgacaggctgcgtcgccagatcctggaaaacttcccgaaaattgaaggcgcaataaccggtaccgtgaaaggaattctctgggctggcgagatggtaggccgggtaatttaccgcctcatccagttgggtcagggtatcagcgactggtgggactctcttgataaacagtcgcagcagctgatcgaacttattggagcgctaaccgcagcgtggtggatgctcaaccgcgctatgctcgcatcgccgattacgtgggttctcggtcttgccgctgccattgctttgctatgggaggattaccagacctggaaggagggcggtaagagcctcgttgactgggggaaatggaagcctgaagtagacgcagcactgaaaatggtcggtgacctgaaacagactgtcctcgatctcggaaaagcgctggcaaagctgctcaatatcgaccctaaatcctggtctttaaaatgggatttcagcaacttcattacccagatgggtgagtttagcaagatgctgagtatgatcggcgacctgcttaacgctatcaaggacggtcgctggtcggatgctgcaaatattggcaaggctcttctcaaacaaggcagcgatcaacctgacgcccttcctggtgttaccagtagcgcagtcaatgcgcgaggtaaagttctgggattttgggaggaggttaaatcccgtttcagtgatggcggctggtatcagcatgagcagaacacgcttgccgatcgcaacaataaccccggcaatattcggcccgtaggcggtggtggctttcgtgcgtttggttctgcgctggaaggctgggaggccatgaaaaaccagctcatgcggtactttactggtaaaacgaccgggcgccgcctgcagactatcatggatatcgccagcacctgggcacctgcggccgataacaacgatcctgccaaatatgcccgtgatgttgctggctggatgggtgtatcgccgacggcagcattaaacctgtccgaccccaatacgatggctatgctcatgcagtctatggcccgcaaagaggggtattcgaactggaatagcccgcttgcccatcaggctgctggagcgcaggtgaatcagcaaaacacctacaacatctatggcgggaatgctcaggaaattgggcaggaagtcagtcgccgccagcttgatgctaatgccagggtgctgagaaataaccaaactggagcaggatga

SEQ ID NO: 247435 - DNA, 270 bp, Klebsiella pneumoniae; identical to SEQ ID NO: 96505

SEQ ID NO: 247436 - DNA, 198 bp, Klebsiella pneumoniae
atgtcacgcgctaacacgtcactagatccgattaaggcactcgatatcgattatcgcgatccgcgaggtgttgtcgtgcacgtcactgggtggaaccgggagaagcaacaggtgtatttcaccaggcagggatacccgcatgagtgcatgcaacctgtctggaagtttcaacagtacttcacgaggctaacatcatga

SEQ ID NO: 247437 - DNA, 210 bp, Klebsiella pneumoniae; identical to SEQ ID NO: 190595

SEQ ID NO: 247438 - DNA, 435 bp, Klebsiella pneumoniae
gtgaataacgttatctggctgccggccggttctatcgaggtggcccaccagcgggccttaacctgggtttgcgatgcatatctgttttatctggtcagcctgcaccgccgcccggtgtatcgccaccagtacggcgatatttcgcttaaccagccagcgctgcagggcttcattgactcctacctcaaagataaagggtgggacatagagcgccgccgtgcgcattacatcaacattctggacctcatcaaatatttgcaccgcagcaattcgggatttatcgactggggaacagtgccggcgcttacgcctcgggggatccgctggatgaacgcctgcctctctcgcctgggtgaaatggttaacagctatggcggatggaaaggatatatcgcagcagttgaggaggatcagaaagatgaaaatcgactttaa

SEQ ID NO: 247439 - DNA, 225 bp, Klebsiella pneumoniae
atgaaaatcgactttaaagattatggcgctgtggccgcggtgactattaccagcaccattttcgagtttcgcaaacataaccgggttgttgatgccaccctgctctgcaccccggacgtcatcagcgaacgacgcggcagcttcttcatgaagacgcatatttcaggcaaaaccagggatgcgctgcgggcctataaaaccgcgctgcgcgagatgaaacgatga

SEQ ID NO: 247440 - DNA, 1155 bp, Klebsiella pneumoniae
atgaatgtaatagacttgttttctggcgtaggagggctcagcctaggcgcagctcgtgctggatttgatgttaaaatggctgttgaaattgacaagcatgcaatagaaacacatgcaattaatttcccgacaagtttgcatgtacaggaagatgttgccttgttaaatgcagatagaattaaaatgcttctacaagacgatatttctattgacgggattatcggtggacccccttgtcagggtttcagctctataggtaaagggaatccagatgatagtagaaatcaactatatatgcatttctatcgcctggtttcggaacttcagccattattttttttggcagaaaatgtccctggaataatgcaagaaaagtatgaaagtattagaagtcaagcttttgggcttgtaagtggtgattataatattcttcaacccattaaagtaaaagcatctgattatggtgctcctactgtacggacaaggtatttctttatcggggtgaaaaaagcgttaaagctggatttgcctctagacattttcatgcctagaggaattactcaggttaatgtaaaagatgcattatatggacttcctaaagtcatcgacgctaactggcaatcggagtctgaaagttggagaccaattacaaaagataaagatggtgttttttacaataagctatggggcgaggttccatcaaatgttggtgataaggaatcaatctctaagttacagaataatattatttctggatgtactgggactttgcatagctcagaagttcaaggacgttatgccgccttgtcttttggagagacagacaaaatatcaagatcaactcgtttagatccggatggattttgcccaactttaagagctggaactgcaagtgataagggtagtttccaagctgtaagacctatccatcccttttatcctcgagtgattactcctagagaggctgcaagattacaaggttttccagattggttccggttccatagaactaaatggcacagttttagacaaatcgggaatagtgtatcaccaatagttgctgaatatatattaaaggagctgtacaacacattaaagaaccatgttgcacagcccgaattattataccatgatcctttggaagttagggtataa

SEQ ID NO: 247441 - DNA, 990 bp, Klebsiella pneumoniae
atgtctggtcaatacattccttatcacttaagacataacaaatcaattgatagagaagtatttcttgaaagtttaaatcttttatcaagaagagtaaatatccaagaatatacttatataggatttggcggaccaatgcttgaagattttaggataatgcataaccgtgtcgctttatctgacatgatttcgctcgaggagcaagcgaccacacatactcgccaaaaatacaacttaccatatagctgcattgattgtaagttaatttccgctcatgactttattattgatcataactttgaaaagccctcaataacatggttagactatgcctctccaaaaaaaatacaacatgatttggatgatatacaattacttagtactaaagtcagttcgttagatattttgaaggttaccttcccaataaatcctagctcatactatcaacgtcgcattggagaaagtttagaagaatttaaagaatcctttcagcaatcattaagaacattactaggaagaaaatatcttgattttaatcttgaaatatcaaatgcagatctttcagaccgtaaaattaaatctttattgatacgaataattaccaatgcttttaaatcagctgttgagcgtggtctatctggacgtaaagataaaatccagtattatcccttatcactaaatcaatacaatgatggtagtcatacaatgctcacaatatctggatttttcgcgtcggaaagcgaatatgcaacattagccgaggcatgtaatttctctggctggcgatttttttcctccaattgggagcacgttcaagaaatagccataccgacgctaaccatcaaagaaaagataaacttagatagcaaactacctgatgaagcagcatatcaggcagcagctgaagaatttgctttgagtgaaagcgaacggaataactatttcaagtattatcgattataccctaacttccaaaggatcatggtataa

SEQ ID NO: 247442 - DNA, 1392 bp, Klebsiella pneumoniae
atgaccaaaaagacaaccccaacagctgacttcagcccaagcaaaagattttttgtaagcatgctgactcgagacatagacctaaacgatgccatactagatcttttggacaattgcgtagacggtgcgttgcgtactaaaaaagctccatcggacgcacctaaaccctacgagggtttttacgcaaaacttacaataaataaagacacattcattattgaagataattgcggaggcattccaaaaagtttccgtgaatatgcatttaaaatgggtcgacctcatcaaaaagcagaagaaaatgaaggtaccgttggcgtttatggtataggcatgaaaagggccatattcaagatggggagagattgttcaatacaatctaataaccccgatggtgcattcactgtagccataagccctgactggatagatggtgacggctggacaataccaatgaaagaaagtgcattcgatgcacatactccaaccggcacaataattacaattaaaaaacttcatcctaacgtagctcaaaaattcaatgaaaacacttacctctccgatctttttttacaaataaaacactcactttcatttattatccaaaaaggattccgtatcgaattaaatggtgtagaagttcaacacaaccctataaacatcataactgacaatgcacaaattgagccatatatatataaagcaacaatagatgatgttgatgtagatttagttgtaggcttctacaaaaacttagaagatgaaaatgaagatgcatttgaaaaaagaagttctgatgatgcaggttggaccataatttgtaatgaccgtgttgttttatattgtgataagacccatctgacgggttggggatttgcaaatgtaccacgatttcatacacaattcatagcgatatccggtgttgtccgcttcactagtaaaaatccagagaaattaccaataactacaacgaaacgcggcgtagacctaagctccacattatacaatgatgtacgaaacaaaatgattgaaggaatgatgtatttcattcgctttacgaatcaatggaaaggagaacaccttgaagaaggcaaaaaactgctgcaatctgctaaaatttatgaggctcaaaccttatttgaagtagaccctaagaatgcaccagcggaaaagaaaagcaactggtcaaaccctaacagaaataaagatgaatggagatacactcctaaactacctacgccaatgaaaaaaaatacgagcgtgagaatagtatttacgcgagaaaaagaagatgtaagaattttatctgaatacttatttggacatgataatgctagtccttctgaggttggtattggttgctttgatacaatgattaaagaggtgaagtaa

SEQ ID NO: 247443 - DNA, 222 bp, Klebsiella pneumoniae
atggaagaattaaagttgcactgtcatggttgcggcggttcttttgctcgcgatgagctgcaatatcgcccatctggcaggggtgcttatcggagagacttttatttctgcccggtatgcaatgagaaagaaaagcagaaaatcgccctctccgctgccgcttcctcgtttcgtaaaaccttgccgtcccgtccggggcatatggccaacaagcgctggtag

SEQ ID NO: 247444 - DNA, 954 bp, Klebsiella pneumoniae
atgatattaaatatgatattcccatctgcagtactcttgagatatgttgtaatcactaaatggaacatgattggcaacataacgacagaggatatctatatgcagcaagttggtaacataaaacgaagggtggatgatgctgattttcttattgaaaataaaaaatatgaatccgcactactgctcctgctaacggcaattgatggatctgccatcaaagtatttcctgcaaaaactcagtctataacgaacccaacgcgaactagaaaaaaccggcagattgctaatgaaatgcctaacagtgagcgttatcagagatttttgggtgtaaggattagacagttactcggaattatgttgtctgaggatgagtactatgcaaaagaattaatacattttgttgaaggacaggaagatccagaggtcataatttataaagcttttagatgtaacgatgtccatgaatcctccataccaactgaatatcattatgtatattctgaagatgccatttcaaataatttatctatggagttttctaatggaaccattaagttttcatctggttttttaagcctgctgcgaagcgcaattgtctatgccccttgcaatggatcagaattcggcattaatcattttaggttgataccaaattctggaataacagaggctgatatatatgaacactgtgagaaggaatacggggtgtcatacggaaagataatttctatcaatagactgcttgctggcattggtcctagtgtgcattcttttgacttagatgacttagcagaaataataactgaaagtattaacccaggaacaaaaataggcttgagtttccctaggggtggaaaaccagcgtgtataagtaataacagattcacagagtctggtaagtctatgctcaattatattttgaaaaatagtcaagttgttgatattgcatcttag

SEQ ID NO: 247445 - DNA, 327 bp, Klebsiella pneumoniae
atgatgagttattttttactgagctactcagtcatcccccagactgaatactcaggtgatattgataaggcaaacaaagtcaggagagccatcgctgacattaacgtttggaacaagtcggaaaaaaatgaaactacctttatgggcattctaactatcgaaggtgataatgatagcgcgctccgccatagctcaataaaaaatattgaggaagttttcaagccaattttgaggcagtacaatgcttcatcttatgatgttgtcatctattgctcgataatggttgaaggcatagcaaaatattttgagtttgatgtttcaaactaa

SEQ ID NO: 247446 - DNA, 573 bp, Klebsiella pneumoniae
atggcactcaccgacaaacaagaaatgttttgtcgcgagtacctcatcgatttaaacgccacgcaagcggctattcgggcggggtacagcgtcaagaccgcaaaccgtatagctgcccagaacttgtcaaaacttgacatccaaaacagaatcgccgaactcaaaacgaagcgcaacgaagatgtgggtattgatgctgattatgtgcttagacgcttggttgagatagaccagatggacgttctggacattcttaacgacgatggcagtctgaagccgatcagttcctggccgaaatcttggcgaacgtcgctagccggtctggacattagcaccacgattcagaacttcaacgaggagtcggcggaaaacatcctcaagaaggtgaggtggccggataaggtcaagaaccttgaactgctcggaaagcacatcaaagtgcaggcattcaaagagcaggttgaacaaaaggtcactgcaacccacagcatcatgccggtcccgtcctgcgataacgttgatgactgggaaaaggcggcacaaaaacagcagggcgaggtattaggtggatga

SEQ ID NO: 247447 - DNA, 804 bp, Klebsiella pneumoniae
atgtgtctggtccttaaggttacccgtgccggattttatgtctggctccataaccctgtatctgccggagaaaaggataaccagcgactgctggaactcatccgcgactcctatacgctgagtggtggagtttacggttatcgcagggttcatggcgatcttcgcgaaattggcgaagtgtgcagcagaaaccgggttgccaaaatcatgaggaaaaacaggattcaggctatacatggttataaagtgccacgcgggagccgggggcgaccgtcactgatagcgcctaatcacgtgcggcgtgaatttactgtagtgaagcccaatcaggtgtgggtcaccgacatcacctacatccgcacctggcagggctggctgtacctggcagtggttatcgatctttttgcccgtaatgtggtgggctggtcgatgaagccgacactgtcgcgcgagctggcactggatgcgctgctgatggcggtctggcgacgtaaacctgaagaaaacgtcattgtgcacagcgatcagggcagtcagtatggcagtgatgactggcagcggttctgccgggccaataatctggtaccgagcatgagccgtcgcggcaactgctgggataatgcagtggcagaatcgttcttcagttcactcaaaaaagagcgcatcaggaagcggatatacaaaacccgggacatggcccgggcggatattttcgattacattgaagtgttctacaaccgtaaccgacgccacagccacctcggcggcgtcagcccggaggccttcgaaaaggcctcgcagtga

SEQ ID NO: 247448 - DNA, 2544 bp, Klebsiella pneumoniae
atgccaaataagaataatggattattcaaactatccaccatcttctttgcaatgcttccggcattgctttctggtttgaataataaagcgcaagcacgtgactttttcgatccctcattcattagctcattgaatggtagcgatccatcaaccactcctgacttatccgtatttcagacccagaacgcgcaggcgccgggggattatcgggtcgatatcatgtttaatggccgctacctggataccaggacgataaagtttgtcgccaacaatcgcgccagcagcgataaccgcgaacccgctctggttccctgcctgagtctaaaagctctcgcggaatatggcgtaaggataaaatcctttccagagttagccgaggatcaaaacggctgtgcaaacttttctgtcattccggacaccaaagcggattttgactttaccgcccagcgcttaaatatttctattccgcaggcggccttatccaccaccgcgcagggatatatcccaccggatcagtttgatgatggcatcaacgccctgctggtgaactaccagttcagcggctcgaacgacatgcaggccaatgatgaatactacagcttgaacctgcagtctggcctcaacgttggcccatggcgtatccgcaacctcagcacatggaataaaaacaatggcgatgccggggactgggactccgcctatctctatatgcagcgaagtattcgctcgatcaacagtaacctggtgatgggcgaaagttcatcgctctcaaccatcttcgacagcgtgccgtttaccggtattcagctggccaccgataccacgatgttgccggaaagtatgcgcggctatgcgccgattattcgcggtatcgccaaaaccaacgcccgcgtcgtcattaaacagaacggctaccaggtttaccagacctacgtggcacccggggcatttgaaatcaccgatatgtacccgagcggcggtagcggcgacctttacgtcagcgtggaagagtccgacggatccaagcaagaatttgttgtgccgttcgccaccctaccggtcatggtgcgtgaaaatcaactggagtatgagattacttccggtaaatatcgtccttacgatggtggagtcgatgaaacgccatttactcaggccaccgcgacctatggcgtctccagcagcctgacgctttatggcggtatgcaggcggcctcgcgctaccaggcgctgtcgacgggcctcggctataacctgggcgagcttggcgccgcctcggcagacgtcacccaggcatggtcgaaaaagaaagacgatgaaaagacctcaggacagtcctggcgggtccgttatggtaaaaacattgtcgaaactggcaccaatgtcaccatcgcgggctaccgctattccacccgcggctttaataccctctcggaggtgctggatagctactctaatgacggtaattatacctctcgctcactgcgcaatcgcaccaacctgacggttaaccaaagcctgggtaaaggcctcggtagcctgtcgataagcgggttgattgaagattactgggacgataagcgaaccaacaagtcaattagcgtaggttacaacggcggtttccgtaatgtgaactactatctgggctacagctataaccgctacacctggagcggaaataactcaggtaaggatgcccaggacgatcagcgcatcaccctgacggtgacactaccgctgagcaactggctgccgggtacctataccagctatcaattaaccaacagcaatccgggatctaccgatcagtcggtctccattggtggcgtcgggctagataacgacagcctggaatggagcctgcagcaagggtacagcaaccgggaatattacagcggcgatatgcgtgggacctataacggtgcccgcggcagccttaatgccggctatagctatgacaataacagccaacgtattgactacggcgccaacggcagcatcgtcgctcatgccgatggcattacacttggccaggacatcactgacgccgccgtgctggttaaagcgccgggcctggataacgtcaagttgaccaacgataacaccatctccaccgactatcgcggttacgctatcgtcccgtacgttacaccttatcgtcgtaccgatatcacgctggacagcaccacgcttggtgaagatatggagctgccagaaaccacgaagagcgttgttccgacgcgtggcgctatcgtgcgtgctaattatgacggcaatatcggccagcgggcctttgtgcatctgaaaaccgccagcggccaggacgtgccttatggcgcaatggttctgctcgccggagatagtaaatcgcagccaagtatcgtcagcgacgccgggatggtctatatgtccggcctgcagcagacggggatccttaacgtccagtggggcaaaagcgccgcacagcagtgcaacgcctcgtttactttaccagccagggaaggcaaggcgaccggcatcagccaaatcgaaacggtttgccattag

SEQ ID NO: 247449 - DNA, 1032 bp, Klebsiella pneumoniae
atgaaaagaatagtttttctaatgacattgctgatgcttggcagcgaagctgctgctaagtgtagctactcaggaactaccactacacaaagcattactttaagtaatttaaaaatcccaacggatccgtccattcccgttggcagtgtactctatacaagaaaaataggaacaggaccatataaaaattttgaatgcagtaagataatgaacgatcagtacattattgatattagtactccggttgtagcaggcgtaacaggactgcaaggtgggcctgtttatgaaacggggatagatggtattggctttcaagtgtcagatctcttgcgcagccgaaatgggcacattgtcgctgcggaagccggtaacactcttgttccaatagaaaaaacgtcacagaattactatcaagatgtaacaatatggctaataaaaaccaagaatgtgattgatacttcaggtacaggctcaaatccttccgtctcttattccgtcgggaatttaacaaccaaccctaaaaaaggtgatagattattatatacactttcatcaattaaatttaaagatataaattatcgaaatacttcttgtaatatatcaacaccacgctctcaggttacgttgaaccgcatcgatataaatcagttaatgtcgctttcgcgtggctcgacgacccccgcgcaaaaaacaattgcgttgaatatagattgcccatcggcatcgatgggcaatactgttacatactggtttaatccagtgggcagtgcaagttcagctggtgacggcatagtagataatatgttatcaggagctatcgcagccaataaggtggggattatttttaaattatccggcagccccatagtcttctatgatatggataaatataattataaaatcaccaacagcagcatgctatataatacgataaacctgacagctgattactatcgttcaagcgatgtcagcagcgaggtcactactggtaacgtcaaagctatgttagaagtcgttattcaggaagattaa

SEQ ID NO: 247450 - DNA, 372 bp, Klebsiella pneumoniae
atgaaacaattaaccgtatttgaaatggaagctatctctggtggttatagctgggatttctcctctgttacctcaacgttaacttcactcgcaagtaatggtgttgaagcattagcatccgtggctttgggggccgttgttaccgcagtaaccggcattgctgtaggtggcatgcttggtggttctaatggtggcctcctcgggtttggtctgctgggtaatgcggtaggggcagttgttggtgctatcgcgggcgcgatcggcggagccgctggtgcactggcattaggctgggacggcacgctgggatacatgaaacaactgctggattctgtactggatggtacctttacgccatggcctgctgcgtaa

SEQ ID NO: 247451 - DNA, 294 bp, Klebsiella pneumoniae
atggctaatttactgcatagcaacccggcttttaaagcagcacaaagcaagctggctattgcgcaatttattggcaatggtgaaatgtgggccgaagctttttcctctatgaaagatattttcgagaaagcaaagcatgcagaagattttatgttttgcggtcgcgaagaatctctctcagccctgaaattcaatgatgtcattttgaatcatgacatgtatggcgacttggtttctgttaacgcagacactggcaatgcacgctataaaataaataccgaagtttcttactaa

SEQ ID NO: 247452 - DNA, 810 bp, Klebsiella pneumoniae
atgacagtgtataactacagcatcataaggattaccccaaatccagttcgagcagaatctatcaatattggtctcgttgtagctacaccaggcggcccagacattcgtgtccttgaaacatcaacaaagataaaagcgataactaaaacgtttagcatggaaaatcttgaggatctaaaggcaagattagagttcctactaaccgaaaagttaacgcttgaagaagctgttagctttttccaaggaagcataagcctttctaatacaggtaatttttcagcaagcactgaatacgagtatgagcgcaacgttgaactcttgaacaaaacgtacataacacctgagagagctaacaaaaaggagccgatcacccagaagagaataatcaccgagctaaagaatcagttttctcactatgggattatggggaaaggatttgatgaccttaacgaccacaaggttgttcaggggtaccctctctctgctcagcagggtttgtatgccgagcttttactgaaaaatggtgtttatcatcttacagaaacgttagatctcaggactacaaatgcgaaacagaaaattggtgatagcgcattcaaagcgataacaatgagcacggccaagacgatgtggagcggtaaagtaaacacattccttgtttatgctgctgatatgtctcaagtacgtatgcactcgcaacaactagcacttgttgataattatgcagatagaatgtttaacttacttagtaatgaggaaatgtctgtttacttcgaacatatgcttacggcggccggaatggctgcataa

SEQ ID NO: 247453 - DNA, 828 bp, Klebsiella pneumoniae
atgcaggacgatcatcagagtgaagggcagattactgaccaagataatctgtttggattagacgtagtaagcatgcgtcctgttctgggaaaaaggagcgctcatcttagacacactgtgattgcaacggatggatgggaatatgcagttaaatgctgtcaggatggagttgattctctagccaagattgcccacaatccaatgctagttccagcaagtgaatggctgtgtaccaagcttgccgacatgtgtggcatagcaactcctcactgcaaaataattcatgatcagagcactggcgttgattactttgggtcgagatatgatttgtctgctgcttccaccccgatggacgagataacctttgcagaacatttgtgtacgtctacagctcttaagaatcaggtttgggctatttacgcatttgatcagtttatattcaatattgataggaacttatcgaactatctgtattccgtcggtcgtgatgggtatgtgatcgtccagccttttgatttcggtttttcctcactggtaatggggtggccaaatagaactggtgacgcgctgctaccatatgggtgcccgacaacggataagtgggtaagcattagaaagttgacaggagatcatccttcctgtagagaatcaggcctagctatacttgataagctttcaaggattcagccaggagcgattgagtccatatgtaatgctatgccagaatcctggctaaacccccttcaaaaatcggctttaacgtcatggtgggcaagcaacaacaggcaaacgcgaatagatgttgttcggaaagaggtgttgagatga

SEQ ID NO: 247454 - DNA, 282 bp, Klebsiella pneumoniae
atggaaaattcaactgcacgaaacaaacaccaggctcggcaaattgagtcctggctgcagaaccagatcgcaattcgcggcactacgaacgtggcaaaagctatggggttaaccaaatcgacagttagtaaatggaaaaaagacttgttcccgaaagtagccatgctgctggctgttcttgagtggggagttgtcgacgatgacatggcccggctggcaagggaggtcgctttaattttgaagagcgacaagggcaaaaaaacgactcatctggaggcgtaa

SEQ ID NO: 247455 - DNA, 234 bp, Klebsiella pneumoniae
atggagcacaacgcgcgttgtgcccgtggatccgttgaagtcaatgcgcggctatttgaatcattactgatggagttgcagtatcgccgcaagagtaccgagcttgagatccgcaccgtgcggctcccgaaggagcacagcgctaccgaatttcttttcccggtagcggtttattcggcccaggagctaacggcggcgctggcggcgcagggcatcaaggtggaggatgagtga

SEQ ID NO: 247456 - DNA, 645 bp, Klebsiella pneumoniae
atgaaatatcaacttatctacgtcgatccgccatggcaatacggcaacaaaattagcaatggagctgctgcgaaccattacgacacgatgagccttactgaacttaagcgcatccctgtttggagtctcgctgcagagaatgccgttttagcgatgtggtacaccggcacccatacagaagaagcgatcgaacttgcagaggcctggggatttcgtattcgcaccatgaaaggattcacatgggtaaaactcaaccagaacgcggaacggcgattcaacagggcgctcaccgaaggcgaactggtagattttaacgatttgctttcgatgctgaatagcgaaacccgaatgaacggcggtaatcatacccgcactaatactgaggatctgttgattgcaacatgcgggtccgggttagagcgtgccagtgcgtcgattaaacaggttgtttattcctgcctgggtggacacagcgaaaaaccatgggaggttcgcaaccggctggaacgtctttacggcgacgttaggcgggtagagctgtttgctcgcgaatcatggcccggctgggaccgatggggaaaccagtgtgacaactctttcgaaattattaacggacatataattaaaaatgaggtgaatgtatga

SEQ ID NO: 247457 - DNA, 519 bp, Klebsiella pneumoniae
atgccatcaaaattcgaacaactctcagagcatttaaacgaatatgccgcagcatatagacaatattggaatgatttagagactataattatcagacttgagagtgagttagtttcatattttggcatcccacataacaatatcgttagcgatagttccgataaatttcataatagatacataactgtaggagctaaaggggatacatctcagtttagtgtccgtgatgtaagggatgtgaaagagctaaaaagaagccaatccgacaggaagatttattttgcagttttagtaaaaattgaaattaatcaagaaaatagcgtaagttatgtaaataatttttttgccgcggaagtcagtatctctgataagaattttgttttcaaactttcacctgacttaggtgacgatattgttatcaatacgccaagagcagttgcaaaaacggtttctttagaaaaagtatgcaaagctatttatgaatcaatcatgaataaatacgacccatcttcattgtag

SEQ ID NO: 247458 - DNA, 291 bp, Klebsiella pneumoniae
atgagcgtaattcatgatttaaagatcggcccgctgttttttaatgctgtagcaaatggcgagaaaaaagcagaagtgagaaagaatgaccgcaattttaaatgtggtgactttctgctactgcgtgagtgggatgggaaatattcaggaaacaagctggtagtaaaggttacgcatatatgcccgcttggtctctttattggcggaaattgggtggcgatgtctatttctcatattgaggataatgatattcagccatttatggatgcagtttttgggggggggcaatga

SEQ ID NO: 247459 - DNA, 630 bp, Klebsiella pneumoniae
ttgaagatcaatacaggtgtaaatacgggaggaagggagaccatcaaaaggctgatgactgcctatggcttcaacactcaaatagcgttagttgaacatctcgaagcatcaaaaagtaccatggcaaacaggatgttacgtgatagttttcccgctgactgggttattcaatgtgcccttgaaacaggtatttctctactttggctgacaacgggccaaggggaaatgtatcctcaaacagaagaaaaaaataagttcaaaaacgagagttcaactacagttcgcccactttcaaagattgttatcccatcagtacggcaggcaaccattgagaacggaacgctcgaagagctggaagatgttttccttgatcagagtttgatacccggaaaagccgaatattgtttgtacgtcaaaactaacgacggcaattacatcgttgacacatcagcaaaacagcttagtaacggaatttggctcatagacatcgacggtatgaaaaacatcgtcaaaattgcgcgtatacccggaaacaaaatagtagttcaccaagatgacacttcatttgaatgttctgtagatgatgtggaagtcgtaggacgagcagtcaaagtaatcaagagcctctaa

SEQ ID NO: 247460 - DNA, 1227 bp, Klebsiella pneumoniae
atgactcttcatcaaatcttatctaaagaattgaaggatttatttgtttatattttaagacgttcgacttttcgtcctcctatcaaaataaacggtgatattgtttctgacttttcaaaccgatgcgagcagttcaaagagtgtctaaatgaatatattgatgctaatgataacgctgcatctgaaagagtaaaatcaagaataaaaacaattgaaaaattacaatatggattaactaaatctcttaaagcatttctatccggtgatattaaggatgcttacgacacctttgatgaagtattatcattcccaaccgtctacaggcatttgagaagaatatctattcctctaaaagaaatttgcaatgaacataaaccattattcagagtaagaaagtccgaaagaccagtcataacaagaaaggaaatttttcatatcccattcacacacagacatcttgttaatgctcaacgttactccgttgcaggcttgccatgtctttacttaggttcttctctctatatatgctggcaggaaatggataagcctgattttgataaactatatctttcatcgtttatctcttgggatgatgaatcttatattttaaacttagcagcggatttcctgtatagtagaacagccagaggattttatggtgacattagtaatagagataaccttgttaaaatatcatatttaactttatggcctttgataattgcatgcaactatttaaaacaaaatgaaaactcttcattcaatcaagaatatatcattccaaacctattaatgcagtggataagtcggcttgaagacagagcaattgttggcatagcatatcgctctactaaagtaaaaaaaacaacaaatacacatctagctactaatgttgtcttgcctccaaaagttagctacgaagataccattacaaaaccttattgtcagaaattactatcaatgtttgagtttactcaacctgtgtcatggcaggttttaaaaacattagattataaagttgataatgaattaaatgaagatcaagaaaaagcaattaaactactaaaacgcaaagaaaggttgagtggtataaatgatttaaatgaagatctcataagtctttatcctttaacagacttctacaaactagagcaaagcatggatcgacttctgcagtatgatgtacttgaggtaaaagttggcggcactttggcggcagagcgttaa

SEQ ID NO: 247461 - DNA, 942 bp, Klebsiella pneumoniae
atgagattaaaatactcagcactcttactcgccgttgccattacaggctgtgataacaaaaaagacgtgatcggttgttcctctgaaatgacccagtcagctctcatggatttaataaaaaaatctgcttatgaaggtctctctgaacaagtcgacaaataccctgacgtcactaatcagaccaaacgaagcgctttggacaagattaaactgaccatctctgaaatctccacaacttcaagtgacacgggcagcacaatgaaaacttgtgaagggaccgtgacgatgaccctacctgcgaacgagtacgcacagctttctgatgcttacagaaagaactttaaccgtaatctcgacaagcaaatggaaagcctgtctttggataacaacgcaaacgccttttcaaaacgcatctcctacaccgcacaggcaaccgacgatcagaaaaacgtttttgtgaaagctacttctaacaacccaatatcagtgggtgccgctgcactgacatcgctttccatcatcaacccgatcgttgagcagcaaaaaatccagcaggctaaggatgcccagcgaagtcaaattgaagcggaacaacaagcacaactcagggcgcagcaacaggataaatatgaggcggagcagcaggttcagcaaaccattcaacaacaatcctaccagcagcctcagcaacaaaaagctgacaaccttgatcagtcccgaatggcttttgcgaatgctgactctgatttgaataccgcttggagcacattaacaccagagaagaaaaaagagttgctgccttctcagcgccagtggatcaaaactaaggacgctatgtgcggcaaagtttcaatgcagggaacagatgctgaagtcaagaaaatggtcgactgccagacgcaaatgaccctttcaaggaccgcgttcttcagaaatcaatag

SEQ ID NO: 247462 - DNA, 522 bp, Klebsiella pneumoniae; identical to SEQ ID NO: 244763

SEQ ID NO: 247463 - DNA, 276 bp, Klebsiella pneumoniae
atgagtgataaaggttgttccgcaattgatgttctggcactgacaataacgctcttttgtctggtccgttacccgaaagctactccgtgtatgcgccgcatgtccgcatttagggcaattcatcatatccgtttctccgccgatgcctctgaagtcgcgttaataatacactacatcaatattgagaaccatttattcaatattgagatcatcaattttcacttccagttcgatgctggtcgtaaatccgctgtccgggttaaccgtatgcgttaa

SEQ ID NO: 247464 - DNA, 162 bp, Klebsiella pneumoniae; identical to SEQ ID NO: 241807

SEQ ID NO: 247465 - DNA, 879 bp, Klebsiella pneumoniae
atgttattcaaatattgcccaattagtgaatactcaattaaatctttagtggaaaataaaatatatcttaaccatcttaatatgatgaatgatagtgctgagggtttttgtaatgtattaagtggcttccctgactacaatgaaaaaaccgaaagatatgatttgatattaaaaacatggtatggagaatccggttggttaccttctgaagatgaatataacgaatatatcggttcaatgagagagatagagcccagtgttcccgaattgttggactctgcaaggatatcctgtttcacaaatacggcattaaatcctacaatgtgggcgcattatgcccgcgacagaacaggaatatgtatagaatttgatgaggataaaattaaagaattagaagatgcttacatcttcaatgttaaatatatggatcgtcctccaactgttgataccgcagtgctaacattaatagcagatcaggtcgaatataataatgatgcacttttcaaaggttatacagatggatacgagcatctatatgaacaagcatttgaggaagggaggagtgtactatgggagatttttaatggaatgctagcaactaagtctcaagaatggtcttatgaacaagaaaaacggctaatatatcttttatccttccctaaagaagagcaattagcaaaaagagataaatctggcataagcatatctctccctgaaggatgcattaaaagtgttattttaggtgaaagaacaactgcacatgataaaagccttatagtttctgcaataaaaaaacataagggcaacattatactgaagagagctgtaagaacacaaggggattatctgttatctattcgtgatgaagattttaactga

SEQ ID NO: 247466 - DNA, 1485 bp, Klebsiella pneumoniae; identical to SEQ ID NO: 218039

SEQ ID NO: 247467 - DNA, 345 bp, Klebsiella pneumoniae
atgataagcgccgggcagctgtccggcgttttgatggtggaaatacttatgtttgaatttaaagctgtctgtgtcagtatttcacatatggaagaaagtgatatcagagttcttcaggtgctttcatcaacaacaaattatctgacttgtgatagttacttagagtggatacatgatacaccttatggttgtgttataaggatgtatgatttcaaacgccatctcctggcgctaaaaagaggtggggtgtcaaaattcttacgcaaaaatctcatactaatgcatcgtgagggggggatctgctttttcattttgatagtgatgccgattattatccaggtatag

SEQ ID NO: 247468 - DNA, 546 bp, Klebsiella pneumoniae
atgccattacctgagcgaatgaaacccgcacgggtcacccgtaaacagatgaaagaactgatcagtcagctgaatggcattctcgatcacatcgataacgggatggacgaaaacaatgaagaactaaaacagatgatggcagactggaatgcaaaggtcgtcatgccctgcgggttctctgattttcgtgatttttcatcctggacaagtgcactagatttcaccaggatggcgcttaatcaggaaaaatacctcgatgactttacatggaaagaactgaacgacgttatcaacttcatacgcaaagcagaaggtagtgcatctgaccacagctatgcactccagttactggagattaatttcaaggcaaacccactggatctcatctatcaccctgactgctggttcaatgatgaagcattgtttcatgcccggctgactaccgaagaaattggtggctacttaatgaaaaaatcaggtcgatggctcaacgatgcaccggatatccaactggtgtatgccatcccccaggatgtttatgattaa

SEQ ID NO: 247469 - DNA, 393 bp, Klebsiella pneumoniae
atggctacccctccgatttaccttaaacaatcctgtattaaaactttaaccgcagttgaagccaatagaaatgcctcaaatcaacacgagtttaacggtgttgctcagctaaaacagatatttggtaacaccaaggttagcaaagatgtagtattctctattagaggaacggatgtatcctgcggagacaccgtcacttggtatgacgccagagagaaaaaccctgacagaagtgccgagtttcgcctatatttccgcgataattatgttatggagcgggcagaggaaggggacaatattattgtaggcatcgacaaaagcgatagaattcatataattttaattaagcagagcaactccgactatgagggtaatatacctagctggcgttaa

SEQ ID NO: 247470 - DNA, 672 bp, Klebsiella pneumoniae
atgtccgaatcagtaattacgcatgatctctttcagaaatcggcgggtgaaaccaaaaacaagaaaatcagagatcggcaactggttgaaaaaattctggagatttatagtcaaaagcatgttgctgaatcacttaggaaagttggtgataatgattggagtagagaaacacttaatcgctggattaatgacaaatgtgaagcgaagctattaacggcaggggaagtttttttactcacaaagatgcttcctgaaccgccagaaaaccatcctaattatgctttccggttcattgatctctttgccggaatcggcggaatccgtaaaggtttcgaggctattggagggcagtgcgtatttacaagcgaatggaataaagaagctgtgcgcacatacaaagctaattggtataacgatgaaaaatcacaccagtttaactccgatattcgtgaaattactttaagtaatagagatgacatttcagaaagtgaagcttatgaatatataaatgaaaacatccctgaccatgatgtgcttttggctggtttcccttgtcagcctttcagtcttgcgggagtgagtaaaaagaactcattaggaagggctcacggatttgaatgtgatgcccagggaactctattctttgatgttgcacggttcttgaaaatgtaa

SEQ ID NO: 247471 - DNA, 204 bp, Klebsiella pneumoniae
atgtatacacagcctactcgtttaattcgcttacctgttgtcattgaatacactgggtatggcaaatcttggatttatcatcttatcaacgaggggctgcttgctgctcctgtcaaaatcagtgcatgtgctgctgccttagtggaacgcgagattgaagagtggattctgctaactagtagcagccctcgtaagagtagataa

SEQ ID NO: 247472 - DNA, 141 bp, Klebsiella pneumoniae; identical to SEQ ID NO: 223068

SEQ ID NO: 247473 - DNA, 393 bp, Klebsiella pneumoniae
atgcaatcccggatgacaaaggacattgtcctgaacgcactgctgatggctgtatggcggcgtaatccccaaaaacaggtgctggttcactcggaccagggcagtcagtacacaagccatgagtggcagtcgtttctgaaatcacacggcctggaggggagtatgagccgtcgcggtaactgtcacgataatgcggttgcagaaagctttttccagttgctgaaacgcgaacggataaagaaaaagatctacggaacgcgggaagaagcccgcagcgatatttttgattacatcgaaatgttttataacagtaagcgtcggcatggttcaagcaatcagatgtcaccgacagaatatgaaaaccagtattatcaacggctcggaagtgtctag

SEQ ID NO: 247474 - DNA, 702 bp, Klebsiella pneumoniae
atgtccagattcattctcgggaactgtattgatgtgatgcgcggattccccgaccgtgccgtggaccttattgtgaccgatccgccttacctcgtcggttttaaggaccgtcagggcagacagattgccggggatgtgacggacgaatggctgcaaccggccacgctggagatgtatcgcgtcctcaaaaaagacgcgctgatggtgagtttctacggctggaaccgggtggaccgctttatggccgcgtggaaggcggcaggattctatgccgtgggccagcttgtgttcaccaaaaactatgcctccaaccgtcgtaacgccagggcccgacgcggatttgtggactactgccatgaaggggcttatgtccttgccaaaggccgccccgtgccgcctcttaaaccgctgccggatgtgctgcccttcccgtataccggtaatgccctgcatccgacgcagaaaccggtggaggcgctacagccgctgattgagtcattcagcgccccgggcgcgattgttctcgacccgtttgccggaagcggttcgacctgcgtcgctgcataccgtgccggacgccgctatatcggcatcgaaatgctggcgcagtaccaccgggccggaaccgaacgactggccgccatgcaccgggccgtcaatacccccgcggcgaacgatgaatggctcccggaggccgcgtaa

SEQ ID NO: 247475 - DNA, 222 bp, Klebsiella pneumoniae
atgaattacgacggacacgaagccctgcgccgcgacatggcggggctggcgaacaatctttgcgacctgaaaaccaccctgaaagtgctggaagacacgtaccactaccggtacgacggactggcggaacggcttgccggtatcagtctgcgacgtctcagcgtcctgatggatgaggcgttcaatattgccctgatgctcgatgaaagctttctggactga

SEQ ID NO: 247476 - DNA, 210 bp, Klebsiella pneumoniae
atgacggatggctggccgctgtatgaatcccgcctgaagggaaaactgcacgtaatcagcaagcgatatacgcagcgcattgagcggcataacctgaatctgaggcagcacctggcacggctgggacggaagtcgctgtcgttctcaaaatcggtggagctgcatgacaaagtcatcgggcattatctgaacataaaacactatcaataa

SEQ ID NO: 247477 - DNA, 597 bp, Klebsiella pneumoniae
atggctaagtctctcattactgctgttctgtctgcactgcgctgggctcactggctggttaagtgtgcggtggtgtatccgctggccatgatgatgttactggttgttctggtgttccggacgggaccgtacacgttcggccagacgctggtgaaaaccgtagagtctgtgcagcaggagggatatgtcattcaggactgcacggggccgaaagaactcaatggtgatgcggtgaacacaccactgcctccggttttacaggaagactgcaccaccgtcagtacggatgcggcagggtatgcagcatatatcgaccagagctatacgcataatattctctggctctggctgctgatggcggtggtgtttaccgggatcgctgtggttttccgtcggactcctgtccgcagggggatcatacggaaaaacggtgttgtcgtcggagagtctggttcgggttcttcaaggctgattctagcccgatctgatgtcagccagattaagcgtgtttacgatgaaatgagtccgggtgaaggggataaatttgttcgggcgattaaggaaaatacccaaatcaggatgaacctgaagaaataa

SEQ ID NO: 247478 - DNA, 276 bp, Klebsiella pneumoniae; identical to SEQ ID NO: 225728

SEQ ID NO: 247479 - DNA, 591 bp, Klebsiella pneumoniae
atgagcgagcataacctgttgttgttgcatgacaaaccagagcgaccgaagcgtgaacataagggcaagatagcggtggcagaaagcgatatgcgctggtgttcagatggcttcgagttcggctgcgacaacggcgaaaaactgcgggtaacgttcgcgctggactgctgcgaccgtgaggccatagactgggcagcaagcacgggaggctatgacagttcaaccgtgcaggatgtgatgctgaggtcggtggaaaagcgcttcggcgacaggttgcccgatacagcggtgcagtggctgacggacaacggttcagcgtataccgcgtatgaaacgcggaggttcgcgagagagctgaatctggagccctgcacaacagcggtgagcagcccgcagagtaatggcatggccgaacggttcgtgaaaacgatgaaagaagactatatcgcgttcatgccaaaaccggatgtgagaacagcactgcgaaaccttgcagtagcgttcacgcattacaatgaaaaccacccgcacagcgcgctgggatatcactccccgagggaataccggcggcagcggacatcgttaacttaa

SEQ ID NO: 247480 - DNA, 369 bp, Klebsiella pneumoniae
atgatcagtaacgtgaaatttaatgagctggctggtcgcgttgaacagctggtgggcaaggtggaagaactggaaaaccgtatcaaggcgctggcagatagtcagggtggcgagatacctccgggcatgtctccggtttccacgctggcggccgagttcggcataagcactaagaaagccgaggaactggcgaaaaactccggcgtgttgctggttaagcataaaggcggcggctatctggcccatgacgagaaattcagggaggcggcgcggctgatactgcgtaaggcaacccggcgtcgcggttcggcctactggttccatccgttgatcggcaaattccagatgagcggagggatcccgaagtga

SEQ ID NO: 247481 - DNA, 210 bp, Klebsiella pneumoniae
atgacaacaacagagttagaaacgttcttcggaacccccaataaggcagctgatttcttcggcgtttctccggaggctttttatcaatggagaaaacgcccaggtagtctgatccctaaaggtcgtgctgctgaagctgcatatcgtaccaatggaaagctcatttttcgtcctgagctttatgagaagactaatccacataaagcatga

SEQ ID NO: 247482 - DNA, 228 bp, Klebsiella pneumoniae
gtgggcggcggcagccgcaacgcgctatggaaccagatcaaggccaaccgactcgggataccgatcaaagtcctcgacgatgccgaaaccaccgtggccggcgcggcgatgtttggctggtatggcgtgggcgagttctcttcgccagaacaggccagagcgcaggtcgcgtaccgctaccgctatttctggccgcaaactgaacctgaactgatagaggaagcctga

SEQ ID NO: 247483 - DNA, 435 bp, Klebsiella pneumoniae
atgaaaaaagaaaaccgcccattacaggcggctaacttatcggatattcgcggatctgatgttacgccaccagcgcccaccacacaagcgccacgccgtacaccgaagaagcaccgcgcccgcgtctacatgctacgcactggcgtagagggatggacagagaacgacatacttcgctattgccgcctttcgtctggacggaactacgccagcgagttagagcgcaggcttgatattcagttagagcgcattgatgaaaagaacccggacggcatcggcgcacacctgcgttaccgctttacctgccgcagcgacgttctaaaagtgattaagttcgtgaaccacagcgccgccgtagctggttacaacggcctttctacgcaggaaattagcgacattctcagcctttacccggataaccacgccgccgcataa

SEQ ID NO: 247484 - DNA, 750 bp, Klebsiella pneumoniae
gtgatactgcgtaaatcagccgtccagaaagaagccattaatctggctggcctgttagcaaatgttaacccgcagaaccttataaaacctgatattcatcgccgcgccgttgcgacaaatgacgacattttagaggcgttttctgggctgagaattgggctgcgaatcctaataaatcctaagtttttttcgagttttgcgaccagtacgcgcacgcgcgaaggtgagttttgcgagtccataaaaaagggcttgccgactatcgccaacccggtttatggttatagcgcacctgcaaaatcaggcgccgggattgagaccccgaacacactaagggcgacacagacgccgaaagcgtctttttttgtgtccagtcactacgcacacctaatcagcggcctagcccgtactgtatcaatggtggcgttagtggggctgcgttcgcgcaggccggtttcctttgtgtccggtagtctcaaccctgctaacgtcaccgccaatcatgacattgagacgtcaggcgttgactccttaaacacaaaggaggctgccgctatgctggctactacccctacccagaatccgcaatttatctggttaatcgcagccgttcgccgcgatatgccgacaattaccgccaaaattcaccatatcgccgcagagactgagcaggaagcccgccgttcactggcgcgggatcacgtttgctttttcgccggacgtattcgcacagggggcgcacatgattaa

SEQ ID NO: 247485 - DNA, 192 bp, Klebsiella pneumoniae; identical to SEQ ID NO: 31746

SEQ ID NO: 247486 - DNA, 1122 bp, Klebsiella pneumoniae
gtgacttttatcatatactcattgcttttttttgttatggtcttcggtaattattatgtttgtaagcgaataggggtaacagaaaatccatataaatatagaacgatggacggtttaagagagatttgtgcgactctggttatcttccatcattttttctggagaggagggagtagtgatgatttcttttggtcaacggattatcttagcgctaacgtaaaagcaatcgcaatgctcattggacatctgcctgtcgcattgttctttatgatttcaggttttttattttattttgttgctgcatccaaaaagcctttaatccctttttttaaagggaggctgttaaggatttaccctccggttgttttttcgttattaattgcaatgctcgggctggttattgttaatagtgataatacggtttgttctttaggagtgtttaagtatattcctacaccactaggttttttttctggcggagatgtctgtgggtttaagatggggcctgttaattctggcattctctggaccttgatatgggaatggcggctttatgtttttgttcccatcctgatgatgttgctgtcttatttcaagagcgaaattcttgtcatgtttggtcttttttctctggttttcatgctgtggttggtagattttttcgatgaaaaaagcgcttcttatatgacgttatttatctctggatttctgacggcaattctgtcgaagagaaaaatatctaaaggacatcaattgatcctgtttttttcaggagcttttttatttgcagtctgccttgttgtgataaggcatgtatataatccagtagttgcgatatctctaacgccaatgttcctttcaatagcaagcggtttctctatttttggcttgcttgccaacgaaaaatttcaacttctgggtgtgactagttttagtgtttatctaaatcacggtgtttttcagtttatctcaaagcattatctgtatgattatggcatgtatttgtggcagggggcatctgttttattaatagcagtaacagcgcctgtgctttataaatatgttgaattggcttttcaggcgaaaaaagcatcatcactctcaattatggttaaaccataa

SEQ ID NO: 247487 - DNA, 573 bp, Klebsiella pneumoniae
atgaacgttgagatgacacccaagttctctaacaaatatatgagagctccactcgatgtaaccttaaggtcaaacatcaagctatctcattcggcggactcgatagatacggtcacatacaaggtgaacggtgaagtaatacccagcggcaaaaattattgggctcaactgatctcgggtttaaaagaaaagaaatacgagattacaattgatgttgttagtaaacttggacagagaggttcagcatctgttgagtttgatgtcgttaaaaacgcagtgcctaattgtacattgagctacacggaaaccaacctaagctggagctttaccaataaatgtgatgatactgatggaaaaatggttagatatgaatggttcatcaacggcgaattaaggaacgttttcggtagtacggctacactttctaaaaaccttaaccgtggtaagcaggacataaaagtaattgcttatgatgatagtggagactttgcaacacagcacgtgacagttttcggaccggctgaagaggcaagtaagtctgaaaacactgtatcaataccaagcagtgagtag

SEQ ID NO: 247488 - DNA, 312 bp, Klebsiella pneumoniae; identical to SEQ ID NO: 129149

SEQ ID NO: 247489 - DNA, 561 bp, Klebsiella pneumoniae
atgattaaacgtaccgggatggttgtcgtcgccgtactgctaagcggctgtctgccgaaaccgcaaccggctcatctttatcaggagccatctgcaggtgaaaacaccgcaaaactcagggtgcgtggatttaccgacagcacgacggtgtatcgcgtcgacagctgcgagcaggcctttttcctgggcagcctccgcgatcctgaccatccggaacggaacccatccagggcgtcagaccggggttacaaaaaggccgacgtgccggaagataacgcgcccctggattacatggaggtcaccctgccggcaggccattatattcagctccgtccggccattttcaccacagatcatcagatttgctccgtgatgacgccgtggtttaaaccggaaaaaggcgtgctctacgaggtccgcagccagctcactcccgacggcagacaatgctatgtgcgcacctggaaagtggatcagcagaacggggcggtcacaccggtgacaggaccgcagtctatccgggatgtgatgacctgtgcaaagcatccggtatggcagtag

SEQ ID NO: 247490 - DNA, 135 bp, Klebsiella pneumoniae
atggaaaattcgattcagtttgatacggggacgtttgtcaccaccacggctgaacaggataccgatctgtgcccgcaatcggcaccgaactggagtatctgctcgcgaagtatttacctgaccatggtgacataa

SEQ ID NO: 247491 - DNA, 873 bp, Klebsiella pneumoniae; identical to SEQ ID NO: 129150

SEQ ID NO: 247492 - DNA, 618 bp, Klebsiella pneumoniae; identical to SEQ ID NO: 129151

SEQ ID NO: 247493 - DNA, 135 bp, Klebsiella pneumoniae; identical to SEQ ID NO: 129152

SEQ ID NO: 247494 - DNA, 513 bp, Klebsiella pneumoniae; identical to SEQ ID NO: 129153

SEQ ID NO: 247495 - DNA, 498 bp, Klebsiella pneumoniae; identical to SEQ ID NO: 129200

SEQ ID NO: 247496 - DNA, 474 bp, Klebsiella pneumoniae; identical to SEQ ID NO: 99300

SEQ ID NO: 247497 - DNA, 396 bp, Klebsiella pneumoniae; identical to SEQ ID NO: 235552

SEQ ID NO: 247498 - DNA, 630 bp, Klebsiella pneumoniae; identical to SEQ ID NO: 220000

SEQ ID NO: 247499 - DNA, 321 bp, Klebsiella pneumoniae
atgtcagtatggaacatcattgttttgatattcgctattatcatttatgttcttcccggcgttatagccagttcaagggagcataaaaatgctacggcaatttgggtgctaaacattgtcctgggctggagcttcttgggttggatagccgcgcttgtctggtctttcacaaaccctggagtggtaaagctcaaaccgcaggtgtttggtgtggagtctgccggctctggttcagtaggcgatactaaaaaatgcccgtattgcgccgaaacaataaaaaaagaagcaatattgtgccgattttgtggcaaagatttataa

SEQ ID NO: 247500 - DNA, 657 bp, Klebsiella pneumoniae
atggctttctgcaataaacgtatttgcatcaatgatggaaatgacacgcataataccgtcataagcgaactccttcgccccgtggaaagccgcccagtctcctttaataaacgggtggttctcgcacaccacggtgatgtagtttttgctcttcaggtcagcgccatcaagataactgttaatcgccgcttcgtttttggtcatgctggttacagcatagcgcgatgcggaaaacgcctcgttgacgaggaaggggttagattttccggctacctgtttccagttcaccccggcggaagtatgcaaagatgtcccggatttgatcacgctgtgggtgttatacagatactcgccggggcggttataaataatctggccgccaacgttcagagcagcctggagcagcagagtatcttgcacagtatttcccgatggcgcaggcataaagattgcgcccagttcaccacgaagctgatcctgcccgacatcaacaaagttaacccggtcagtagcgttccaggttccaggtgtgttacccgccgtggtataaccggagccgataacaaccgacgccgccagtttccagaatgtaccgccgtaggaaatcagctggttataactcgtcagtgtccatgggccatcttcataacgccctaa

SEQ ID NO: 247501 - DNA, 723 bp, Klebsiella pneumoniae; identical to SEQ ID NO: 110055

SEQ ID NO: 247502 - DNA, 192 bp, Klebsiella pneumoniae; identical to SEQ ID NO: 110054

SEQ ID NO: 247503 - DNA, 849 bp, Klebsiella pneumoniae
gtgagggggaatttttttttttcggggaatagatatcttctgggttatgctcatatgaaaaatactgcttggaatgtgttggtttatagccatgctgacagcgcgactactattcttattacttatgctaaaagtgtacttgttctgctaattgtaataattattacattttcacttctttcatatttcattgcctcccgtatttcacttcctttagaaaagcttgctatatctaccaatgctaaagatataggggcttcgttagtttatattaaagctatcaatgcttggtatgccgaagctgatcgacttaaaaaggcactttttacgcatgttaaggtaatgatggaaagggttgattctttaaatgaggtggcgcttaaagatccccttaccggcgtgaacaatagattggggttttcaactaaaatacagaataacaagtatggggcaggagcttcagttattgctattgatgttgatttttttaaaaaaataaatgatagtttcgggcatggggtcggagatgaggtgcttgtttctttggctcagattattaagtcttgttgccgtagtgaagatattatttgtcggtttggtggagaagagtttgttgtttttctgccgaatacatctgtggtaacagcggagtgtgttgcggagcgtattaggagtgttattgaacgtactgttttccctaataacttgcgtgtcaccgtatctgctggtgtggcaacacaagatgatcctcttggtgggatcgattttttgctgaaaaatgctgacgatgctctttatcaagctaagagagaggggcgtaataaagtgattgtatatagcgctatttga

SEQ ID NO: 247504 - DNA, 741 bp, Klebsiella pneumoniae
atgagaattaaaaagcctcaccttcgtccgatagtcataaccttgtccgttggtgggattttgttaacttctatttttctgattgccgttattatggtttttcagcgcgaaaatatagaaaaagatttgcttgatgctaattcatcgtacgctatgaaaatgtcagatgtaatgagtggttatattgaaatggctcaaggtgaattagcatatggagcaaaaaaaataaaatcaactaatgatattgactcacttaaagatgaggcggataggttaagattgcagtctggtatgtttaattcagtttttgttgttagtaatgatgctgttgttctggcgacttcgccagaatctcttgatttagttggtacccgcttgaattcaagtgccagcaaattggcgattgaggaaaagaaaccattcatatcttcaccgttcaaatcagttactgggaatttgattattttgttgtcacatcctatttatgataagaatggcaattacatagggcatgtcggtgggtctatatatctaaaaaaacatagtttatttagcgatgttttgagcaggcattttttcaagagcgacactgaaattagcattgttagtgatgatggaactgtgatctttaataacgatatcagtgctgttggtcggcccatggttatgtctgatgatttgaaatcaaagttaacggagtctgatagaggtgagggggaatttttttttttcggggaatag

SEQ ID NO: 247505 - DNA, 483 bp, Klebsiella pneumoniae
atgacaagacttaacaggctctatgccagcagcggtccggaggtgatcattgaaacgctgcagatcaccgttggctcagatgttcactacctgtaccaggggtatgaggatattacggcgacgacggagagcggcaataccgtaacgtttaccgcctgcgcgattgacattgcgctgccggcgcgcaacgcggacggtacgcaagatttgaaattcgccctgtgtaatgtcgatggtgttgtgtccacgacgatccgcaatgccctggctaacaggttgcctgcatcgctgacataccgcagttttatctccacggatttagccgcgcctgcggcagtgccgtatacgctgaaaatcaagtcgggttactggacggctacagaggtgcagatcactgcgggctatatgaatgtcctcgatatggcctggccgcgttaccgctacacgctccctgtcttccccggactgcgttatatcagctaa

SEQ ID NO: 247506 - DNA, 183 bp, Klebsiella pneumoniae; identical to SEQ ID NO: 129125

SEQ ID NO: 247507 - DNA, 1308 bp, Klebsiella pneumoniae
atgccggacggggaaatcatcggcacacctgagcggcctgttttgttcagcgggcgcagttcagccgctgccgggtataccgtagcaggaacgcctgaaagctggcttaacagtgttgcgcggctggcatacggcaactacgcgatgatgacaggcatcgccgcagcactggcagcgccattaatcggggtggcagatcgtgacggattcgggattcatttttatgaacaatcgagcgccgggaaaacaaccgcgcagaacgtggcgggcagtctatacggaaaccctgatgccttgcgcctgacgtggtacgggacggcgctggggctgataaacgaggccgccgcccacaatgacgggctgatgccgctggatgaagtcggacagggcgcagacccgataagcgtttctcagtctgcctatgccctgtttaacggcgtggggaaattgcagggagcaaaggaaggaggcaaccgggatctgaaacgctggcgcaccgtggcaatcagcaccggggaaatggatttagaaacgttcatcgccaccgcaggacgcaagacaaaagcggggcaactggtgcgactgctgaatatcccgctgagtaaggcggtgcgctttcatgagcaccagacagggaaagatcacgccgacgcgctgaaagacgcttaccagcaccatcatggcgctgccgggcgggagtggattagatggctttcagaccaccagcagcaggcgattgatgccgttcgtgagtgtgaagtcagatggcgaagtctaatccctgctgactatggggaacaggttcaccgtgtaggggcgaggttcgccattctggaggccgctttactgctgggtggcgtggttactggctgggatgctcaaacgtgccgggatgcgatacagcacacctataacgcatggctgaaagagttcggcacggggaacaaagagcaccagcagatcatcgagcagacggaggcgtttttaaatgcctatgggctgagtcgattcgcgccgctgggttatgacccgcgcgatttacccatccgtgatttagccgggtacaggaagaaggggaaccacgacggcgacccgataattttctacaccttcccggcaacatttgagcaggagatcgcacggggttttaatgtcaggcagtttgccgaagttctcaagaatgcaggaatgctaacaccaccaacgagcgggcgaggttatcaggggcgggtaagggaaggagggcggcaaattcgcgtttatgtgctcaacttcatggatgaggaaagcagccagccagaagaataa

SEQ ID NO: 247508 - DNA, 327 bp, Klebsiella pneumoniae; identical to SEQ ID NO: 223636

SEQ ID NO: 247509 - DNA, 720 bp, Klebsiella pneumoniae; identical to SEQ ID NO: 16816

SEQ ID NO: 247510 - DNA, 726 bp, Klebsiella pneumoniae
atgacagcacacacaatgggtttcagagccgctgaccgctggctgcaggcattactgacctggacaccgggtcagacggatatgattaaaacggtggccctggtcctgatggtcaccgaccatgccgggttactgctggcacacaataacgagataatgcggcttctgggacggggctgttttccgctgttcggtctggcatggggaatgaatctggcccggcacgcggaaatacgccagtcgcagctgaacagcctgtggggctgggcgctggttgcccaggtgtcgtttatgctcatcgggtacccgtggtataccgggaatattctgtttgcctttgccgtcacgggccaggtcctgcggtgggtcagccagccgtcctggtattacaccctcccggcggtcggactgctggtcgcctggatacccctgtcaaccggcagctacggcatggccggagtgggcatgctcaccgccagctggctgctttgccgcgcacagcatgcaccggaacggctgggatacggggtgctgtgggccctcatggtgttgctgatgaatatgcataacgtgagtgaatcggcggccgggctggcgattgcgctgctgacgctgatcgtgtgttcatctgccggagaacgtgtgaaacgcttctggccgcggcatttctttgtgatgttctatgcagtgcacctggcggtactgggtattgtcatctcgatgtaa

SEQ ID NO: 247511 - DNA, 726 bp, Klebsiella pneumoniae
atgagagcacaatacacatttccaggcgcgacagacagctggcttcagcgcctgctgacctggacaccgggacaaacggatatgattaaaacggtcgcactggtactgatggtgactgaccacaccggcttactgctggccggaaacaatgaagtgatgcgcctgctgggacgtggttgttttccgctgttcggtctggcatggggaatgaatctggcacggcacgcggaaatacgccagtctcaactgaacagcctgtggggctgggcgctggttgcccaggtgtcgtttatgcttattggatacccgtggtataccgggaatattctgtttgcctttgccgttacgggccaggtcctgcggtgggtcagccagccgtcctggtattacaccctcccggcggctggactgctggtcacctggatacccctgtcaaccggcagctacggcatggccggagtgggcatgctcaccgccagctggctgctttgtcgcgcacagcatgcaccggaacggctgggatacggggtgctgtgggccctcatggtgttgctgatgaatatgcatgacgtgagtgaatcagtggccgggctggcgattgcgctgctgacgctgatggtgtgctcatctgccggagaacgtgtgaaacgcttctggccgcggcagttcttcgtgatgttctatgccgtgcacctggcggtactcggtattgtcgtctcgatgtaa

SEQ ID NO: 247512 - DNA, 717 bp, Klebsiella pneumoniae
gtgctgagacgacgcttacaaaaactgcacctgcgggacacccatttcgaaaccgtccacggcctcgacgccccgggccagcacagttcggcctatgacctcgcggtgctctcgcgggcgattattcatggcgaaccagacgtctaccacatgtacagccagaaaagcctgacgtggaacgggatcacccagcaaaaccgtaacggtctgctgtgggataaaaccatgaacgtcgatggcctgaaaaccggccacacctcgggcgccgggttcaacctgatcgcctcggcggtggatggccagcgccggctgatcgccgtggtgatgggggcggacagtccgaaaggccgcgagcagcaggccgctaaactgctgcactgggggcagcagaacttcgataccgtgcaggtgctgcagaaggggcagaaggtcggcaccgagcgtatctggtacggcgataaagagcagattaagctcggcaccgatcaggatttctggttagccctgccgaaggcggaagtgtcgcgcattaaagcgaaatatgtgctggataagaaggatcttgaggcgccgatcgccgccaatcagagggttggcgagatttcactgtatgacggcgacaaggtggtggggcactatccgctggtcaccctcgaaagcatcaataaaggcggagtgttctcgcgaatgagcgattacctgcatcacgagctgtaa

SEQ ID NO: 247513 - DNA, 366 bp, Klebsiella pneumoniae
atgagcgcacgttccagttatacaacccgaacggagggctataacgtgggatttccatcgccagcatcagactatgtggaggggcggttaaccgtcgataagctatgcagcatcggccctaatactagggtcgtacagactgaaactggttatgccgtaattgatttcttctctaaaccaaagcaaggagataccgttttaattcaatacggcggaggcacagattttgcaaaaattatgggccgggcatttattacaagagacggtgaagcgctggagggtgaggccctggatgatgttacagttgtcggggtagtgacattcgttatcaatcgtacagggagggatgatgattcccccgtatag

SEQ ID NO: 247514 - DNA, 240 bp, Klebsiella pneumoniae
atgccgcgtttatacgaaatcgagacggcctgccgtaaggcaatagatatcctgcctaacggaaagcgcatcctcaccaccaggcgatttctgcaggagctggagagatataactggcactggtcgccacggcaggctaaccagtggatagagcactatgagacgacattccgggatgtctcaacgcaggaaggcgatgagcgcacgttccagttatacaacccgaacggagggctataa

SEQ ID NO: 247515 - DNA, 174 bp, Klebsiella pneumoniae; identical to SEQ ID NO: 235518

SEQ ID NO: 247516 - DNA, 195 bp, Klebsiella pneumoniae
gtgctggccgtgggcgtgtttttccacctgatagcccggcttgtcagaaagcagcctgagctggccgtccaggccggggaaatcttcgggctgggaatggtggtgttcgggggataccgcattcttaacgccctgattgctgaagccgaaaaagaggagaaagcttgtgaaaagcagcctgaagaacatcgctaa

SEQ ID NO: 247517 - DNA, 747 bp, Klebsiella pneumoniae
atgagcacagcactatctacaatggcagggaagcttgcctcccgcctcggcatggatgccggaactgacctgatgaacacgctgaaaaatacagcatttaagggtgggaatgtcactgatgagcagttcacggcactgctgatcgtcgccaaccagtacggactgaacccgtggacaaaagagatttatgcattcccggataaaggtggaattgttcctgtagtcggcgttgacggctgggctcgaatcatcaacgaacatcctcagtttgatggaatggagtttgcctacgacaaggaagaaggcgcgtgtacctgcaagatataccggaaagaccggacacacccgaccatcgttactgagtacatgggagagtgcaaacgcaacactcagccatggcagtcccaccctacccgtatgcttcgtcacaagacgctgatccagtgtgcgcgtctcgcatttgggtttgctggcatcttcgatcaggacgaagccgagcgtgtcattgaagggagtacgacagaggttcatgtagggcatgagtcggatggtcgtcgcccggaactgatcgcaaaaggcgagtctgccgcacgccttggaactgttaagtaccaggaattctgggtggcgttaagcgcagaagagaaacaggttatcggcgcggttgagaagcgtcgcatgtatgacatgagccttgcagtcgacaacgcagaacctgtcgatgccgcagcgccggaggataaatga

SEQ ID NO: 247518 - DNA, 360 bp, Klebsiella pneumoniae
ttggtatcaggtattgcctcaacagaatccgaatcactgtccgaatccgagtcgctgtccgaatcggagtcgctgtccgagtcagagtcgctgtcagaatccgagtcgctgtcggagtccgagtcgctgtctgagtcggagtcgctgtccgagtccgaatcgctgtcggaatcggagtcgctgtccgagtcagagtcgctgtcggaatccgagtcgctgtcagagtccgaatcgctgtcagagtcagagtcgctgtcggaatctgcatcagcatccgactcaccgatatcacttcctgccacgatattaatcgtcagcgtagccgtcgccgtatcaccatccgcatccactatcgtgtag

SEQ ID NO: 247519 - DNA, 717 bp, Klebsiella pneumoniae
atgggtgtttccacccgttccatcgcgatcaatagacaccacggtgtttccgccgacataactcagagtaatatagttacccaacgtatcgctggaaccattccagccgaccaacagcgccgaaacatcgatatgatctccctgggcgaccgagaaatcgctccagatatcgctaccgttgcctccggtgttgtcatccgccagcaggttgtaaaccagcgtatcggctcccacacccatgctgaaggtgtcatcgtaagcggtactatgaacgctatcgtcattgacgctgccggcgatctgcggatgcagatcgatcgtcagattcgccgtcgaactgccgccatcactactgataagggtataagtaaatgtctccttagacgttattgcatcggtattcacccccccgttcaactgataggtgtaaccaccttgcccattaatggtcaggatcccgtattcaccatacagcaccgcatttccattagatgcgctggttcccgtatcgttagttactgtgccatcagaatggaaggtccagttggtcgcgatacccagattgttttcgccacttatcgtaaagccgctatgcagcgaaccaagcgtgtctggtgttccattcgcatcggaaccgtcgagaatattccctaccacagattgcccgaccgtcagatgcgcatcggtaaggatctctgttcctgctacgctcgctga

SEQ ID NO: 247520 - DNA, 165 bp, Klebsiella pneumoniae; identical to SEQ ID NO: 33404

SEQ ID NO: 247521 - DNA, 2151 bp, Klebsiella pneumoniae
atgaaaaaaatcacgagcgtgtgcccctactgcggggcgggttgcaaacttaaactggttgtcgacaacaataaaatcattcgcgcggaggccgccgacggcgtcaccaaccagaaccagctgtgcctgaaaggctactacggctgggattttcttaacgatacgcagctcctgacgccccgtcttaaacaaccgatgatccgctaccagaaaggcggcgccttcacgccggtcagctggcaggaggcgattcgctataccgccagcaagctcagggagatcaaagagaagcatggcccgcgcgccatcatgaccaccggctcctcgcgcggcaccggcaacgaaaccaactatgtgatgcaaaagttcgcccgcgcggtgctgaacaccaataacgtcgactgctgcgcccgcgtctgccacggcccctccgtcgccgggctacagcaggcgctgggcaacggggcgatgagcaactcgattagcgacatcgaaaactcgaagtgcctgctggtctttggctacaactgcgccgactcccatcccatcgtcgcccgccgggtaatcaaggcccgggacaacggcgccaaaatcatcgtctgcgatccgcggcgcatcgaaaccgcgcgcattgccgatcgtcatctgcagctcaacaacggcagcaacatggcgctggtaaatgccttcggctatgtgctgctggaggaggagctgtacaacaaaacctatgtcgaacgctataccgaagggctggatgcttaccgcgaggcggtgaaggattacgccccggaagcggtggaagggattgtcggggtcagcgcgcgggaaatccgggaggcgatgcgcatgttcgccgccgccccatccgccaccattatgtggggcatgggggtcacccagtttggccaggcggtggacgtggtgcgcggcctggcaagcctggcgctgctcaccggcaacctgggacggcccaacgtcggcgtggggccggtccgcgggcaaaacaacgtacagggcgcctgcgatatgggcgtgctgccgaacctgtttcccggctatcaggaggtcaccgaccccgccgtgcgggcgaaattcgccgccgcctggggcatcgacccggcgctgatggacgaccaggtcggcacccgcatcactgaggtgccgcataaagcgctgaccggcgagatcaaagcctattacatcatgggcgaagatccgctgcagaccgaagccgacctcggcctggtgcgcaaaggcatcgaggcgctggacttcgtggtcgtgcaggacatcttcatgaccaaaacagcggaaatggccgatgtcctgctgccggccacctcctggggcgagcacggcggcgtcttcacctgcgccgaccgcgggttccagcggtttgaacaggcgatccctccggcgggaaatgtgaagcgcgactgggagatcattagcctgctggccagcgaattgggctatccgatgcactatgagaacaaccagcaaatctgggacgagatgcgcgagctctgcccgctgttctacggcgtgacctgggagaaaatgggcgatatgggccatgtccagtggccgtgcccgaccctcgatcatcccggtacgccatggctgtataaagacaaccgcttcgacaccccctcgggtaaagggcagctgttcgccaccgcctggcgcgcgccggcggagcgcccggatgacgagtggccgctggtgctctgcaccgtgcgggaagtcgggcattattcgtgccgctcgatgaccggcaactgcgccgcgctgcagtcgctggccgacgagccgggacgggtgcagatgaatcccgcggatgcgcaacgactggggatcgccgacaaacagctggtgtgggtcagctcccggcgcgggaaggtgatctcccgcgccgacctcagcgatcgcatcaatccgggggcggtctatatgacctatcagtggtgggtgggcgcctgcaatgagctgacccaggataacctcgatccgatctccaaaacgccggaaaccaaatactgtgcggtgaaagtggaagcgattgccgaccagcaatgggcggagcgctatgcctggacggcctacagcgacatgaaagcgcgactgaaagccgctgccgacgtctga

SEQ ID NO: 247522 - DNA, 174 bp, Klebsiella pneumoniae
atgaaaacaatctctctcaaactcgatcccgacacctgggatcttgtccttgatgagctgggtaatatcgccacggttgaaaatccctacgcctgcgctcaggacgtagcgacggcatgcctggctatacgcggcgctgatgaatcccctaatgattttggtaaaaatcattaa

SEQ ID NO: 247523 - DNA, 690 bp, Klebsiella pneumoniae; identical to SEQ ID NO: 29609

SEQ ID NO: 247524 - DNA, 909 bp, Klebsiella pneumoniae; identical to SEQ ID NO: 16669

SEQ ID NO: 247525 - DNA, 2013 bp, Klebsiella pneumoniae
atggaaaactctttatttttaaatttccatggaagaataattgatcatttgggtatacaaatgtatcaaagcccgactgctgctattgcagaaatggtttctaactcatgggatgctgatgctaccgaagttaaaatcacgctccctacacatgatgatttctccattaccattcaagataatggtattggaatgactcaagatgaatgtcagaataaattcctgacagtcgggtatgataagcgtaaaaacaatgcaaaaactctttctcgtgatttaaaaaggccattaatggggcgaaaggggattgggaaatttgcaggttttggtattgcatctattataacagtaacaacaatcagcaaagatactggtgagaaaacatcattcgtacttgatattgataaaattcgcgactcttcgaatgacgattatattaacacatctaaacttagtattgatgttatagatagacttgaacctaatgacgaattaaagccgaagcatggcactacaattaaattaacaggtttgaaaatacaacgattgatttcagctgatttttttgcaacatcgatggctcgccgtttctctgttaacgcggcggctgcaaacttttatgtaagtgttgatgggaaaataatccccaccgaaaacttccttgttcaatcagaaatgtctttccctaaggattataaatcaaatgaaaaacctgaagggctgacagaaattgataaggatggatggggaaccgaaatgataggagaccatcaaataaaatggagagttttctttttaaaggaaactataaaggaagaggagttgcaggggatttcaatattttcccatggaaaattatcacaaagacctttcatgtttaatttaactggcggactccctagtcaaaatggaccagaatatatgactggtgcagtattggctgattatcttgatgagtttgatgaagatgttatttcaactgagcgtcaacggttgaattgggggcatcatcatttagcgacccttgaagagtgggggaaggctcgtattcgcaatttattgagaatatggaaagaccgaagggctgaagaaaaaacgaagctcatagaagataaggtttctgactttagctcgagaattgaaagacttgctccaagcgaaaagaaagttataatgaccgctctcaaaaagttggcaagtataaatcaaattaatgccgagcaattcaaggagttaggtaattccattcttacggcgtgggaaggcggtcgcttgaaagaactaatccggcaagtggctgaagttcctgatatggatagtgaaaagttgctgtcaatgcttattgaagctaacactattcaagctctgcatacagcagagtctgttaaagcaaagctggatacaataattggcttggaatcacgaatcaaaaatcgtgaattagaaaatgcagtgcgtgattacattgcaaataatccgtggttaatatcacctaagtgggaaacttttgctaaggaacgaaatgttggcgacttagccactgaggcagcaaaagattcaggtcttgataaggatgaagattttaatggccgtgttgatttagttctggcaagtggagagcatctgctcatccttgagttcatgcggcctgggttaaccatcgatttagatcatttggtcaggtttgaaacatatgtagatacatttcgtggacatctcgaaagctctacgggctcgagatttaatactgctactggttatttagttgcagataaaatagccaagaaaaatcctgcatttttgaaaaaagttaaaaaacttaaagaggatggtcttgaaacccttacatggagcgaccttctttctgaggctaaacgccaatggcaagaatttttagaccacctagtcgaacgttcacctaacgataagcgaatccatgcgttaattaattctaaaacgctgaaagtctcggaaagtgaaaaaactcaagagtcaacgcaacaggtgcattaa

SEQ ID NO: 247526 - DNA, 1029 bp, Klebsiella pneumoniae
atgaaagcgatagatctcttctgcggcgcaggtggcttgacggttggtcttaagatggctggctttgacgttgtgtcggctgtcgaaaaggagcctattgtttctgaaacctatatgcagaatcatcctgatgtttcattgcgtactggagatataagagaattatctccggtaaaaatcatgagtgaacttggtctcaagcaaggtcagcttgaattgctcgcaggatgtccaccatgtcagggtttttcaagcttaagaacgagaaataaaaactcttctgtcaacgatgaccggaatgatttgatattttcgtttttggattttgttaaatgtttccttcctaaagtggtgatgttggaaaatgttccagctttagccaaagattaccgtataaaaatattttgcgatgaactgaagcaattaggatatttcatagattctaattcagttgcgattgaagatgcttcttactttggtgttccgcaaagaaggcgacgtatggtaatgttagcttcaagattagggtatctaccaagagcaaaaaaaaacagtgtgaaggtaactgttaaggatgcgattggagatttgccattaccacagcatagtaatgactttttacataatattaaagaaaaccgaactgagaaagtcatgaaaataataaggctgatacctaaagatggcggtagtcgtgctgacttgccatatgaatactggctaccttgtcataaaaaatacccaaacggatttaaggatgtttatggccgtatgaaatgggatgcggtatctccgacaataacaagcggctgcaccaatccatcgaaaggacggttccttcaccctgtacaagatagagcgatcactttgcgagaagcggctctattacaaacttttcccaaaaactattacttcccaatcaagtacggcaaagatagagctgctcttatgattggcaatgcgctacctcctgagtttatcaagcgtcatgcagaagtaataaaaaagcaccttaatgaattaggataa

SEQ ID NO: 247527 - DNA, 312 bp, Klebsiella pneumoniae
atggtaaacgacagcaaagccgaggctttggaggcaaaggggctgtatcgtagggctgcgacgcgctggcaggaagtcatgatgctttgtgctgaggacgatgatcgggaatgggtaaagcagcgacgtgatacgtgtctgacgaacgtgaagcgcccgccagtgaaaaccgatgattacgacgatctgcataaagcagtcactgagacacaacaccgcatggggatagcgcaaccgaacggtaatgccttccggttaaatggcggcaagaagcaacgacagcccaccagcgggggcgatggttcgcagtaa

SEQ ID NO: 247528 - DNA, 462 bp, Klebsiella pneumoniae
atgacagcacaaatttcagcctacgggcggctggtggcagatccccagaccagaacgacgaacagcggaaccagcatggcaatggggcgtttagcggtggcactcccctgccatgcagtagagggcggagaggttactttctggctgggcgtggtggcattcggcaaacaggccgacgcactggcagaacacgttaaaggcgatttagtcagtgttgccggaacaatgcaggtcaatcagtggacgggcaaggatggaggaacgcagcaggggtatcaggtagtagccgacagcgtgatcagtgcgaggacagcaaggccgggcggaaagcgtggcgcggcagctagaacaaatgaagtcaacaaaggccataccacgcaacccgcgccgggatgggaaatatacagcacccctgatgattttgaccagcgcccaccattcgacgatgaagcgccattctga

SEQ ID NO: 247529 - DNA, 222 bp, Klebsiella pneumoniae
atgagccagttacaactgattgatgctgcctgccagattgaacaggcacaggctgttttatccatgtggctggagagcaccaccaaagacactagccccgaccttccgcgtcttatcggttcaatcctcactttgctgcatggcgtcccggaggcaatggaagaagccgaaagcaagctggctgactatgtgatgcgtgaatatcgggagggcaaagcatga

SEQ ID NO: 247530 - DNA, 843 bp, Klebsiella pneumoniae
atgactatcgaaaaaagccgattcaattcggaggccgccccacaatccagcgttaaccagggcgaatatagcactaatgactttgccgctattgttcccgttatttccggtcaaattggcgggcgtgaggccagtattgttagtgctaaggcactgcatacagcgcttggagtaggtaacgacttttcaacctggataaaactacgcattgatgaatatggctttagcctgagtgctgattacgtggtttttgattcctcatatttcaggaatcaaagttcaaattttgaacagggtagccccggatgggtgacaaagcgtggcggcgaccgtcgcagtaaagattatggcctttctctgggaatggctaaagaactggcaatggttgagcgaaacgaacaaggtcgcgccgttcgccgttactttattcagtgtgaagaagccctacagcgcagcgtgccagagattgccgctcagtatcgccgccagctcaaagcccgtatcggtgccgccaacctgtttaaaccgatgtgcgtagcactggaaagcgcccgcgcagaacagggtaaacagacgcaggctcgccactacagcaacgagagtaatatgatcgcccgcattgttttgggtggcatgacggcgaagcagtgggcgcaggcgaatagcattactggcgaaccacgcgacagcatgaacgccgggcaactggaacacctcacctacctggagagtaccaacattacgctgattgatatgggtatgggatatgaccagcgtaaagccgagctaatccgcctctctcagcgctggttagctaaacatctgggggctaatcatgcttaa

SEQ ID NO: 247531 - DNA, 435 bp, Klebsiella pneumoniae; identical to SEQ ID NO: 141224

SEQ ID NO: 247532 - DNA, 291 bp, Klebsiella pneumoniae
atggccaatcttcgtaaagcagctcgcggtcgtgaatgccaggttcgcatcccgggcgtctgcaacggcaaccctgaaaccacggtattggcccatatccgcattgctggattgtgcgggaccgggattaagccgcctgatctgatcgccgctatcgcctgttcatcctgtcacgatgaaatagaccgccgcacgcgcctggtagatgcggagtatgcgaaggagtgcgcgctggagggaatggcccgaacgcaggttatctggatgaaagaggggctgataaaagcatga

SEQ ID NO: 247533 - DNA, 669 bp, Klebsiella pneumoniae
atgtttgagttccaatttatctattttattagagaaagatttgttgatacagcgccagaaaaaatctttccgcttattactgcgtttgataataaatttttaccaagttatgctgatgaaataacgccaaatggggtgcaaaaagttattagaatagtgggtttaaatgagtttgataacgtatctgtattattttcgtcagagacggtaaatataaatattctttgtagaagtactaggccaacaaatgaagagcttattgagaagctagattttatcacaacagcccttcggaaaatcaagcctgaggttagagcgtggcgccttgcatctattgtaacattgatcagacgaactactaatgagtttaatactcagatgtataataagttttttaaaggtgacaatcctgaagagttctttgaatggaacacaagaagggctgcaaggagacaacatggtgaagaaaccctcaatgttatatctacagtcacccgtggtcctgttatgaatgcaggcaatcctaatgaaaatttcgatgcgattgttactcagttagatgtaaatacagttgtagaaaaatcagctgacagattttctattacgactgaattgtcatcacaacttcttgatattgcgagtgacaatgtagaacgtttgttggggtga

SEQ ID NO: 247534 - DNA, 636 bp, Klebsiella pneumoniae
atggttcatgacaacatgaagaataattgggtgcaagatgtaagtgctaatacaggaactacctacaataaggtggtttttaattacttgaataaaattcatacaagccatgatgaaaaaagaaaatcatcaacaagtatgagttcttactttgagcttgccgagaatgttattacggactcaaaggttaatgaatcagatgatttagatggcataatgcggtttgtttacaatatgcttgtttccgaggattttggttatggtgatacacctgagctaaaatatgttgtcgaaaatatttttagtaaaaataaatcccaaggacaaatgtcattcattaacatggcgacaaggaaagtatttatttcagatagtaatactattgagaagttttttgctcttctaatgtctcttgaagagtcagatattgagggtatcgcgcttacaataattacgatgttttcatctcataaggatgtttgtgcatgtgaaggtgcattgtctctcttggacaaattcggcaaagatgaagatgctttaaaaatagctaggaacatcagggattttgaatattcattcctcaatgaatataaaggaaaagttattaccaatcttatgcagtatgtaaaagagtga

SEQ ID NO: 247535 - DNA, 552 bp, Klebsiella pneumoniae
atgactatttatatcaggaaggtaacaaagtctaaatgggattggaggaatccagttaacggtaatgttgctgcaaatgcacttggtaccgatggtgtaacaaattgctgcagaacttctgaaaatacattatctatttggaaagttgacagtgaaaaccttgacagtgaagatgataaaaaagttgttgcttcattagtgactaatggtggtagcctatcatctatagattgtatttttttgagtgacgaagaccttgaagagtgtggtttgtcggtaagccaaaaagatggcgattcatttatttctgatataaagtcaaaacattataatataatagatctcaacatgagtagtgttagtgctttgggtttaataataaagaaaaaaatatccggtgtacaagatgggaatgttgtcacgcaaactgctaaattaaagaaaatagatctcggaagtataagatcatatatccggaaatatatccctcaggaaactacagaaggtgcaactctaaagctgaagagtggttttagtaaggtttacgactga

SEQ ID NO: 247536 - DNA, 1074 bp, Klebsiella pneumoniae
gtgagcggaaaatatatcgccattttaaccgcatacggcgcatccagattcgcccaggcggcgcagtccggtgaccgggtcgattttgctgaaatggctgtgggcgatggtggcggtacagtgccagagcctgacgcgttaagcaccggactggttaatgaggtttatcgcgcgtcgctgaatcgcgttgttatcgctgaccaggccgcaaatgtgatccgcacggaaatgattatgctaccgcaggtgggcggattctggttgcgtgaagcggcgttgtatgacggatccgggcagtgcctggcggttgccagcctgccaccatcgtataaacccatgctggcagagggatcggggaggctccaggccgttaatatatggcttgcggtcagcagtaccgtcagtgtggagctgaaagccgatccatcagtcatactggcgtcagtcgctgaggtcaataaagccaaagatgaggctaaggactataccgaccaggtggccggagacctggacgaaagtattcagcgggctatcgctgccgccatcaccgacgcaaagcgtgacttttgggaagatgacaacccgatcggcacggtcagattttacagccagaatgtcaatcctaatgacctgtatccgtggtcagagtgggtctacaccggcgaaaacaaaacgatccgcgtggcgaaagcagatggctcgaacgtcgggacgaccggcggtagcgataccgtcacgctccagcgggataacttgcccgctgtacagattgaagttagcggcgaaaccagcgagctacccgagcagacgctgaccaccacgagagacggcgaacataatcatggcggcgtggctggcagggatgacccctgggaaattggcggtgatgtaaggcagttctttaacccgaaagagtggggcgtgacagataacgccggagagcatgatcacgaagtcacagtaccggcgcacaaacacacgaccagcggcaaaactgccaacctcggcgagggtcaatcgttcagcgtggttgaagctcacacactgctgatgtgctggagccgcgttgcctga

SEQ ID NO: 247537 - DNA, 546 bp, Klebsiella pneumoniae
atgaccatcgccaccttaactcccgccgaggcccaggcgcagattgcccagggcgccagactgattgatatccgcgatgcggatgaatatgcgcgcgaacatatccccgatgccgagctggtgccgctcgccactctgaccagcggtgcgcccctgaatgcccgggccggagagacggtcatctttcactgccaggcgggttcccggacgcagaataatgcgattcgtctggccgcggccgccgcgccggcgcaggcctgcctgctggcaggaggaattcaggcgtggaaagccgcggggttgccggtagtggaagattcatcacagccgctgccgctgatgcgccaggtgcaaattgccgctggcgtcctggttttactgggggtgctgctgggctataccgttaacggcggctttttcctgctcagcggcgcggtcggcgccgggctcaccttcgccggcgtaaccggcttttgcggcatggcgcgtctgctggcgaccatgccgtggaaccggcgccagggggttaaaacgcgctccagataa

SEQ ID NO: 247538 - DNA, 579 bp, Klebsiella pneumoniae
atggctgagccgctacaactcccgccaccgcttgagggtgatatcagtctcagaacgctgggaagactcgccgggcggctggataacatcgacctgagcgtactgatggtctatctcgtcgatattgtcgacagttccgcgctgccatggctgggcgagcagttctcactgttcggcgatggctgggagctggcggaatctgacgatgtacgccgcatgcttatcaaatccgctatcgagctgcaccgctacaaagggacgccgtggtcaatcagggaaattatccgccgtttcggcttcggcgaagtggatctgattgaaggcactggccagattggctacgacggcaaacacacttacaacgggcttttcgttcatggcgatgcggaagcctgggcggtatatcgcgtcatccttcaacagcccatcactaacgatcaggcggcgctgttacgccagacgctcgctgcttttgctccggcccgctgccatctggcaagcctggagtatcagtctgtcgccattcgctacaacaacaccgccaactatgacggcagctataaccacgggagcagttaa

SEQ ID NO: 247539 - DNA, 1104 bp, Klebsiella pneumoniae
atggcgctgacagaacccgattttattgaacgcgatgccgacaaaatcacggctgaaatgattgctcagtacgaagccgcaaccggcaagacgctgtaccccgcccaggctgagcgcctgttgattgacctgtgggcataccgcgaaatgctggtcagggtagcggcgcaggaagcggccaaacagaatctggtcgcctttgcccgtgagccgatgattgattacctcggtgaactggtcggtgtttaccgccttgccgcgcagcctgccaccaccactctccagttctccgtggatgaggcactggccattgatgtgctgattccggcaggcacccgcgtcagcgcttccgacagcattatttttgccaccgatacggacgtggtgctgaaagccggattgcttctggtcaatgccacggccacctgtaccgaaccgggagccgctggcaatggctggcaacctgcgcaggtcagtcagttgctcgatgagattgataacgtcgacctgcaggtgaccaatctgatggcaagttctggcggttcagagcaggaagacaatgacaggctccgcgagcgtatcaaactggccccggagtcattcaccaacgccggaagccgtatggcataccgctttcatgccatgcaggcccatcccaacatcgtcgacgtcgctgtgctctccccggttcccggcaccgtagaactgtatccgctgctcagtaccggcctgccggaggacagcatccttacgctggtagagagtttctgctcggacgaaaaagtcaggccgctcactgacaccgtgcgggctaaaacacctgtgcaggtggattacgccattgaagccaacatcactatctatcgtgatcaggatgccaactcgataaaggacaacgccaacagcgccatacagaactgggtggcgtcccgtaccgccacgctggggcgcgatattgtccccagtcagattatcagcgtgctgtccgttgccggagtgtatcaggtcgaactggtgacaccagtgctgaaggtagtggcagaaaacgaatgggcaaactgtacggcgatcactcttaacatgaccggggtgtccgatggctga

SEQ ID NO: 247540 - DNA, 348 bp, Klebsiella pneumoniae
atgaaaacaacttccgtattctggcaaccggccctgcaggcccctggcgaaatcgtccgggggctggatgatatctggcaggccattcaaatcatcctgcgaactcctcgcggcagcgacccgcatcgcccggagttcggcagcaacctgcatctttatatcgactggcccatcgaccgggctatcccacatgtggtgcgcgagtccgttgatgccatccggcgctgggagcctcgctgccagcttatgtcggttaaacccgccgtcgacggtgaacatcttacgctccgggtgagctggaaaggctctgacggacagccccggactcaggagcttttatggcgctga

SEQ ID NO: 247541 - DNA, 513 bp, Klebsiella pneumoniae
atggcaggcgtcacccgtcaggtcggtacggtcagcgccgtcgatgccgacaaggttcaggcccgcgttcgtctgcctgagtgcgataacctgcgcactaactggcttaacgtactgcagcgcaacacccaggataacaaggattactggctacctgacgtgggggagcaggttgaggtgctgctcgatgccaacggcgaggatggtgtcattctgggcgcggtgtattcagacgtcgataagccaccgttcagcgacaaaaacgtccggggcacgaaatacgcggatggcgcagagttcagctataaccgcgcgacccatacgctgacggtcaaaggtggtatcgagcgcgtagtaatcgaggttgcggtaggtatcagcctgaaggggaaaaccattgatttgaccgctgacaccaccacggtgaacggcaaccttgaaatcaacggcaatgcccactccacaggcagcatgctctctgacggccagaactccaatcatcactcccactga

SEQ ID NO: 247542 - DNA, 1170 bp, Klebsiella pneumoniae
atggctgagataaacagcactgcacaggtcgcatcagcgttaaccggcgtcagcgatgttctgagtccggtgttcacgctgtggtatctgcagaagaacatcaccaccgatatcgccccctatgtcacccgcgtaacctacagcgataacatcaaaagcgagtccgataccattgaggtggagctggacgacaccgatggccgctggctggataagtggtatccgggcaagggtgacacgctgacgctgaaaatgggttatcagggcgagaagctgctgtcctgtggtacgttctcgatagacgagatcgaggtgagttcgcccgcgtccgttgtcgctatccggggcgtggccacgtcggtcaacaacgccctgcggacaaaatccagtcgtggtttcgagagcaccacgctggcggctatagccggacggattgccaaaaagcatcagctgaagctggttggcagtattgagtccatcaaaattgaccgggtgacccagtatgctgaaacggacgtgggcttcctgcgtcgactggccagcgagtatggttatgccgtgaaagtggtcagcgaccagctgattttctctcatctggccacgctgcgcgatcaggagccggtaaaacagttgaagccacaggatgtggccagcttttccctgcgtgacaccatcaaccgcgtctacaaatccgcaaaggtaaaacaccagaagagcagcgataaaaagctgatcgtctacgaagctgatggcggtaccagcgaaagcgacaaacaaaccaaaggcggtaaggtcaccagtgccgactcactgaaggtcaacagccgcgtcagtgatccggacagcgcccggattaaagcagattcggcgctggccaggcataacgaataccagcagaacggctcgctgtcgctgatggggacgcctcagttgactgcaggcaacaaaattgaactggtgggttttggtcagttatccgggccatggctgataactactgcccgccatgcgtttgaccgtaacagcggctacatcaccgaactggaagtggcacgagggccggttacgcagggcaaagcgaagaaaggtaaaaagaccggaaaaacccagacgctgaccgtctataaaccggacggcagcacgtccacggtaataaaggagaaaaaataa

SEQ ID NO: 247543 - DNA, 213 bp, Klebsiella pneumoniae
atgtttcttgaacatgttacccgtgacggagagcgctgggactctctggcatggcagtactacggcgacccactgggctatccccggataattgccgccaatccgcacgtggccattacgccggtgctgccctccgggctgttgttactgatcccggttatcgaggctgaagaagccaccacagaagaggatattgccccatggctgagataa

SEQ ID NO: 247544 - DNA, 885 bp, Klebsiella pneumoniae
atgtttgcggtactgggtgatattgagtttgaactgattacctactgggacggctttgaggccactttcggtgtcgattatgcggaacatgcccgcatagagggtaagcccggcctgcagttcgtcggcgacaagctggacgaaatccagataagcctggtcttccatcagcattattgtgtgcccgacgtggagctggcgagactgagaacggccatgaaagcccatcaggcgctggcactggttttcggcaacggtgactatcgcggctggtttgtgattaccgacgtgaccgcgaccagcgagcagaccgacagcacaggcaacgtgctggccgtcaatgccaccgcatctctccgggagtacatcggcgacccgaagaacctgctacagcctcctgcgatacgcacgcaggttcccggcgtcggggcggtctccggtgccgtaccttctccctccggggtggcgcagtacgttcgcgacggcgtcaactatgccaaacaggcgcagtctgttctccagaccaccatcagcgccgttcgggtggcgcagaaaatgaaggataaccccgccgtcgcgctgacccgcgtgccggggctgatgagcggactgggcaacgtgtccggggcgttaggccagagcgttccggcattcaatgcgctctctgaatccatgcctgatgccatcagtctggccagagccaccagcgatgcggccacgtatgtacaacaggcacagtcttcgctgagcggcgtggacggcagcaatatcgcggcagcgctggatgccgtttccgggcagcttaactccgccagcaccaccttcactcgtatgtcgccggggttaagcaccatggcagctaaaattctggcgaggagtgtgtga

SEQ ID NO: 247545 - DNA, 2466 bp, Klebsiella pneumoniae
gtggccagtgaattttcagtcggcgtcattattggcggcattgtcggaagcagcttccgctcagccgtcagtggcacccgacgcgccctagattccctgggcgatacatcgcgccgcctgcaggaacgccagaatgccttaactcgtgcaactgaacgttatggccagttaggctcttcccggatgcagcgcctcaacagcgaactgctgcgggtaagccgcacaatggagcaaattgaacgccagcagcgccgtctgtcagcagtatcagccaccagtgacgcgctgaaagctaaccgcatggcgctctatggccagggagcagagacttatggtatcgcccgaacgctgggcgcaccggtcatggcctctgtcaaacaatattcatcgtttgaatcccagctacgcgatatcagtgtcaccggtgatctggattcaaggcaggaacaggccatcggtactgccattcgtcgggcatccctgcaggtcaatcagctccaggaatctctgttgagcggcgttggtcaactggttgccgatggcatgaatccgcagcaggcagcgacctttgccgggatgctcggtaaagcggccacggccaccaaagcagatatgactgacctcgcaaaaatgacctatgcctttagcgatgcgctgaaaattaccgatgccaaagagctggagcaggcgtttgggattgcggcaaccggggccaagctaggctcgtttgagctgaaggatatggcgaaagcgttacccggtatggccaaagccttcgctgcacgtggtatttacggcaaagacgccataacccagatcgtagccagtctggaagtgggtaaaggcagcggctcagcggaagaggccgtcaccaatatgtcaaactggctggcggcaatgggacgcggagataccacgcagaaatacgctaaggctggcgtggattaccagggatcaatgcaaaattatgtagcccaggggttctctcaatatgaagcctccctgatgattgccaaccggtttatcgacggtaaaggcaaggcatttgtgcagcaatggaaggcggcaggctcaagaggcgatcaggaaggccagcagaggctgatggagtccttcggactggcggaagtctttaccgatatccagaccgtgaaccatctactgtctatgcgtcagggctgggataagtaccaatctaacaagcaggaaatgaacactccctctgcaatgtctacgctggacaaggatgcagcgaaacaaaatgatacgctcgaaggacgttggcgcagaacgcagattgggtttaacgactcggccattagcatcggagaatcattacgtccggcgttgatccagctgggggaaacattcatccccttaatgaacagcgttggaaaatggattgcggctaatccgcaactcgtgagcggcacaattcaagtgattggcgcattacttgcgttcaagatggcaaccatcggcctcaagctcgggctgaatctccttatttcacctttcgtcaacgtctggaaaaatgccgtgctcctgcgggccaactggcttcgcctgacactcgcgctgggtgaaggcggcaaacttcgctggctggtgaccggcttcagcgccgtcgccagaggagccagaacactgggtggtgtgctgtcaggtgggctggttcgcggcattatgatcgccgggcgtgccgttctctggattgggcgggcattgctgatgaatcccattggtcttgctatcaccgccgtcgcggcggcggcttatcttatttatcgtaactggggggctgtcagcagttggttcaaacagcgctgggctgacattaaagaggcttttaacggcggtatcgtggggattggtaaactgctgattaactggtcgccggttggtctgctctataaagcctttgcggctgcgctgaaatatctcggcgttgatctgcccgcgaagttcactgacttcggtggccatcttatcgacgggctgataaacggcatcaaaaacaaatgggagtcgctcaaaaccaccgtcacagatatgggtgacagtgtcggcggctggttcaaggaaaagctgggtatccattcgccgagccgcgtgtttatgggctttggtgacaacatcgcgcagggtgccgctatcggcctgcagcgtaccacaccactggcagcgctcgccggacaacgcctggcaacagagatgactcccgatgttccccgtatcccgtcgccggaaatcatggctgcgggatattcaggtcgtggcgcagttgcaactggcggcggaacatctggcggtatccaggtcagctttaatcctcagtttttcctcaatggcaaagaaaccgcagcgcctgccggactgaccggcgcactgaatatgagcctgcatgaactggagaaaatgctggagcgtctgctggctcagaaacaacgtcgggggtacgaataa

SEQ ID NO: 247546 - DNA, 213 bp, Klebsiella pneumoniae; identical to SEQ ID NO: 85992

SEQ ID NO: 247547 - DNA, 315 bp, Klebsiella pneumoniae
atgtcacagacccaatccgatacttttaagctgtcttaccccttcaccaccgcagcaggcaccagagttgagcaggttgaactgaaacgcctgacggtcaaagacctgaagcaggtgcgcaaaatcagtaaagacccggctgactgggacgaaccgctcattgcccgtagcaccggtattctccccgaagacctcgataacatggatcttgccgattacatggagctgcagaaacgatttcagcaagtcactgggctgggcaagagcgacgaaaacgctgatgcaggcgcaggggctgctggcgaggtggtttag

SEQ ID NO: 247548 - DNA, 282 bp, Klebsiella pneumoniae
gtgaccgtcgagattgaagataaaggcgggaactgtggttcgattggcatgggaaatggtacgtggtttaccatccttgatattccgggggtggaaaacctttttaatacccagaaaaccaatgatccgattgactgcacccgctctaaagcacggaagctcgctgacctgattgaggcatgggagccacctgaccactggttcaccggcatcggcaaatctgaaggaaaggcgcttcttatcgccttcctgcgtaactgcaaaggctttcgcactcactga

SEQ ID NO: 247549 - DNA, 522 bp, Klebsiella pneumoniae
atggcaaagattgagatcaaccgcatcacgaatgccaacatctacctggatggcgctaacctgctgggccgggccgaggaggtcaaactcccggacgtctccatgaccatgcaggagcataaggcgctggggatggtgggcaaagtggaactcccggcaggcttcgacaagctggagggtgagatcaagtggaacagcttttaccgcgacgcgatgctgtctgctgcgaacccgtataagtcgctggcgctgcagtgccgttccagcgtccagcgctacagttcgcaggggctgattgacgaaatcccgctggtcacattcctgacgatcatgttcaagaagaacccgctggggacgttcaaacagcacgagaacgccgagttctctagcagcttcacctgcacgtacatcaagcaggtactggatggtgaagagctgctggagctggactatctggccaacatcttccgagtcggcggcgttgaccagttgactgactaccgcatcaatatcgggggctga

SEQ ID NO: 247550 - DNA, 1428 bp, Klebsiella pneumoniae
atggcagctaactatctgcatggcgtcgaaaccattgaggtggaaaacggtgcccgcccggtaaaaatggtgaagtctgccgtcattggcctgattggtaccgccccgatgggggacgtcaatacgctggtgcagtgcctgtctgagaaagatgcagcggcgtttggcagccagctcaccggttttaccattccgcaggcgctggatgcgatctacgaccatggggcaggcaccgttctggtcattaacgtgcttgatccggctgtgcataaaaccgctgtggccgatgaagatgtaacgttcgacaaggcgacgggcaaggcacagctggctaatccggtggtcgcgcagctggtactgaaaccggacagcgatggccagccttatgtggaaggtcaggactactcgcttgatgcacagaccggagtgattaccaaccttggtaagagcattgccgcagatgcaacggtgaaggccagctataactatgctgatccaactaaagtcaccccggctgatatcatcggtgccgttaacgctgcgggcaaccgtaccggcatgaagctgcttaacgacagcttcaacctgtttggctacttcgcaaaaatactgattgccccggtcttctgcacccagaacagcgtctcggttgagcttatcgccatggctgagaagctgggcgcggtgacctacatcgacgcgccgattggtaccacttttgcgcaggctctggcggggcgtggcccggaaggcaccattaacttcaacaccagctccgaccgcgtccgtctgtgctacccgcacgtcaaggtgtacgacgcggccaccaacagcgaacggctggagccgctgagccagcgtgctgcaggtctgcgtgccaaagtcgacctggacaagggctactggtggtcgtcctccaaccaggaaattctgggtatcaccggcgtggagcgccagctgtcggcaatgattgacgacccgcagagcgaggtgaacctgctcaacgaacagggcatcaccacggtcttcagcagctacggcagcggcctgcgtctgtggggcaaccgtatggcggcatggccaacggtcacccatatgcgcaactttgagaacgttcgccgtaccggtgatgtgatcaacgagtccctgcgttacttcagccagcagtacatcgacatgccgattacccaggcgctgattgatgcgctgacggagtcggtcaacgcctacggtcgcaagctgattggcgacggtgcgctgctgggcttcagctgctggtttgatccggcccgcaacgaagagacggagcttgccgccggtcacctgttgctgagctacaaatacacgccaccaccaccgctggagcgactgacgtttgagaccgagatcacctcggaatatctgttaaccctgaaggggaatagctga

SEQ ID NO: 247551 - DNA, 252 bp, Klebsiella pneumoniae; identical to SEQ ID NO: 33172

SEQ ID NO: 247552 - DNA, 465 bp, Klebsiella pneumoniae
atgaacgttctgcccgtcctcgatgcagtactgacccggttacgggagaagctgccgcagctgcaggtggagtacttcccggagaaaccggctgagtatcgcctgaatcatccggttggggcgctgctggtgagctatgccgggtcgcgcttcgataagccgaatgatatcggtgcggtgctccagactcagactatccagctctgcgtcacggtagttttccgccagctcaacggtaaaagaggcgcgattgacgttctggatgcagtccgtcgcatcctcggtggctacaccccgccgaactgccgccgtcgcatctggctgacccgcgaggtgtttatcggtgaggtcaaggggctgtggcagtacgccctcgactttgccactgaaagcgtctttatcgaagacagcgatttaccgtccggcccgctgttaaccgaagtgaactatgaggaaagcgagtga

SEQ ID NO: 247553 - DNA, 498 bp, Klebsiella pneumoniae
atgaggcgctggccgaaggtgacgttatccgtatcctgcgcggggtgtgatatgtactgcaccctcgcggatttgcttgaacaggttcctgagcggacgctaatccagctcaccaatgaggagctggacttcgactcgcccgcgacggtgaaaactgaggtggtggacagctgtattcgctatgccgatgaactgattgatgcccatctgcgcggacgctataccctgccgctggcggaaataccgaccgttctgcgggacattgccatcacgctggtgcgttaccggctctacacccgccgcccggaaggggctgtcccggataccgtgaaggatgaccacaaagaggcccggcgacagctggaggggttgcgtgacaacaagctgacgctggggctgcagtccactcaaaaagacgtgcctgagtccggtgaaatccgggcgcgggcacgtcgccccacctttggcgggcgcgatggcttactggagaaatactga

SEQ ID NO: 247554 - DNA, 357 bp, Klebsiella pneumoniae
atgggtacaactcaacaggtcattctgaccaccaccgtgacggccagcgcggcgctgacgcaacagcgctttgtcggtgccgataatggcccctgtcaggccggtgccgtggcgctcggtgtggcagaggtggatgctgctgccggtgatgtaacgccggtcaacgtactgggtattgttgccgtcgaggctggtgctgcgattgctaaagggcagaacgtccagtcggatgagaatgcctgcgccgttccccagacagccgcatcgggcgagaccccggcgggcatttctgccgggattgcgctggatgaggcgctggccgaaggtgacgttatccgtatcctgcgcggggtgtga

SEQ ID NO: 247555 - DNA, 954 bp, Klebsiella pneumoniae
atgtctgactatttaaagggtaagcgcgttgttgacccggtgctgaccagcatcgctcgcggttataaaaatgccgcatttatcggcgaacgcatcttccccattgtccagaccgataaggaaggtgtgaccgtcccgaccttcggtaaatccgcctttgttgagtacgacaccgagcgtgccgtgggggctgacagtaacgtcctggtacgtgagaagaccggcaaactggatctggttcttaacgagcacgatctggccgcgccggtggactaccgcgagcaggcggagtcgatgttcaacgaagaggccaaggccattcgtcgcgtgaccagtggcgtcaacctgaagcgcgaactgtatgcggcccgtctggcgcaggacaaaaacgtttacccggcatcgtccgttaaagcactggcagctgctgaacgctgggtcggtggtaaaggtgatccaattggcattattgaaggtggcattgaggcggtacgtaacaaaaccggcctgcgcccaaacctgatgaccatgggggccagcgtcatgtcgctgctgaagttccacccggcgattcaggccgcgattggagccaacgagcgcaagcgtatcaccatcgaaattctgaaagaccttttccaactggaagatgtggcgatcggcgagccggtctccatggcctccatgaaagacgcgcagaacaaggacaaagtcccgaccgatatctggggtgacaacctgatgctgcattacgttggcaaaccgcaaccaggcaccgacagcgccgacgaaaacgagccgtcattcggttacaccctgcgccgtaaagggatgccggtggcggataaatacgacggtgtcggcggcaaagtgaagtactgccgttataccgatatctacaaagtcgccgtggtcggtggcgatgccgggtatctcgtcaccaacattgtgaaataa

SEQ ID NO: 247556 - DNA, 1098 bp, Klebsiella pneumoniae
atgccagccattcacatttttaaagccggtactcataccgatatgcacggcacgaaattgccgttcacgcaaagcgatcttgccgcctgcgtgaaagcctatgacccgtccgtccatgaagcaccactcgttatcggccaccccaaaacggaagacccggcgtggggctgggtgaaatccctgtcgcttaacggcggcgatctgctggctgagcctgaccagctcgacccgcagtttgccgaactggtgggcaacgggcgcttcaagaaggtctcagcctcgttctatctcccggactcaccgaacaacccgaagcccggcacgctttacctgcgtcatgtcggctttctgggggcgcagccaccgtccattaaggggcttaagcaggtttcgtttggtgagaaagaagaaggcgtcgtggagtttgccgactggagtgatatcaccaacgcctctttatggggccgtctgcgcgattttctgatcgcccagttcgggctggacgagaccgacaaggtgcttccttcatggcaggtggactccctgcgtgaagaggcttaccgcgacaccgggaagtctgaaccggacttcagtgaacacaatcccacccctcaaaaagagaacagcaccatgactgaagaagaaatcaaagcgcttcaggcggaaaacacgcgtctgaaagcggaagccacccagcgggcggaacaggaagcgaaggctaagcaggacaaactgcacgcggacaacgtctcctttgccgagaagctggttggcgatggccgactggctcctaaagcgaagtcggttgtcgtggccattctggacgcggtctctgcaggcgacaagccggttgagtttgccgaaggcgatatccgcacccctctggccacggcgtttaagacgctgctggacagcactgagccggtactgaatttcagtgagcacgcgaccaaagaccgcgtgaacacggagatcaaaacgacgtcagcagagttcgctgaagccgacccggaacgtctggcgctgcatcagaaagcgctggaactgtcgaaaaaagaaggcatcagctacgacgctgctgtctcccgctgcctgtaa

SEQ ID NO: 247557 - DNA, 459 bp, Klebsiella pneumoniae; identical to SEQ ID NO: 40311

SEQ ID NO: 247558 - DNA, 822 bp, Klebsiella pneumoniae
atgagcgtgacaacggctgaactggcgtactgcatgacgttgccccccaaacgggctatcagttacctgaagtccaaagggtatagcttcacgtgggactgggaggagatgtggcaggatgcccatgcccgcgcctttaccgtcgccaaagtgacccgccttgatatcctggaagatattcgcggggcactgcagcaggctgtcgatgaaggaaaaacaggccgctggttccggcaggagctggagccggagctgcagcgtaagggatggtgggggccacgtgacaccaccgacccggtaacgggcgagccggtcaccatccagcagggcagcccatggcgtctcgacaccatctttcgcacaaatatgtccgtactctacagcgccggtcgctgggctgagcagatggagaacgtcgacgacaggccgtactggatgtataccggcatcaacgacagccatacccgcaagagccatctggcgctgcatggtctggtgctgcgctatgatgacccgttctggcaggcgttctatccgccgaacggctggcgctgccgttgtggcgtgattgccctgagcgcggcggatgtgcgtgcccgtggcctgaaggtgtcaggttctggcgcagctctgggatgggagctgaagctggtctcagagaaaaccggcgagatgcagaacgtcgccaccttcaataccggcaccacgaaggtggctaccgacgtcggctggtcttatgcgccgggggcagcataccgtcccgaccttgcccgctatcaggggacgcttcaaccgctggcacagcaggaactgagaggataa

SEQ ID NO: 247559 - DNA, 1497 bp, Klebsiella pneumoniae; identical to SEQ ID NO: 40309

SEQ ID NO: 247560 - DNA, 1524 bp, Klebsiella pneumoniae
atgagccagcttgctcctgttttgcctgacacctcggcgctggatatccccgccgttctgatgccctaccagcagcgctgggtggctgacacgtctccgctcaaggtgattgagaagagccgccgaaccggtatcacctgggctgaggcgtccgatgacgtgctgaccgcagcctcttcagcccctgcgggtgggatgaacgtgtattacatcgcctataaccaggacatgaccgtcgaatatattcaggcgtgtgcgatgtgggcgcgggcattcaactatgccgccagtgaaatcgaagagggtttctgggaagaggacgaagacgacaagcatatcaagacctacaccatcaaattccctgactccggcttccgcgttgtcgcgctctccagccgtccgtctaacctgcgtggccgtcagggcatcatcgttatcgacgaagcggcgttccatgagcaactggacgaactgctgaaggcggcgctggcgatgcttatctggggcggtaaagtgcgcgttatctccacccatgacggtgacgataacccgttcaatacgcttatcggtgatatccgggccgggcgtcaggggggcagcgtacatcgcattacttttcaggaggctgtgtcccaagggctgttccaccgcgtctgcctgcgtaccgggaaagaatggtcggaagcatccgagcaggcgtggatggcatcggtgtacaaattctacggtgccggtgcatcggaggagcttgactgtgttccggccaacggtggcggagcctggctgtcccgcgccctgattgagtcccgtatgtcggctggcacgccggtgttgcgtctgacctgcccggagggttacgagctgaagcccgatgatgtccgctggagcgagacgcaggagtggcttgatacacatctgaaaccgttgctggaggcgctccccgctgacgcacgttctttcctgggtcgcgactttggccgcagcggtgacctgtcggtggactatcccctgctgcaggagaagaacctagttcgccgcgtgccgttcgtgctggagctgcgcaacgtgccgttcaaacagcaggagcaaatcgcctggtacctgatggatggcctgccaaacctgatgggcgcggcgcttgatgcccgtggtaacggctcttacctcgccgaatacgccatgcagcgctacggctccagccgggttaagcaggtgatgccaactgaaaactggtatcgcgagcatatgccgccggtcaaggctgcgctggaagatggcaacctggtggatttaccgaaggatgaagatacgctggatgacctgcgggccgttcaggtggtaaacggcgttccccgcgtgccggaacagcgctcaaaagcgaagtctgacagtggcaagcgtcacggggattcagccatcgcactggcgctggcgtacttcgccagtcgtgaaattaacaaagggccggtgaaggcaagctcacgccgtcgtcgtcaggcggcccgtatgctggaggattactga

SEQ ID NO: 247561 - DNA, 546 bp, Klebsiella pneumoniae
atggccagacgcagcacgatagaaaagctgccggaagacgtgcgtcgctggcttgagcgggcgctgactgaatccggcttcagcgggtataacgagctggagtccctgctgcgtgagcagggttatgtcatcagcaaatcggctatccatcgctatggccagaagattgagcgccgctatggcgctatccgtgcagccactgaagcggcccggatgctgaccgaaggtgcggctgacgatcaggatgcacgttcggaggcggtgatcgccctgattcagaccgagctgttcgagagcatcgtccagctgcaggaagcggaagaaggcgaagtcgaccccaaagagcgcgtggcgctgttgtcgaaggtggcaaagaacgtggccacgctgtcccgcgcttccgtcaacctcaagaagttccagtctgaagtccgggccagagcgcagcaggcggccagcaacgccgagaaaattgcccgtaagggtggactgtcaaccgatgcggtacaggcgctgcgtcgtgaaattctggggattgcctcatga

SEQ ID NO: 247562 - DNA, 312 bp, Klebsiella pneumoniae
atggttgatatcgcccgcgtgcgccgggaatccctgcgctggagtctgctggttgctctgaacaaaacccgcccgtacaccgccagcgagacgctgctgctggacgtgtcccgcgccatctacccggacaccactccgctggagctgcgccgtgagctggattatctgtccgaccgcaagatggttgatctggagaaaaaaccctccggcgactggtttgccgacctgacccgcctcggcgttgacctggtggaatataccgtggaatgcggccccggtatcgcccgcccggaaaagtactggagtgaatga

SEQ ID NO: 247563 - DNA, 333 bp, Klebsiella pneumoniae
atgacgttgcaggttgaattctggacggtggtgggctttctcatcaccttcatgagctttgtcggcggtatggccaagtggctgttcagtaaagcggaggagcgtcaggcggcgcggttcgcctctcttgagcagtcgctgcaacagtccgcttccaactggggcgagctggaaaaagaatttatgcggtttaaggcggatttaccgctgaactacgtccgccgcgaggattacatccgtgggcagacggtcatcgaggccaagctggacgcactctacaacaaactggaagtggtacagcagtatcgtcatacaggaggtcaccatggttga

SEQ ID NO: 247564 - DNA, 654 bp, Klebsiella pneumoniae
gtgtggactaacctgctaaaaaatctgccgtggcgcagtctgctgctggcggtggtcataaatgcttttctgattgggctttattacctgggctacaaaagcgggcatggaaacgccacgcgcgacggcgataaggcggtcagtgagttgcagtcagcattcgacacgtacaaaacggagcaggcaacgcttgagaacgctgcgttgcgggcttgggcgaaacggtatcaggaacaggtagccgccgggcagcaggctgaagccagttaccttgagcagattgctcaactggagagccagaacaaacaactacaggggcaaattaacgatgtcacacagcgctggattgatgaaaaaggtaagagccatcccattgagtgcgtgtttactcgcggtttcgtgcgccagtacaacgccgcgctcggatatgacaacgcatccgtcgacaccggtcattcagacgcaactgccgccgctggcaccggcactggcgcagcgtccgggcaacctgaagccgctgacgcctggctacgcaactcaggcgtctcccagcgtgatgtcctcgccaacatcatcgacaacgcgaagcagtgccgcatctggcgcagccagataaacgggatgctggacgaacgggaaggattacagaaatga

SEQ ID NO: 247565 - DNA, 738 bp, Klebsiella pneumoniae
atgatgaccctctatatgtactggcctcaggttgtctgggccgtgctggtactgctggggctgggcatcgaactggcccgctacgggcaggcccgaacgggtaagcacagtttctggtggcagctctttggttcagtaacggtagcctggctgctctggtgtggcggcttcttcagtcaggcccgcgctgcccagccaccgcagaccgcgctgcagtatcgcgacgatgtgatccgtaatgcccggcttgaatggggaatgtctgcgccggtggccgacttcgccgcgcagctgcatcaggaaagcggctggcgacctgatgcggtctcgccggttggcgctcagggactggcgcagtttatgcccaccaccgctgactggataagtcagctgatgccggggcttaacagccgtgaaccgtttaatccgtcttgggccatccgggcgctggtcagctatgaccgctggctgtggcaacgcgtcagcgccgtcaatgactgcgagcgtatggccatgacgctgtcaggctataacggtggtctgggctgggtacagcgggacaaacggctggcctcgcagcaggggctggacagcacccgctggtttggtcatgtcgccacggtgaatgccggacgcagcactgccaactggcgggagaaccgtcattatccgcagcgcatcctgcacgaactggccccgcgttatctcacctggggaggcggcagctgtgtggactaa

SEQ ID NO: 247566 - DNA, 351 bp, Klebsiella pneumoniae
atgaaaaacctgaaaaaattcattccccctgttaaaaagccacgtctcagcggctggctgctgaccgctgtgctgctgctcggcaccatcggtctggtatcgccccagcagctgccggtggttgtctacaagctatcactcatcacgctggcggcagtattgggctactggcttgaccgttcgcttttccccaaagcccgtcccggtcagtacctgaagcatgatgacaggctgatggctgatggtcgcttccctgtccagactggccttcacctggtcttttctgctgcgctaatccgccgtgcgctgattgttgctgcagtctgtctggccgtagcgatggggctttaa

SEQ ID NO: 247567 - DNA, 771 bp, Klebsiella pneumoniae
atgaaagaacaatctttacccatcgtcccatggattggcggtaaacgtcgtctggcgaagcatattttaccattgtttccggcccatacctgctatgtggagccgttctgcggggcagctgcgctctatttcctaaagactcccagcaagaccgaagtcattaacgatatcaacggggaactggtgaacctctatcgggtggtcaagcatcatctggaagaatttattcgccagttcaaatgggcgctggtcagccgtcagatttacaaatggttgcaggatacgccggaagaaacgctcaccgacattcagcgggcggcccggttctactacctgcagaaacaggcatttggcggcaaggtcgccgatcacacattcggtacctctacaaccagtgcgccgcgcttcaatttgctgcgtattgaggaagaactgtcgatggcacacctgcgcctgtcgagaacgctgatagagcatctggactggcaccagtgcatagagcgatatgatcgcccgcatacgctgttctactgtgacccaccgtactggggaacggaaggctatggtgtggagttcgggctggaaaactatgatcacatggcagatttagcgcgaaggatcaaagggaagatgattatatcagtgaacgatatcccggaaatgcggcaggtattcaacggtctgaacatgcagtcggttgatatcagctacaaccttaaggtaacaggcaaacccagcccgaagaaagagctggtaatttgtaatttttga

SEQ ID NO: 247568 - DNA, 528 bp, Klebsiella pneumoniae
atgcgcaaattatttttaccgttgatatttgttttatctgggtgtggagataataccgatcctgctgatacgtccaccacagctaaggagcacgcggtttttagcgttgaaacagataatccggttgtaaatcgcgaattaccgtttattcgccaacaactccccggcctggataagtacgcggacagttttgaaaaagtcgaagtatccgaggatagcgaacgtccggtgacaacggtgcagtttcatattaaagacgaaaataatattccaagtgactacatagcctctggtcataattgttatttgttcatatcaaataatgcccacgaagtgaaaatatctaaatcagcatgtcaggctgtttttttcgataaaacggatgttcctggtggagacctgaccgtgaaacttgataaggaaaaagttcctatgacagatgatggtaagaccccgcgagcaggttgtttgaaagcttattcaccagagccagataatgattattggacttgtccaaggcaggattaa

SEQ ID NO: 247569 - DNA, 306 bp, Klebsiella pneumoniae
atgagtaaaccaaatacatcaagctcaggtacccgtattttgcgtgtccttaaggctttacgcggtcacgctctgaacggtgtttctaacggcgagctggcgtcagctctgggcgagtccccggcgaatatcaatcgggcgctcaatacccttatcgaagaaggactggccctgaaactggataacgggcgttttgcccctggagtccagctcttacaaatcgccatggcgcacagtaccgaaatggcgcgggcgcaggatcgtattaatgaaatcaaccagcgtgttatggctggtagtcgctaa

SEQ ID NO: 247570 - DNA, 909 bp, Klebsiella pneumoniae; identical to SEQ ID NO: 85989

SEQ ID NO: 247571 - DNA, 1770 bp, Klebsiella pneumoniae
atgagtgccgccctgactgaacgactggtttatgttgcccgcgcggcacgtgacgcggggcatggtaagcgtggtgcgatatatgatgccgcctgcgccgaactgggcatttcccgcgccaccctgctgcgcaagctgaaggaggtatcagtgactgacaaacgtaaaaaacgcgccgatgccgggcgcagtgccctgagccgcgacgaagccgcgctgatatctgccacgctgcgcgaggccacccgtaagaacggtaagcgcctgtattccatcgcggatgcggtggagaccctgcggtcaaacggctttatcactgctggcagaacggacgaggccacaggcgagtttttcccgctgtccgaggacaccatcagccgcgccctgcggaactatggtctgcacccggaacagcttgacgcaccggccccgtcgtccgagatggccagcctgcatcccaatcacgtctgggagattgatgcctcactttgtacgctttactacctgagcaacggccataaagggttgcaggtgatggacagctcgaagttctacaagaacaagcctgccaacatcgcccgcatcgccagtgaccgcgtgtggagttacgagattaccgaccataccagcggctggatttacgttgagtacgtgatgggtgcggaatctggtgagaacctctgttctgtgcttatcaacgccatgcaggagcgcggcggcgcggacgtgctgcacggcgtgccgaaaatactctaccttgatcccggttcggcgaacaccgctggcatgacgaaaaacatgtgccgctcgctgggcatcaatctgatagcgcacaagccgcataacgcccgcgccaccgggcaggtggaaaaggcccgtgacattatcgaacgtaaactggagccgggtctcaaattccagccggttcatagcctggacgaactgaacgcactggcggtgaaatggcgcagccactttaacgccacggcggtccacagccgccacggtaaaacccgcacggatatctggctgaagattactgctgaccagctgaaaaaagcgccatccgttgaggtttgccgcgaactggcggtggccgcaccggaactccgtaaggtcacaccaaaactgcgcgtctcgttccggggcaatgagtttgacgtttcgacggtaccgggcgtactggtcggcgaaaaactgatgattacccgtaacccgtggcgcagcgatgtggcgcaggtggtgctgaccggtgaggacggtcacgagacgttcttccaggtcgaggaggtcagaaagaacgagttcggctttgccgaaaacgcggcggtatttggcgaaaactacaaagccctgccggagaccccggcgcagacggcggcaaaagaaatcgaagagctggttacgggcaccgataacgccaccgatgcagctgctgcacgcaaggcgaaggcgctgccgttcggcgggcgacttgacccgtacaaacatatcgacgacaccacgcttccggcctatatgccgaagcgcggtcaggcttcagacgtgcgcgggccgcgtattgagcagcgtccgctgacccatgtggaggcggcgaaagccctgcgcgagaagtttggcgctaacggccatatctggacgccggaacattaccgccagttaacggcgcagtacccggatggcgtacctgaagccgcgctggatgaggtgatggttaccctgaccactccggcccgcaacagcgttatcagcatcgttaacggtaactga

SEQ ID NO: 247572 - DNA, 1167 bp, Klebsiella pneumoniae
atgctggtactgaagcaacaactgaaagaggcccgcatcccgcaggcggtggtggcaagagccgtcgccgtttccgaggccacgctggcccagattgtgaaccataacgagtggccacgcaccagccccgaagaggtacgccagcgtctggcgttgtatctggaaagtaaggggattgatacagtgaaaagttttgatgctgcacagggcgctgtcacgccccgtacagcgggtactaccgataaaaccaacctcagtgaggaagagaacatgttactcaaaaagcaggtgttatttccagcaaccaaaaaagcgtttggccttttccgtgatccgttcgccgatgaagccatgcagggcgcggacgatgtgttcaccacgccggatatccgctacgtgcgtgaggcgctgttccagaccgcccgccatggtggctttctggcggttatcggcgagtccggtgcgggtaaatccacgctgcgccgcgacctgattgaacgcgtcaaccgcgagaacgcgccggtgattgtaatcgagccatacatcatcgccatggaagacaacgacgtgaagggcaaaaccctgaaggcggcagctatcgccgaggccatcatcagcaccatcgcgccgctggagagtatcaaacgcagccaggacgcccgcttccgccagttgcaccgagtcctgaaggacagcagtcaggcgggtttcagccacgttctggtgattgaggaggcccacagccttcccattccgacgctgaagcaccttaaacgcttcttcgaactggagtccggcttcaaaaaactgctgtccatcgtgctgattggccagcctgaactggcggacaaactgtccgaacgcaacatggaagtccgtgaggtcgtccagcgctgcgagttggttgaattgctgccgctggacaacagcctcgaagagtttctgacgttcaaactgcaacgtgccggtaagcagctggccgacatcatggacgccagcgcagtggaagccatccgcgcccgtctgagcaatctgggtagtagccgtaaaagcatggtcagcctgctgtatccgctggccgtcagtaacctggtgatagccgccatgaatctggctgctgaaatcggggtcccgcaggtcaacgccgacgtcgtcaaaggagtttaa

SEQ ID NO: 247573 - DNA, 270 bp, Klebsiella pneumoniae
atgaaatccatcgccgatatcaaccagcagatgaacaaggtgcagtccgccattatggcgctcaacgccatgaacactaccgtgcagagcgtcatgattgctggcagtaagccggttatccgtatcgcccgcaacgggcactgtgcccgcctgctggagcagggcaaagcgagttatacccatgttggccatgacggctcagggcgcttccgtcagggtgtctttgagttgcatggctgccgtattacctggtcagagtcgttacattaa

SEQ ID NO: 247574 - DNA, 612 bp, Klebsiella pneumoniae
atgagcgaagtaaataaagaaaactacatgaaagaccgcaaggggcgtctggtgccggttgaccaggtgtctgactatgaccttgcgatggactctttcgttaaagaacaggttgtcgccgcgaaggttaaacgcgatgaactcagtgacttcaagcgtcgtgcctttgacgagtgctatgcctggcttgaccttgtggccgagaagtacggcagaacgcgtggcggtgccaaaggcaacgtgaccttcagcagcttcgacggtgctcagcagatcaccatccgcgtgcaggaaaccctgaccttcgggccagagctgcagattgccaaagacctgatagacgagtgcgtcaccgagtggtcggaaggcgcgaacgccaacctgcgggccatcatcagcgatgcttttcaggtggacaaagagggccagcttaataccggacgtattctttccctgcgccgcgtcaagattcaggacgagcgctggaaccgggcaatggaggccatatcggaatcactgcaggtggcaatgtccaaaacctatattaatttccgggagaaagataaacacgggaagctaattaatattccgttagatatcgctgccatttaa

SEQ ID NO: 247575 - DNA, 189 bp, Klebsiella pneumoniae
atgtccatcaaatgtatcaactgccagaaaggtatcaccaccctgaagttcagcgacgccagcgtcatttcctccggtaagtaccgcgtaccagccgtcctcatcacgctggtatgcccacactgtagccagcattactacaccgaagtcccggccatggaattcatcccttgtgaggcaaagaaatga

SEQ ID NO: 247576 - DNA, 273 bp, Klebsiella pneumoniae; identical to SEQ ID NO: 40307

SEQ ID NO: 247577 - DNA, 297 bp, Klebsiella pneumoniae
atgaaaggcatgaaattatataaccgttcgacgatctacaatctggccctcaaaaccttcggcccagaagctcaggctctgaagctgatggaagaagctgccgaactggccgctgctgctgcccgcaacatgaacggactgggcaatgaagttgatctggcaggcgaactggctgacgttgaaatcatgattgaacagttccgcctaaacgggatgggcctgatgattgattttcataagcagaaaaagctggaacgccttgccgaacgcctgggggtgacttatgccgcagaataa

SEQ ID NO: 247578 - DNA, 690 bp, Klebsiella pneumoniae
atgccgcagaataatgaaaagctgctggagaagttaaaaaagctacttgcgctggctaaatccgataacccccatgaagcggcactggcactgcaacgcgcccagaaactgatgcaggcctataacatcacccaggctgacctcgcactcagtgatattgatgaaagcgtcagtaactactgggctgcaggtagcgttaatccgccgcgttatatgctgggtctgctggatattatccaggtggcatttggcgttaagtctattattcactccggctttaaacccggcgttggcttttacggtaataaagaccgggttgaactggcctcatatacatgggaggtactggccagacagttaatcatggcccgtaaaaactatattcgacagcagaataaaagaatcaaaaacacgaccaagaccagccgtggtgacaaatttgccgaaggatgggttctggccgtgcgtagtgaggttcatttatttgctatgtcccgcgaagaacgggagctggcaaacctctggcttgaacaaaaataccctgattcaggaacaacctctggccgcaaagccggtaaatcccgtgacgcggacatgtcccgccacatcggttacagagagggagaaaacgtccgtctacatcagcctgtcagcgggcaggaacagcggaagctggggagtggcttatga

SEQ ID NO: 247579 - DNA, 429 bp, Klebsiella pneumoniae
atgatgactaagcagcgtcttattcaactcattcatattgcccgcagcgacctccagatggatgaggacacctaccgccagatgctacaggggctgaccggcaaagcctcaaccaaagggatggataccccacagctaaaccgcgtgctggaatcaatgaaaaagaaaggctttcgcattaagcctgccgggaaagccaagtccggcttaccgctcgacagccatccgcagtcaaagaaaatccgtgcgctatggcttgaaatggctgccgcaggcatcgtccgtgacagttcagagcaggcgctggcgctgtgggttaaacgggaaaccggcatcagcgcgttacgctggctcagcaatgagcaggcaagtagcgtgattgagaaactgaagaagtggcagcgcagagctgcgggagtgaagcaatga

SEQ ID NO: 247580 - DNA, 390 bp, Klebsiella pneumoniae
atgagcgacctgaatcagtttcgtagtaaagggccggaactgttggtggaactggcacagcatacctctgagactgtccgcgagattattgatatcgaacccgcagttgccgaccagattggtcaggccgtcgcgaaccgcatgatgcaggtctggggtgggcaaaacgtctattttccgatgggcatggtctggaaggtcagccagcgcgaccgggaaattttcctggagtttgacgggcgcaaccatcacgaactggcccgcaaatttggtgtttcactacagtgggtttacagcgtggtgaagcgggtcagaaaagaagaactggatcggatgcagggcaaactgtttgatggcgaacctgatgccgatacagggaaaaaggagtaa

SEQ ID NO: 247581 - DNA, 660 bp, Klebsiella pneumoniae
atggatgagttagctaagaaagtccaagaaaaatatatcgaggatcttactaataagtatccgctgcatcggtttttggtattgtttattgttattttttttatgctaacttatcaaactggtaatgctgatatttacaacattctggatgaaacaaatgttaaggaactctttgattttgaaggtggtttgctttcaaaattatctatgctccaattgattcaatgtctaatgatttcatgttttttaaattactcacataaaaagataaatatttcaatgtttaactggttgatttcgttttgtgattttaaaaaatacacatccgacattcatggtaaatataagtctttaaaaagaaacgatgcatatgatcttttccttgtcaaagagatagataaaaaaataagtgaaaaaaaatcgcaatttcgcattgttttgattaattcagagttggttttttcttttttgttttgtgtgttttggagtttttatgcttcttttgttaacatcattttagtattttcattattgattctttgggtttatattcagtgggcgtgttataagttttatataactgattttttcccactatatgtggcaaagaaatacttactggatgagccgatagttattgcagatggctttcatgattga

SEQ ID NO: 247582 - DNA, 984 bp, Klebsiella pneumoniae
gtggtgcggtgctgttcgagggcgtggcgagctcttgtgacgctcatttttaagaggtggatccaggcttcatctaaacataagatggtatccttactggtctattatgcgcacggagcaaatgaattggctatagttgaactgcactttgacggtgacattgcacaagatcaccaggtgtctttaaggactctttcaaaaagtttaggacacttgcagagtgccttagatagagcatatctagatattaaatatggtaatctttggaaatatgcaaagatgcaccatgaatattataaagatgttgaaatgttggtgcagcctcctagggaaggcggatatattatcgatttcttttctaaaaaagaaattactaagaaggttgttgctagggtctcaaatgcaataaataacgccataagcgaagcacagcaagatggtttagaaaatgctgatactatcagtaaaagtttagaaacaaaacgagcacaaatttccgatgatttaattgagcctcgtgagtatcaagagcttttagagagacctgatgctgctgttaatcgccgttatggggatagagccattgtaagagaaatagaccaaatgttagcagttattagatctcaacactctggtgatagtactttagaaatttcgttgacagctgatcgcacgcaagtttatgaattcaacagatctaaagctaatgcttttcatagagttgttacaaggaaaaaactgggcgaccctgtaatttatcgtgtgaaggtatcagaaatggatttggactatctttctgctaaaatgagaaacactttcaatgatgcagtgagcacactcagattcgcttcaaaggaagactttcaagaggtatttccttattttcaaaatgaagaagaaatgatttttttaggagcaccttacattgaatatggtgcttttgatccatcttgcggagatgtatattttatacaggtgtattaa

SEQ ID NO: 247583 - DNA, 753 bp, Klebsiella pneumoniae
atgggtacaatgatccgactgctcaacgctgtggcagataatgacagcctggaaatatttccaattccctatacaggggtgccgggtgctaaattcgttactgaaacgcgcagaagtcttgcgctggcgcgcgatatctcgggaaataaagtaccggtgacccttcagggatcgcccgtatttgctgatggctacatgcgtggcggcggtggagcgtcagccacatacaaatggctgaaggcggcttatgcaccagttgctaatggctccaggacaatgtgcgttgtcgctcgtctagttactggatctacgggaagcgcattccctttcagtgataacaatgggcaagcggggtgttcactatttattgagactactgctgggtggcgggctcaggttctggtaacgacaggttctgcagtcagtggggtatttcccgcgccattaccgaacctgccagtaatggaaaaaacggactggcattttgctgtactggtcattgatgcagaaaaccgcaccgcatcgtttaagctaccagcgctggggtattctaccagtgcgacatggaccgcagataaaacgatagctgtaggggctggagagttacgcatcgcaggaacgtccggagcggcggctgaaagttgcgatgttgcctttgcgacataccatgaccgggcgctgacagaaagcgaaatactccagcagtattatgccgcaaaggcttactgcgatgctgtcggtttggttgtctga

SEQ ID NO: 247584 - DNA, 207 bp, Klebsiella pneumoniae
gtgaaatctttgccttcaagtcgccgggaggtacttgtagattgttttcacgtctacacctatcacatcggctacctgctgcctggtagcgccgttctccagcattctgcggcactgctccaccacttcttcagtcattacctggcggcgtccgcctactctccctggcacgtgcgcagcaccgaggagatcctcgccgcgttctga

SEQ ID NO: 247585 - DNA, 645 bp, Klebsiella pneumoniae
atggcgatagctccgacgcttaacgttccccaggctcgttttctggctatgcagcagaagttcaaagcctatgtagctggttttggatccggtaagacatgggttggctgcggtggaatatgcaaagggttctgggaattccccaaaataaaccagggctactttgccccgacctatcctcagatccgcgatattttctaccccacggtggaagaagttgctcacgactggggactgaaagtcaaaatcgttgaaagcaacaaagaggtccatttctacagtgggcgccagtaccgcggcacgacaatttgtcggtcgatggaaaagcccgacacgatagtaggctttaaaatcggcaatgcgctggtggatgaactcgacgttctgaaagcggataaggcgcgtcaggcgtggcgaaaaataatcgcgcgtatgcgttataaggttgatggtctgcgtaatggcattgacgtgactaccacacctgaaggatttaagttcgtctataaccagtttgttaaggctgtgagggaaaagcctgaactaaggtcgatgtttggtctggtacaggcttcgacattcgacaacgaaaagaacctgccggatgactatattccttcgctcctggcgagttacccgccgtaa

SEQ ID NO: 247586 - DNA, 339 bp, Klebsiella pneumoniae
atggctcattgcgcccacatccccgcttttgttttacatcaggtcacctgtcagtttgcgacgggacagaccctgtttggtccgctcagcgtctcgctggaaccgtccctttgcggcctggtcggccggaacggcgtcggcaagactcgtctgctgcgtctgctggcgggccttgattctcctgccggcggccatattgagcgcgccgccgccgttgcctgggtagcgcagcagccgacgctcacgccggagaccaccctctgggctatgcgtcggtttttgccgccttgtctcgccttgaacagggccaagggctggccgacgatttcgatctgttag

SEQ ID NO: 247587 - DNA, 141 bp, Klebsiella pneumoniae; identical to SEQ ID NO: 36145

SEQ ID NO: 247588 - DNA, 663 bp, Klebsiella pneumoniae
  misc_feature (360)..(369): n is a, c, g, or t
atgcttacacctttaatactttcgaattgtaaaaggatactaactgtaagtgagttctctagacaagaaatagccgaacattattcatgtgatttagataaaattgatgttgtttataatgctgttaatgcgtcattcaaaatttctagtgataaaagtataggtcaaaaaaaatatttactggcagtatcatctcccgcgttacataagaattttcatggattaatacattcttttgtaaaatcaaatctggatatagacttaataataattggtgcggcatcaaaatcaatttctaagattgatttcaactcagatgaacgaattagattcatgggaagagtaagcgatgagaaattnnnnnnnnnngcattcatttttccatcattttacgaggggtttggcattcctccacttgaagctcaggcctgcggatgcccagttttgtcttccgatagagcatcaatgaaagaaatcctcaaggatagtgttttgtatttcgatccacaatcagctgacgatataagtaattctatttttcagattatcgattcaagtgaattgaggcgagatttaatcagaaaaggttcagttaatgttgcaagattttcctgggaacaatctgctgaccaagtaaataatattattaatgcgtgccgttga

SEQ ID NO: 247589 - DNA, 882 bp, Klebsiella pneumoniae
ttgcgtaacactgcactcgaactttttaacgaacgactcccccacaagccgtacttctcggacgatttacacttcggtgtgcgcatcgccgggaaagagcgcgcgatactcgcgaagtacatccagttcaaccagccgcacgctatgttctggctgggcttcgatgtcgatcgtgccggtgccgccatcgactggagcgaccggaacgcgcctgcgcccacgctgaccatcaccaacccggaaaacgggcacgcgcacctgctgtacgcgctagaaacctcgatacgcaccgcacctgacgggaaaatgaagccgctgcgctacgccgccgccgtggagaacgcgctgcgtaaaaaactggacgctgacgcggggtattcggggctgatctgcaagaatccgaaccacgaccactggaaaattgcagtctggcagccggaactctacacgctggactggctggccgactcgctcgacctgagcgccgcaaatgacaaagagatcgttgccgattacggtttaggtcgtaactgtacgttgttcgacagaacccgtaagtgggcatatcgtgctattcgtcagggctggcctgagtatgagcagtggcttcaagcatgctatgagcgagccagcgcctacaacctgcaattttctgtaccgctggatgataaagaggtaatagggatagctaaaagcattactaaatggacacactctaagttgaatgaaatgacattctcagattatgtcgctagaactcataactctgccattcaatccgaaagaggtaaaaaaggtggcagaccatcactaggcgaaccgtggctagattctggtatatccagagctacttattttaggcggaagaagaaatgtacttag

SEQ ID NO: 247590 - DNA, 762 bp, Klebsiella pneumoniae
atgtacttagtcaaaagttgcaagaagaaagatcaccctcatcaatccggaactctaaaaattggttctcttgctgaatatagagatacagaaaataagcaggtagaagatagagaagaagggttttatagaattaagtttgacctgaatgataagtggataagcactgatttgtttaattatttgaactactcgcacagtagcaacttgagcgctcatattcaccttctaaatattaaaaatcaagattttagtagcgttcgcgttgattataaggcagattacaaatgggttaaccataataggtttatcttttgtataacaaaaacagaaagagtcgaagaagcacagggtatatttagtggttacgatgatagttggtctgttaattacaataaaatagcatggttaaaaagatcaatggaaatggcggttttagataaaatcaaagggatgatttcgtccggaaatcttatttttggtgactcatttaataacccagacaaaatatcaatagaatcatactcgcaggatataatataccagacaagagatctttacttgggcaataaagacattgaccccatgaccgacactttgatttctctttttaaaaacgtaaaattcataaagcctgtgtattttaaaaaagagaaagaacttagatttgtttttgatttttactacgatggacaaattgtattcccacagatcaatagcctcattatcccttcagaagggattgttgacttgtttgattga

SEQ ID NO: 247591 - DNA, 192 bp, Klebsiella pneumoniae; identical to SEQ ID NO: 217366

SEQ ID NO: 247592 - DNA, 582 bp, Klebsiella pneumoniae
atggccgttattggttatatccgcgtatcaacaatcgaccagaacagcgatttgcagcgtaatgcactcacaagcgcaaactgtgaccgcatttttgaagaccgtatgagtggaaaagttgccagtcgccctggtcttaaaggcgctttaaagtgcattaatagcggagacaccctggtagtgtggaaactggacaggctgggacgtagcgttaagaacctgattgcactcatatcagagttacatgaacgtggtgcccacttccgctctttaacagacagtattgataccagcactgccatggggcgcttctttttccatgtaatgtcggcattggcggagatggagcgcgagctaattgtcgaacggacactggccgggctggcagcagccagagcacagggacgcgtaggtggaaggcccaacgcattaaaaacccatgagcgagagcagattgggcggctattgacgaaggggcacacccgccagcagctggcaattatctacggtgtagggttatcgacgctttaccgatactttccggtggatggtcataggaaggataacgcagcaggaatgtaa

SEQ ID NO: 247593 - DNA, 195 bp, Klebsiella pneumoniae
atggctacgaccctcaccccgtcacacccgcagtttgtctttgtgtttgccgccgttcgccgcgcagaccgtcagccccgtatctgtatgctccgcgccgtcgccggggatgaacacgccgcacgcctttccctcgttcgcgattatgtcctctcgtttgccggtcgtctgccggtggcggaggtgcgcgcatga

SEQ ID NO: 247594 - DNA, 321 bp, Klebsiella pneumoniae
atgaaaacgccattaccgcccgtattgcgtgccgccctgtatcgccgcgccgtggcctgtgcctggctgaccctgtgcgaacgccagcaccgctatccccacctcaccctcgatgcgctggaaagcgccatcgccgccgagctggagggcttctatctgcgccagcacggcgaggaaaaaggccgcctgattgcctgtgcattactggaagatttgatgcaggccgggccgctgaaagccgccccgtcgctgtccttcctcgggctcgccgtgatggatgaactctgcgcccgccatctgacatcgcctgtactgcactga

SEQ ID NO: 247595 - DNA, 141 bp, Klebsiella pneumoniae
atgaatcgtgacgttatcgaacgcatccgcgaccgctggcaaaagctccgcctctgccggcaccgcggcaccgtactggttgactacaaaatattacgcaatttcgtccgtatctataagcgcctgggagaagcagcatga

SEQ ID NO: 247596 - DNA, 891 bp, Klebsiella pneumoniae
atggatatttaccgttatacagaaaacctttctttatttgttgaaatagcaagatgtggttcattttcagcggtcgcacgccgccacggcgtaaacccgtcatccatcatgcgaaaaattgatatgcttgaagcggtcatgaaagcccccctcttcacacgaagcacccgtggcattcatttaacagaaatcggcgatgcattgtttacccgtgcagtgggggtacttgaagcgctcaatgatatgcgtgatgaaatcgtttctttaaatgaagaagtgacagggacattgcgcatcagttgtttgccgacttttgcaaaactccatattttcccctggctaccagaatttaaatctcattatcctgatgtggatcttgttctggatcttacagagcaacttgaaatcccatcaatagaacgccttgatgcagcggttcgcattggtaaactaaaaaacagctcactgtatgcgacaaaaatagcgcaccagacctggattgcctgtgcaagccctcgttatattgagcaatatggggttcccggtggaccgactgaactccccggccaccatattctggacaaatatcatgatccacactccatttcatggagtcgtattatcgacactcagggaggagagtatcgcttatatatgcgttgcaatgatttcgaagctctgctaaaagcagccatttcaggattagggatcgtctttctgcccaactgggttgtgggacaggatattaaagctggcaggctggtcaatatatttgatgacccgcagcagaaagttgacgatatccattttttgcgtgcgcttcccagaatgacacccaaactggctgcttttttacaatttttgcgtgataatcttacggctgttatttag

SEQ ID NO: 247597 - DNA, 1200 bp, Klebsiella pneumoniae
atgaatgcctatatttgtgatgccgttcgtaccccttttgggcgttatggtggagccctttcctctgtacgggccgatgatcttgcagcgctgacgatttctgcccttatggaaagaaatccggccatcaatttcagcaatattgatgatgttattttaggttgcgcgaatcaggccggtgaggataaccggaatgtcgcccgcatggctcttctgctggctggcctgcctgccagtgttccgggtacaacaataaaccggttatgcggctccagtcttgatgccattgcggtagcggcgcgggcaatcaaatccggtgaagtcaatcttattattgccgggggagtggaaaatatgagtcgtgcgccgtatgttttaggtaagtcagacaaagctttctcgcgaaatttgaacatcgaagatacaacaatgggatggcgattcattaatcctgaaatgaaagctcgttatggcgtggataccatgcctgaaacggctgagaatgttgcccgccagtttggcatttcccgtgaagaacaggatttgtttgctctgaccagccagaggcgggtatcagatgcttatcgtaacggtatttttaacgatgagattattcccgtcaccttacctcagaaaaataaagagaatattatcttcaataaggatgaacatccacgggaaaccacgccagaggcattatcccgtctcagggggattgtgacagcagatggtacgatcactgcgggtaacgcatcagggatcaacgacggcgcgggagcgttattaatcagcagtgaaaccgggttgtccgaatattctctttcgccaaaagcgaggattctggcatcggcagttgcgggcgtagagccaaggatcatgggagttggcccggtttcagccgtcaagaaagttcttgaactggcagggctcaccatcgaccagatggatgtgatagagatcaatgaagcgtttgcagctcaggcgctggcagtgatgaaacaactagatattgacgttaatgatgaacggattaatcccaacggcggagcaatagcgctcggacatccgctgggggcaagcggtgcaaggcttgttatgacggcttgctatcaactgcaaagaacaaaggggcgctatgcactttgcacaatgtgtattggtgtcggtcaggggattgccgttatcatcgaacgaatttag

SEQ ID NO: 247598 - DNA, 1182 bp, Klebsiella pneumoniae
atggaaagaacaaaaagtagttattttgcactggcttgtctgtgtgctttcgctgttgccaatatttattataatcagcccttgcttgaactctttgcaaaagatttcgcggttgatgaaaaacatgccggttctgttgcgatgtttgtacaactatcttatgcagcaggtcttgttttcttcgtgccattgggcgaccggtttgaacgcaggaaactgcttattattttattgggcattaatgctgctgcttcggcagcggcctctttcacgcaaacgattggacagctacttactgtaaatattgtcattggcatgacatctgttggtgcacagattgtcattccgatggtatccctgatagctcctgcggaacaaagaggacgtgcagttggaaccgtgatgagcggattaatggctggtgtcctgtttggcaggatcctgtccggatttgttggcaattattttggatggcggtcgatgtatcttgtggctactactctggatctttttttgcttattatggttcccagacttttaccacacagtaaaacgtcggcatcacagatcccctatcatttactgctgaaatcactaatcaccttttttataaaagaaggtgagctcagactatcatgtttttgtggggcaatgatgtttggcgggttcagcgcattatggggtgggcttgcatttttacttgcgcgaccaccttaccattatggcagtgatattgtcggcagttttgggtttgcaggaattgccgggattcttgccacaccttatatagggaaaatggctgaccgttacagcccacgtattgttgtattagtgggaagtgtgattgcattactgggttttatctctgtcttcttttctcctcattatctgtttgcgttaatttttgctcttgttcttctcgatatcgggggacgggcggggcttgtgggaaaccaactgagagcgctggcattatccgcagaaggaaggagtcgtttaaatacagtatttatgtgctcttattttatcggtggtgctgtcggaacccgtgcgggggctgaaatcagtgtccggtacggatggaccgggatcactgtaatgggatttattctttcctgttttgtcctgtttctgaatataagacaagcgaatacgaataaaaatactgatgctctggcctga

SEQ ID NO: 247599 - DNA, 1143 bp, Klebsiella pneumoniae
atgcacagcaagaaaaatgtattattaacaggtgcgacgggtttcattggttcatatctgctggctgatcttctggagaataaagatatcgggaggatttatattctttcccggaaagtggataaaaataatgaaaaggaaagattgttcaccgcatttgaaaaattttcggtgccaggccatgaacaactggcagcggcaaccaatatatcagtcattgaaggcgatattacgcagccccgcctgggtatatccgatgcagcttttgaagaactctgttcagaggtggatgttattcaccatattgcggcacgtgtcaatcacatccgaccatatgaagtgctaaaagcgcccaatgtggacagtgtcgcagatatcatcagcatcgctcagaaaggtcgggataaaatcgttaattttgtttcaacgttagggtctgcggctaaaaaggataaggatggtcgttatgttgaggcctttccgggtaatgccgttcttaactctgacatggggtatttactttcgaaatgggaatctgagcgtcttctggagaagtttcaggatcaggggggaaaagttaatcttttctggctcggttatatttcaggtcacagccatacaggtgcttcgctttttaccgataaccagtttatgctgtttatcaaaagctgcattcaactgggttacgccccggttctccccagaatgattaatttcactcctgtcgattacaccacagccatcatggctcaacccaggtatatgtcagaagggggcgatgttctcaatctgtttaactattccggacttatcagctgggaagacattgtttcatggctgaacttacgtgggtataaaattgagactacggagttttatgactggcagaaaaaacttttggcggataatgaaagtaatgcactgttccgttttcttccactttatggcgttgacggctctcatgataagatcctcaggtttggccgtgaaattgataagtttgatttccataatacgatggcggcgactgagcgcctggcctataaattacctgctttgagatacgaattactggatacatatttaaggtatttacagtcagttgattttttacccgtacctcacgctgtaaatgctgcttaa

SEQ ID NO: 247600 - DNA, 951 bp, Klebsiella pneumoniae
atgactatttccctatataaccagactaccgcccctaaccccgcagcggcgaccagcgtatcgtcgctggagcgctcaggctcttcaaaaacgaaagggttaaaaagccggacggatatttaccagaccgtgacagacagcctcattgcaacactggaagcgggtgtaaaaccgtggtcctgcccctggaagcgtgttccggggatgtccggtctgcccgttaattacgccactggcgtagcctacagtgggatgaatatcatgctgctgtggtgcagtgcatcgaaacagggattcagtgattcacgctggatgacatacaaacaaagtcagaccgctggcggtcaggtacgtaagggtgagcgcggaacaacagccattttctacaccacgctggagaaagaaaacgacgatggcaagacggaatatatcccgatgctgaaaaccttcactgtatttaatgttgaccagattgacggtctgcctgtgacggatgaaaccggtgcggaagcacctgtcgctacgtttgacccgttaccgcaggcagaagcacttttcagttgcagcggtgcgaaaatcatcgagaaggggcagaatgcttacttcatgcctgccacggatgaaatctggctgcctgagcgtcacctgtttaacgatgcggcaaacttctatgccaccggcctgcatgagctggttcactggaccggggcaaaatctcgccttaaccgagaaatgaaaggcagatttggcagtgagtgttacgctttcgaggagttgtgcgcggaactcggcagcgcgtttctgatggccgatttggggattgagggcgaggttcagcacgagagttatattgcgtcctggttgcaggcactgaaaaacgataaacgttatattttcagggcagctagcgcagcgtcaaaagcgcaccgttatctgatggataagcaatga

SEQ ID NO: 247601 - DNA, 765 bp, Klebsiella pneumoniae
atgaatgttgatatttctctttttgctctgggaggcttcgctttctgtggtggtctgatcgatgctgctgttggtggtggagggcttgttcaaattcctgcgcttattcatgcgctacctggctccagtctggcaacgatttttggcaccaacaaactggcagttctgctcgggaacgcattttctgtctcagggtatctccgccgggtaaagattatatggaagctaattattccagtaatgggcgctgcatttattttttcattcgctggcgcatacactgtctctcttataccaagagagtttatggaatatctggtttttgtcgttcttattattatggcggtctatacgttcataagaaaagatctgggacgactacatgcggatatcaggattggtctgaaagagatactgttggggatagtgttaggcgcttttatcggattctatgatggtatattcggagcaggcagcggaagtcttttattgtttgcctttgttaaatgttttggctttgattttctgaatgcttctgcatcagccaaattaataaaccttgggacttttactgctgcactgcttttttttgtgccgtcagggaatgtattgtggataaccggaggtatagtcggtatttgtaatgttgcaggggcgattacgggcgtatttttagccttgcggtatggcagtgggtttatcagggtttttttcctgatactattactgtttcttatcggacgaatgggggtttccattctctga

SEQ ID NO: 247602 - DNA, 978 bp, Klebsiella pneumoniae
atgacttccttatctttgcaaggctgtgatgacatatcgaaaaaatcttattctatgcaggaactgggtgagatattcatcgatggtttgcctgaacatatcgcaatgttaaaaattcctggtcgctggatagccggagatgttcgcaggtcacccgtgcccgcgcatattgatcatgtcaaggacattcagaatatgatgtacgaagttctttgtcatgagataacccaggaggcacaggcttatgcggaagggacttttcttgcctttctgcaaaaggatgaagttgatcccggtgtcctcagcttctttaacggctggaatgaaacgcacaaaacgacaagcctggtatccggaaaaataatcatgcgactgtccgctgatgcactttatatttcacatgaagatcaggctatctatcataacgttctggcccatatgcatgaagtaacaaaagatgactttggacttggtcagaaggggcatgacggaatgtataaatacatgacaaatgctttcagggccgcagcctgggttgatgatcaatataaaatcaatgagtgtaatgaattctctgatttcctctacaatactggcattgcaaaacataagtctgcaatgcgttctcctgaatatctgcagtctgtcatggatgccatgatggtctctgtcgcttctgaactctggaacggacgtgaatacaattttcttgctcagtttatagaggggaaattattgtccttcaatgcgtcgttaaatgaggacactaaaactctgcgtaacgccaaaggttatgtcatgggccatgccggggaggtggaaaacaggcatggcttgcatgcgctggccgcgttacaggcctttggccgtatcgcggggctgtcattcgatacagaacgacttaaacatgtcatgcttgattataacaggagagtcggcgtggctttttctgcattacaaaacgttctgactcactga

SEQ ID NO: 247603 - DNA, 1686 bp, Klebsiella pneumoniae
gtgaatataaacgtcgcagatttgttaaacgggaattacatcctgttattattcgttgtacttgcattaggactatgcctgggaaaactgcgtctcggctcagtacaacttggtaattccattggcgttttagtcgtttctctattattaggccagcagcatttcgcgattaacaccgatgcccttaatctcggctttatgctgtttattttttgcgttggcgtagaagccgggcccaactttttttctatttttttccgcgacgggaaaaactacctgatgctggcgctggtgatggtcggcagcgcgatgctgatcgccatgatgctgggtaaagtgttcggctgggatatcgggctcaccgccggtatgctggcaggcgccatgacctccaccccggtgctggtgggcgcgggcgacaccctgcgccatttcggcctgcccagcgatcagctggcgcagtcgcttgaccatctgagcctcggctatgccctgacctatctggttggtctggtgagcctgatcgtcggcgcccgctatatgcccaagctgcagcatcaggatctgcagaccagcgcccagcaaatcgcccgcgagcgcggcctcgataccgattccaaacgtaaagtctacctgccggtgatccgcgcctaccgcgtcggcccggagctggtggcctgggcggatggcaaaaatctgcgcgaactgggtatttaccgccagaccggctgctatattgaacgcattcgtcgcaacggcattctggccaacccggacggcgacgcggtgctgcagatgggtgacgatattgcgctggtgggctacccggatgcccacgcccgcctcgacccgagcttccgcaacggtaaagaggtgttcgaccgcgatctgctcgacatgcgcatcgtcactgaagagatagtggtcaaaaaccacaacgccgtcggccgccgcctggcgcagctcaagcttaccgaccacggctgcttcttaaaccgggttattcgcagccagatcgagatgcctatcgacgataacgtcgtactgaacaaaggcgacgtgctgcaggtcagcggcgacgcccgccgcgtaaaaaccgtggccgaccgcatcggctttatctccattcacagccaggtgaccgatctgctagccttctgcgccttctttatcgttggcctgatgatcggcatgatcaccttccagttcagctccttcagcttcggcatcggcaacgccgccggactgctgttcgccggcatcatgcttggcttcctgcgcgccaaccacccaaccttcggctatatcccgcagggggcgctgaacatggtgaaagagtttggtctgatggtgtttatggccggggtcggtctcagcgccggggccgggatcaataacgggctgggcgccgtcggcggccagatgctggcggcagggcttatcgtcagcctggtgccggtggtgatctgcttcctgttcggcgcctacgtgctgcgcatgaaccgggcgatgctgttcggcgccatgatgggagcccgcacctgcgccccggcgatggagatcatcagcgataccgcgcgcagcaatattccagcgctcggctacgcagggacctacgccatcgccaacgtgctgcttacccttgccgggacgctcatcgtgatcatctggccagggctacaataa

SEQ ID NO: 247604 - DNA, 510 bp, Klebsiella pneumoniae
atgaggttgcccggcattttcccgctggcgtcaatatctgctgccgtctggctcaggctgttactcagttgcgtcaaagaatccccttgcgcactgagtgttttgccctgctccgtgacctggttttgcagggtgttcatcgcgcttgcgtccgcttttttgttcacgttcgcattcgtcgtggccagatcgctgctgagttttgtcagcgcgctgttggctgccgcgatgtcattcccctgctgcgtcaccgtgccctgcagctgcgtcaccgctgtcgtgtcagcctttttactcaccgtatcgtttgtcgatcggaggctgttctccagcgaggtggtacgcgtgccgatgctgctgagcgtatcgccctgctggctaaccgtggtggtcagtgaatccaccgcttttgcggtcgcatctgcggttttctgcgcgctgttcgccgccgtcacgttacgcatatgccagtcggcagcgtaccagacagtgccaaacgggctgctctga

SEQ ID NO: 247605 - DNA, 336 bp, Klebsiella pneumoniae; identical to SEQ ID NO: 199854

SEQ ID NO: 247606 - DNA, 339 bp, Klebsiella pneumoniae; identical to SEQ ID NO: 199853

SEQ ID NO: 247607 - DNA, 3975 bp, Klebsiella pneumoniae; identical to SEQ ID NO: 247292

SEQ ID NO: 247608 - DNA, 204 bp, Klebsiella pneumoniae
atggaagatacggtcctctcaaattgtgaaaggctggacgctgagctgagtgatatcgatgccgtattagatatggtatcggtggcgatggcatccccggaggccagtttgcatgtggctcaaactatgcgcctcatttgtatgtcacgtcggatgttgcagcggtgccgggatctgaacaaggttgaaggaagaagccactag

SEQ ID NO: 247609 - DNA, 219 bp, Klebsiella pneumoniae; identical to SEQ ID NO: 229135

SEQ ID NO: 247610 - DNA, 909 bp, Klebsiella pneumoniae; identical to SEQ ID NO: 229133

SEQ ID NO: 247611 - DNA, 1710 bp, Klebsiella pneumoniae; identical to SEQ ID NO: 199878

SEQ ID NO: 247612 - DNA, 951 bp, Klebsiella pneumoniae
atggcacgcaccaaatcgcaacctgctgaactagtacctgacgtaacgctaaatcccgagctggcagccacccagaacctgatggcgacagtcagcagccagatgaatgacgaacgcgatctgatcaatcagcttctcggacaagtacaaatggcacgatcatttgcaaaatttgccgacgtcgtcagtctgagtaagctcaaacacattaaagaaagcaagatttatcatgcccttaagggaaaacggggcactgattttgatggtaacgaaattgccgacgtcggcacttgggatggtttttgtcaggctctggggctatcccgttcaaaaattgacgaggatctaaccaacctttccgcctttggagaagatgctcttaaacagttatctgcagtcggtgctggctaccgcgaactgcgccagttccgtcgcctgccggaagaccagaaaagcgccctgatcgaggtggccaaagaaggcgacaaaactgcgctgcttgagctggccgaggagatgatcgccaaacatgcccgcgagaaggaagagctgaagaccgaccttgaaatcagccgtcagatgctggccgagaaaaaagaagaactcggcacgatgcgcaatgaaaaagaggagctgaaatcccgcctggttcgccgcaccaccactgaaacaccggacgaagaaggcgtggcgcttgagacagaggtcaccggctttaaaagcggggttctcagcgcgttctttgaccttaaaagcggcttcaacgcgctgaccgagcacaccgaacgcaccggcatcaaccataccggcatgatggcgggcctgctcgatgaccttcaggcgcagtttgaagagctgcgtcaggaattcagcctgccggaagcccgcgagaccagcgtgataccggactgggtaaaagaagcacagcaagaggatgaaaataatggataa

SEQ ID NO: 247613 - DNA, 189 bp, Klebsiella pneumoniae
atgactgcagaacaagtcaaagcgctctttcgccgacaggggatcactttcacccaatgggctcgagagaacggctaccccaggagtgaggtctatcgggttctcaacggccagaccaaagccaactacggtcaatcgcacgaaatcgccgtcaagctgggccttaaatccggcaacgttgcagcctga

SEQ ID NO: 247614 - DNA, 771 bp, Klebsiella pneumoniae
atgaaatcacagtttttgccggtattaccgtggatggggggcaaacgccgcctggccagacatattcttccgttatttccgtcacacacctgctacgtggagccgttctgcggcgcagccgcgctgtacttcatgaaagagcccagcaaggttgaggtcatcaatgatattcacggcgagctgatcaatctctaccgggtgatcaagcatcaccttgatgagtttgtccggcagttcagatgggcgctggtcagtcgccagatataccgctggatgaaggataccccggaagaaacactgaccgacattcaacgggcggcccgcttcttctacctgcagaaacaggcttttggcggcaaagtggccgatcacacctttggcaccacaactaccagtgcaccacgccttaacctgctgcgcatcgaagaagaactgtcgctggctcacctgcgactttccagaaccaccattgaacaccttgactgggctacctgcattaagcggtacgacaggccacatacgcttttttactgtgatccgccgtacctgaaaacggagggatatggcgtcgaattcaggctggaggaatacgagcgcatggcggaactggcacgaaccatcagcgggaaaatggttatatcggtgaacgatattgaggaaatgagggaaacctttgccgggctgcggattcagacagtcgatatccgctacaacctgcagacaacaggtaaggctgaactcaagcgagagttggttatctgtaacttttaa

SEQ ID NO: 247615 - DNA, 324 bp, Klebsiella pneumoniae
atggaaaatcagttcatccggcagacgacgatagaaatctggcaattcagtcaattgatagaagaaattattttcattgaattctttaatcctcgtgagttcgggcatcaattccatcatcggcacatccgcagaataaccatgccgaactttagccagattactcatttttttgatgcagccttcacatccttcattaatgcctttttcccacaaacgataggcatctactctcctgccttccatatcggcaagcaacccaagatgatcataagcctctgcataaccttgccctaccgcacatgccagcaactgcttacctaa

SEQ ID NO: 247616 - DNA, 1173 bp, Klebsiella pneumoniae
gtgagttggcgttatttaaaaattgaggatttttgtagcaccggtagcggtggaacacccagtaggtcaaagcctgagtattatgaggggggagatatcccttggattaaatcaggagaccttaaagattcaacaatttatgacgcaaatgagtacattacagccgctgggctagaaaatagcagcgctaaaatagttgagaaagactcaatcttaatagcaatgtatggagccactgttggccgcttagcaattttaggaattaatgcagccacgaatcaagctatctgcaatattaggccagatacgacaattgctgatatgaagtatctctattacttcttgaagagcaagttcagctattttgtcgaaaatgcggttggtggagctcaacctaatattagccaaggattgattaaatcattggaagttcctctgccttctttaagtgaacaaaagcgtatcgcggagattcttgataaagctgctgatatacgccaaaaacgcgaacaagctatcaaattggctgatgattttttgcgcgctacctttttgaaaatgttcggcgatccagtatcaaatcccatgggatgggatgttagaccgttaggtcaacacattattcatgcaaataatggattatcacgcagaaggaaagaaagcgagaatactggggaagtggtacttagactgcaagatgttcattatgaagggattcgcttcgataataatttgaatagaatcaaattaacaactcccgaaaaagagcgttttttagttgctaacggggatatcctttttattcgtgtaaatggaaatccagattacgttggacgctctgccgtttttgaaggatataaagaaaatgtttatcacaacgatcatttaataagattaaaaatcagtaaagaatatgaaccaatatttttatcttattttttcaatcatgaaagtggaaaaagaataatatcaaggaaaatcaaaacatctgcgggccagtatactattagccaaggtgggattgagtcacttgatatttacatgcctccaatatccctacaaaaaaaattcgttgaaattagaaattcagtcatgaatctcccgtattcttgcaattcgttcacaaaattatacacaatgttaaaccaaaagatattttcaggatatctatag

SEQ ID NO: 247617 - DNA, 597 bp, Klebsiella pneumoniae
atgatctactgctccactaggagtaaattcactaataaaagaacaggtaagaattttttcagccttataacgcctgatgaatttcatcgggcgttttgtattgtcgtggcagttgtattgtacatttctaccggctttcttgtctgttcaagagaccatcggcaggcatccattttcgaggtgtcgcagatacagattctcgacggtcgttccgatagcattcatccgggctcaggcattcaaatggataaggatcatttaccgttgctggaagaccaaaacccggtacgacgaagcgagatactttctggcactggaagagtgaaaatctcccttactaatgccgtaaaaagcttgtcgaatgtctcagggcgtgaagcggacgttactaacatctatatgcatcaatctgtggggagcaggtcaaggcgactacatcagtgttcagaaggatcacaccttatcagggtgctcgtgtacctttcagagcgtgagcgaagcgctggcagagcctgcatgtcgtgtgcaggtacgtttaccactattcacctgtttacgtggctcatacggccacacattgggcttaaatgcgtgtga

SEQ ID NO: 247618 - DNA, 810 bp, Klebsiella pneumoniae; identical to SEQ ID NO: 236711

SEQ ID NO: 247619 - DNA, 801 bp, Klebsiella pneumoniae
atgaaaaaactacccggttcacttgaaataaaacttcatgaaagactctcaaaaaatgatattctcaatgtactagcagaacaaatgacgatgcttgaagaaacatttggagttgaagaatttaaactctactcatttcttgaatgttatatcgattcgaaaaaacaagctctctacgaccatgtaggaaacggaattgtatcttcattgaatttagatagccaagataatattgaaaacacatcaaaattggtaagaaaagaaaatgacagaaggattgtttcatttgataaaaaattacatatagaaaaaatagaaaaaacggtaaaaaatctacaagctaataataaatattcccattgtgctttaacgacatctgttgttcctgcttcaagtataaatgctattattcacagcgaaaatattaaactgcaagaagaaaaacataaatcctatttgattaaaaaacaaagagagagagaagaggaagaacgtagagctaaagaaaaagaactttatgaacgaccactgaaagaatttatcaataaaaagataagagaaagtggattatccgaaatggattttaaaagaacaataagttcaagttgtgattatctgtttagtgtttccaccaaagctaaatacttcgctgagaaacctgaactttttgaaaagtatcgtgatgagagattaatccgcttttcaattaaaagaccagatggaaaagttggtaaagttgaaatctatactgaaaacggtgaacttatatttgaacaatataaaacccttaaactagtttaa

SEQ ID NO: 247620 - DNA, 1332 bp, Klebsiella pneumoniae
atggaaaagttcatcaccaatcccggaagagtgggggaagatgcgccggtttatctgacctggaaaaccgatgcaccgttgtttgagaagggtgagcggggaatggttgcgggcagtcgtaaaacaaaggcgccgggtattcttacgctggcaaaagtccctggcgttgatgctgaggggaatacgctgtccagtaacaaggatgcggcatactatcagattcgcccggaaggtggctggttacctgcatcaagtgttcagaaggtttcgcagtacgcgttaggtgagctcgggtttgtgacgctgaataaggcttcggaaagttttgacctgattgatgggataaaacaaccgaacaacgtggtgaaggggattctggaacagttgtataaagcggcacaggatgaaacgcgcaccactcacgcgctgaacaagtataactataaacggctgctggaattgatagacagtaaccaggacgggtattaccaggagcaggagtatcttcaggcggtacataatatctcttaccgcgaccgcctgtaccgtgtaattgcaaagcacgccagtgaatggtactacggcaaggatgccccgctctggaagacatacctcgatacgttaaccagggatgcgccattgtggaagacgtatctggaaacgtttcttgataagatgacgtggatgaagacggtatccgaaaagggcgttgcgctggggtcggagccgtggcatatgcatccggtggtgtttttggaggcgatccgtattaaagaaagatgtagagagctattttctaaaatttccagtgtaatacttcaacatgaagggggatatgttaacgatcctaatgatcgcggtggtgagactaatatggggatcactattgcgacctggagagcatatgcacctagtgatctcggaattgaagcaactaccaatactctcagaaatatgacaaaggaacaggcagagattatttattataatcattattgggagccaaaaggtttttgtaagcttgagactataaaaatagccttaatgttatatgactggacaattacatcaggtcgcgctgttacacaggtacgaaaaatgcttcataatgagtacaatataaacttagttgtgagtaacacaatggatgatgatatgattcattgtattaatgcaattgaagatcaggagcaattactgtcacgcatcgcagaggttagaaaagaatattatcgttctttaactataactaacggtgaacctaatactcaggttcgattcctcactggctggataaatagagtcaatgattgtttaagggttaatatatga

SEQ ID NO: 247621 - DNA, 1377 bp, Klebsiella pneumoniae
atgaatataaagacaaaaaaagggttctcactgttggagcttattttagtattgggtgttgggacaatggtttcttttatgaaatttcaggatatgagaaataatcaggaaaacattctagcttctactgtagggcagcaaatgaagcaaatcggtgaagctgttaacggatatattaatatcaaatatgataagttatcaacgttatcaaatgcagcaggaacaggaactgatccgggaccaagaacatgttctggttctgtttgtgaaattaattaccagacattgattaatgaggggctattaccttctacatttataggtgtcaatgcaaacaaatcttcctataagatcttgttaaggcgtggtggtatcagtcccaattatgttattaatggtctgataacaacaacagttccttggagtgagggtaataagataagatatgatctgttaggtaaagcaatgcaaactgctgggattgatagtggtatgacaagttcatcagccactgctagcggttatggtaggcaatggaaagaaacttcttctaattttaataatattactatggctggacaattaacttatagggtaggatataatagtgctttatattctgttttccttcgtcgtgacggaacattgccaatgacaggagaactaaacatgggaggaaataacatatcaaatgccaaggatattacagcgtctggaatgatatcatctggaacattaaaatccacagggttaacagatataggaggacaattattagttactggaacctccttgcttaagggtgctgtatcaactaatggtagtttaactgttgatggaataactactttgaaaaacagtttaacagcttcgggaaatattacttcatcacaaaaaatacagggggtagaattagcttctacaggaagaacaagcgtaggtgaatatttacaaataaatggcacggcgactgaaaatactgtatgtgcgccaaatggtttacaaggaagggatactaaaggtatgctgttatcttgtgtgaatggtaaatggcaaagtggagcagcaaatagtctttctatgtatgctttatcagatagttcttgtatttcagtgaatgctttaactggttcatgctcttgccaaacaggaacaaaagctatttcaatggttcaaattaaaggtacgccgggagtccctgctgtccccggaacacgccgtccagatcctgaatcacaaagaagacatgatgcgtgcatgcatgctagtggtggtcaacaggcatcatgtcctcctgtaacatatataactacaccgggaactccagctatacccggaacccccggatatggaatttatgcttgtgttaaaaaataa

SEQ ID NO: 247622 - DNA, 363 bp, Klebsiella pneumoniae
atgaatacctacaacatcacgctgccgtggccgccgagcaacaaccgctactaccgccataaccgcgggcgcacgcacatcagcacagaaggtcaggcctaccgcgaccgcgtcacccaaatcatcaaagacgagatgttggatatcggcatcagctcacctgtgaagatctgtattgagtgccacatgcctgaccgccggcgccgagacttggacaacctgcagaaggctgcattcgacgcgctgaccaaagccggattctggcatgacgaccagcaagtagacgattaccgggtcaaacggatgccgatctttaaaggcggaaggctggaattgacaattactgagttggaggttctatga

SEQ ID NO: 247623 - DNA, 798 bp, Klebsiella pneumoniae
atgaaatgcaaggtggcagggtgcgagaaagaggcaacatatgtgcagcagtgcgtatgccaaaagcactatttcaggatgatgaggtatggaacctacgatcttactaaatcaggaaaaagaaaagagcgatcgcaaaacgatagaggctatcaaatgcttcaccaacctgatcaccccctggcaatggcaaatggttctgtctatgagcatagggcggttatttacgcaaaatatggcgacaacctccctgactgtgagctttgcggtaaaaagcttaattggcgcatagctcatattgatcacattgatgaggtcgtaacaaacaatatcgagtccaacctgaggccgctttgcggtgcatgcaatacaaacaggagtaaaaagcctgctcacaacagaaaagacgctgttgcaataacgtatcttggtgagactaagacagccaatgaatgggctcgagatccaagggtaaaagtaagcaatgccacgattatgcgcaggaagaagctcggcatgacagattttgagtgcttatttgcgccgaagataactcataacggcaatgtccccattaaaccgccaaccccgccaaagtacacccgcaaaaatagtattgctatcgaatgggaaggcgaaaagaaaaccccctccgaatgggcgagtgacccaagaatcaccttaagtgatggaacgataagaagcagagcaaaggcggggatgtctgcctttgactgcttattcaagcctgcatccaggagcggaaaaaaatccctaaaacaacgggaggccgcatga

SEQ ID NO: 247624 - DNA, 225 bp, Klebsiella pneumoniae; identical to SEQ ID NO: 216173

SEQ ID NO: 247625 - DNA, 621 bp, Klebsiella pneumoniae
atgacgatgtgtcgggtactgaatgtcgcccgggccgggttctatgcgtggctgcataaccctgtctcggcgcgtgataaagataaccagcgcctgctgatgcttatccgcgactcatattccctgagcggaggcgtatacggttaccggcgggttcatggcgatctgaacgaaatcggggatacctgcggtaaaaaccgggtgggtcggattatgcaactgaaccggattaaagccgtgcgcggctataaagcgccacgtcgtatcgctggcaggccttcagtcgttgctcctaatcgtgtgcagcgacagttcaccgttgtccgggccaaccaggtctgggtcaccgatattacttatatccgcacctggcagggctggctgtatctggcggtggttatcgatctctttgcccgtaatgtggtcggctggtcgatgaaacccactctctcgcgcgaactggcgctcgacgcgctgatgatggcggtctggcgccgaaaaccggacggcgaggtcatcgtacatagcgatcaaggtagtcagtacggcagtgacgactggcagcgcttctgccgggccaataacctggcaccgagcatgagccggcgtggcaactgctag

SEQ ID NO: 247626 - DNA, 360 bp, Klebsiella pneumoniae
atgagcgatttttggagtaaatcaataaaaaaagttggtcttcccgggctcgtactttacgttttttattttgttattgataaaatcttcgacgaaaaaataacagattttttaggaattaataggttcttcattttaatcctaatcattcttgctctcttggctatattcttcatttattctacattaaaaacagcaaaaacctatcctacagttgaaaatgatgacacccgtcctctagatgctactaataatgagaccaaggcagagctgccgtcatcaacacctccccatatgaaaatccagaccgttgaatataaagataatgcaagacatgagggagataacaatttctcatga

SEQ ID NO: 247627 - DNA, 246 bp, Klebsiella pneumoniae; identical to SEQ ID NO: 120022

SEQ ID NO: 247628 - DNA, 456 bp, Klebsiella pneumoniae; identical to SEQ ID NO: 120021

SEQ ID NO: 247629 - DNA, 1005 bp, Klebsiella pneumoniae; identical to SEQ ID NO: 120020

SEQ ID NO: 247630 - DNA, 1140 bp, Klebsiella pneumoniae; identical to SEQ ID NO: 120019

SEQ ID NO: 247631 - DNA, 1485 bp, Klebsiella pneumoniae; identical to SEQ ID NO: 120018

SEQ ID NO: 247632 - DNA, 990 bp, Klebsiella pneumoniae
atggaaaaaaatggtctcttcagtcagcgcattcgcttgcgccatctacacaccttcgtggccgtcgctcaacagggaacgctggggcgcgcggctgaaacattaaatctgagccagccagcactctcgaaaacgcttaacgagctagaacagctgaccggtacccggctgttcgaacggggtcgtcttggggcgcagctaaccctggtcggcgaacagtttctgacgcatgccgttaaggtgcttgacgcccttaattcggccggccaggcgctgaaccgcaaagagggcctgaataacgatatcgtgcgcatcggcgcgctgcccaccgccgcgctggggatcctgccgacggtgatcggccagtttcacaagcagcaaaaagatatcacgctgcaggtcgccactatgaacaacaccatgctgctcgccggcttaaaatccggggagatcgacatcggcattggacgtatgtccgacccggagctgatgagcgggctgcattacgaactgttgttccttgaatccctgaagctggtggttcgcccgggacatcccctgcttcaggagacggtgacccttagtcgggtgatggagtggccggtggtggtctcacctaaaggcaccgtgccgcggcaaaacgccgaagcgctgctccagagccagggctgtaagatgcccgccggctgcatcgagaccctctccgcctccctgtcgcgccagctggcggtggattttgactatgtctggtttgtcccttccggggcggtaaaagacgatcttcgccgtggcgtgctaaccgccctgccgatcgccacccagggcgccggagagcccatcggcattttaacccgcgtcgatgcgacactgaccccgggtacgcagacgctgctcagcgctatccgtaagtccatgcctgcctgccccccctttctccccggcccgcagcggccggggaacctgcaaacgcgccgacgccgctccccatga

SEQ ID NO: 247633 - DNA, 525 bp, Klebsiella pneumoniae
atgttttttacacacatgggttctatcatatgggtgccaatctttttatggcataaaagaatcgtagcaatactgaattctaagctgttttgggtgttgagttgtataattttgatagtttcagtttttacaggtatggatttgactaaagcattaattcaatacttatcaactctaaatgatcttcctaattttctaatggctaacttagcaagaaaaagagatttctacgtcatacacgaagaaactgatttcgatacactttctgttcttaatacttcgtttgcagttatgcccgcgttaatttacataattatggtgaaaataaaagaagttgagcattacacagtagaatgtctatgtgctctttacggattatcattttttctatttgcattgttttataataatcagatttttgcgacacgtgtaggatttgttgcatattttttcggtgttcaatatttattcttatttttattactggcctatttaaataaaaaaaatttattaaatagggaataa

SEQ ID NO: 247634 - DNA, 747 bp, Klebsiella pneumoniae
gtgcatatatatatattatctaggaaaaaagatacgaagcgtagagaatcaatagaaaaacagttcagcaaagttaaatcaagctattcatttttcgatgctattgaaccagagcagctgcccgaaaatgtcaaagacaatggctcgcagttaacgcctggagaaaggtcttgtgcatacagtcatgtcaagattagtcatgagatatataatagtaatgcaccctattcgatagttatggaagatgatgctgaaattcatgagaatcttgatgaaaaagcagaaaatttgcaacgattacatgagttttttgatgtggttattttaggatactcaaaagtcatttttgataaacgtagacaaatgcagttcattcgtccagtattaaaattgaaagtaaatgattgtgcaattgcatttccctacaagcagtggaaatgtggaacagtatgttactccatttcacataaaggagcacaaaagctaaaggaaattaatgaggtagcagcaaaaacagcagacgattgggatttttttgaaaagtcagggctcataataggacattatctcccaatattagtaactgaaaactttaataactttggtagtgcgcttgaagaggatagaaatacctttaaaaataggagttattttttaagatatatggctggtattgttagacattcttatctaccgatgcgatatatgcagtttttaaagatgaaacattcgcatacgaaatattag

SEQ ID NO: 247635 - DNA, 1152 bp, Klebsiella pneumoniae
atgcggaatatagatattggaatagtagcagactggcttgtaacctatgctggttctgaaaaagtaattaaggaattcatcgagatttattcgggtgctgaactatattctgtggtggattttttatcagacgaagatcgtgaactttttaaaggtaaaaaagcaaaaacgacatatattcagaagcttccaatggctaaaaaaaaatatcaaaaatatttacccttgatgccaatggcaattgagcaacttgatgtatctaagcatgatatcgttctttcaagtagccatgcagtatctaaaggggtaatcacagggccagatcagctgcatatatgttatgttcattctcccattcgttacgcatgggatcttcagcatcagtatttaagagaagcacgattaaataaaggaatcaaggggctgatcgctaaatggctgttacataagatacggctttgggattataggacagcaaatggcgtcgatcattttatagcaaattcacactacattgcgcgaagaatcaataaagtttatggacgaaagtctgatgtgatttatcctccggtcgatgttgatagattttcactatgtgaaaaaaaagaagattactattttacagcatcgcgaatggtaccttacaaaaaaatggatttaattgtagaagcttttagctgcatgcctgacaaaaaattaattgtcattggcgatggttcagaaatgtttaaaataaaagcaaaagcaacacaaaacattgagattctcggatatcagcctaattcagttatggagcaacatatgaaaaaagcaaaagcttttgtctttgcagcggaagaagattttggcattactcctgtcgaagcccaagcctgtgggacaccagttattgcattcggaaagggaggagcattagaaacaatacgtccatatggcgtagataaacctactggcttatttttcgataaacaagaagttacatctttgattaatgctgtgtccgaatttgattcaaaaagcgataaatttatcccagcaaactgtagggaaaatgctttacgtttctcggttgaaagatttcaattagaagtggataattatgttaatatgaaatgggatttgtttcaagaacgtaagcaaatagtatattaa

SEQ ID NO: 247636 - DNA, 1014 bp, Klebsiella pneumoniae
atgtccaaattttcttttggttttaaaattcacttcttatttttctttattctattatcattttcatcgagggcttatgtacttggtatcggtggtcaccctgaggggtttagaggtagtgctgaaaaatatgtcagcctgttaaaacaatataatatttcctcgctaagaactgattacctttggcgtgaggttgagattacaaagggggtatataatcccgcaaacaataaaacggaatcagtaattaatctatctttcaaacaaggtgtatccgcgctgcttattttaggctatggtaatgaattgtatggtactggaaagccgaggactaaagatgaaatccttgcttactcaagttatgcagcatggacagctgaacatttcaaaggacgaggatatatatatgaaatctggaatgagtggccccatagaaccaataaagatagctcatcaacaaatattgattctgcgatgagttatcttgccctagttaaatatgcatcattagcaataaaaaaggttgatcctactgcaaaagtaatagcaggtggctttaatccaattgatggattagaaaaagaatgggggcgatatttagttaaatatggtattttaaattacgtagatggtctttctatccacccttacgcgtattccagtaaaaaattagcctcacccactaccaacttatctattgttaggaatttccatgatatgcttatttcaactaacaaaggttttaaagaaattccattatatataacagaaataggatatccaacctatcgtggtaagcctcagtttactgaggatgatgttgagtcttatgcaactcaatatcttgaaattgcaggctcaatgccctttgttaaaggtgtgtggtggtacgatttaaaagatgatggtaatgacaaaaataataaagagcacaatttcgggatacttaaaaatgatttaactgaaaagaaagttgctgatgtttttactaaatcaaaacttaatttaaaatga

SEQ ID NO: 247637 - DNA, 993 bp, Klebsiella pneumoniae
atgactaagaataaaaatatatatttttatccatttcggactgatataaattcgtatccactaaggatgcagcacatattatcagattcatatgttataaaaaatctgtcttttaaacatgaagcaattaaactattatcctttaagtttattagaaaagatattgctataattaattggttagaaaatggctttgtgagtaaaaatggagagatcagttatcttgggactatacgagtatttataatactacttttgctaaagctacgctttaaaaagttattgtatgtaaagcacaatcattatcctcataatattaaaacaaaaaatatcaaaacggttattagtttaatgaaaattatagtgagggtttctgattcagtagtagttcattcacctactgaagttaatcttacttatttacctcatccgttatataggtatccattagaattatcacaaaacattcaatctcctgatgttgacaaatatattatatttggacgaataacgcgttataaaaaaattgaagatgttattttagcatttcctgataataaaaaactaatcattgcaggaggatgtgaggatagaggatatttatctttccttgaagagttggttaaagataaatccaatataataataaaggggtattttcactctgataaagatgctgccaaccttattaagggttgtaatgggcttatactaagccattctaatgaagaaatgattgtttcaggtagtttcttttattctctcacaattggtgttaaagtttatgcgattcaaaccccttttttatcttgggttggggaaaacgttggtgatgatgttatacaaaactttaaaaacctccatggtatgatggaatcaataaaaaatgaacagaaattaaatttttcctataggaaagaaagtatagataaaattaatgatttatttaatgataaacttattcaaaatacttttgaaaatcttttaaactaa

SEQ ID NO: 247638 - DNA, 174 bp, Klebsiella pneumoniae
atgcgttatattaaagaacttgaaggactccgcgggctaatggctctttgggttgtttttggacatagtcttgcggccctgccacttattaatacgcatttgcctccaaccgcgttaaattcgtatgccgtcgatgtttttattatactcagtggttttgtcattcttttatga

SEQ ID NO: 247639 - DNA, 441 bp, Klebsiella pneumoniae
atgatggtgattgagggtaaagaggcgatcgggcgggtggactggcagcgagtgcgaacgatcatcgccgaggccgggctgaatgagcgtgatgttcagcaactagagcaggcgttccgccagagcaccttctgctggtttggctatgagaacggtcagctgattgccgtggcgcgagccatcagcgactgtacctggagcagctatctggcggatgtggcgatcgtccccgctcgtcagggacagggctacgggcaacagctgatgctggccatccgggagcaactcctgccctttggcaaaatatttatctatgcggtggccgataaaattacgttttatcagcgctttggctttgccatgttgactaccggcatggtctgcgccagcgaggaaggcatgcagaaaatgcaggcgcagggctatatccgtcagccctga

SEQ ID NO: 247640 - DNA, 192 bp, Klebsiella pneumoniae
atggaaataatgatgaatattgcgctgatatttttttggtttgtagtcgtcgttgtttgtggaaccgcttatttctttacgattatatttgctcttaagaaaggctggattggtgatacaagttcgaaggtcatatattttataaccttcgttattctggcggctgtagtgtacaagctaccattagtgtga

SEQ ID NO: 247641 - DNA, 681 bp, Klebsiella pneumoniae
atgaaagaacgcggaatgatttttaacggggagatggtgcgggccatcctcgacggccggaagacgcagactcggcggattatgaaggttcagccagagaactcagagcttgggttgcgccgggtggttgaatccaaaaacggcattgatgacggcaagtatttttggtcgcagtccgatgcaaccggcttgaagtcacgatctaaaccgttcgcctgtccgtttggcaccgtcggcgaccgcatctgggtgcgggaggcttttagggtgcatagccgggctacagacgtcgcaaccctagtatacaaagccagcgagcgaaactcatggactgagcaaacccatcgtgtacccgtagctgtcttcaataagccggcaacgcctgagaaatggactccttccttgcacatgccgcgctgggccagccgcattttgctggaaatcaccgacgtgcgggttgagcgattgaacagcatcagccaagaagatgcaaaagctgaaggcatggagcttaccgggtggcgcccaacatactctgacccggatagtggcggagaggtttggacaccttatgacaacttcgcacagttatgggaatccatctacggcgaggagagctggaaagccaacccctgggtttgggttatcgagttcaagcgcgttgaaggtggtgcagcatga

SEQ ID NO: 247642 - DNA, 318 bp, Klebsiella pneumoniae
atgaacaaaatcacagcactgccagtagagcgcgaccaatacggttactggactcatcctctatacgatgaattttgcgatggccgggaatctatttcgtctgaggagttcaatgcctggctggataaaaacggactcgcctggaaagtggtttaccgtgatgaggatgatgtagacccggatatcgatggttacgacgtctctcaatggcagccagaacccccagcgggcgaaggttggtttgttggctcaattcacgacactgaagatggcgcggtatgcatctggttgcgccccactgaaggcggtgcagcatga

SEQ ID NO: 247643 - DNA, 930 bp, Klebsiella pneumoniae
atgaatgatctgcgttttctggaagccagcgcccgcgttcgcgccagctcgctggtggataaagacacctttactgaactgatcggcccggcggacaaacgaaccagcccgcacctgcccgtgctgaatgaagcggtggagtttgacgacggcatcgttaccggcatcggcctgctcggccagcacccggccattgtcatctcccaggaaggacgctttatcggcggtgcggtgggcgaggtgggcggcgcaaaaatggtcggcgcgctgatgctggcggacgaactggcggcgcagaccaccgacccggcccgccgcccgatcgttctcatctcctttgaaaccggcggcgtgcgcctgcatgaggctaacgccgggctactggcccacgccgagtgtatggacatgctgcaaaccctgcgcggtcgcgtcccggtcgtggcgatgatcggcagcaagatcggctgctttggcggaatgggttttgtcgccgccgccaccgacatcatcgtgatgagtgaatcgggccgcctggggctgaccgggccggaggtcatcgaacaggagatgggccgcagcgagtttgacgcctcggaccgcgcgctggtgttccgcaccaccggcggtaagcataagtacatcgtcggagactgtaactacctgattgccgactcgctaacggctttccaccagcaggccgcgctgattgccgacctgccctggccgcagattgaagccatgcgccgcatcggcagcgaagcgaaagtacgcgcccagatggcgctcacgaaaaaaatcagcgagtcagagccatcagatgcacgggatgtctgggctatggcaggcaataccgcgccccagtcgctggtggatatggatctcgagacgttcctgagcaacgttaaacgcctgccggtggaggaagcataa

SEQ ID NO: 247644 - DNA, 645 bp, Klebsiella pneumoniae
atgagcgccctgcaacgccatactttgtgctggctggagagcgctgaactgcggctgattgcgaggcagttgaacggcgcgtttagtgccctacccgcctcgttgcgggaagagttgcgggactatctgctttccggatatctccccggcatcgtgcgcaggggcatccgtgatgaagcgagtatttccctgggcttttgctttccgcagcgctggcaagggcagcgtctacggctggcgacggttgcttcattacaggccgtcacgcgcgtgtcaacaccggaacaaacggccatcctgcctgccgtcaaccgtaccagcgcgatacgcgcctttagcgccctgcgtcaggcgtggcgtgggccggaaaccgggcttggcgtgtgggggtcggtggcgctggagatgacgacgccctggctatggacggacagtcgctccgatttagatattcgcataacgccctggcacgaaatggcgttaagcgattgttactctgttctgacagatattgcccagcaatattcagtacgtattgatggagaaattaatttaccaaacggtttttctatcaatatcaaagagtggtttagcaggagtctgaccctgctggctaaggaaggtgcgaacaagttcctgatatga

SEQ ID NO: 247645 - DNA, 1209 bp, Klebsiella pneumoniae; identical to SEQ ID NO: 119425

SEQ ID NO: 247646 - DNA, 903 bp, Klebsiella pneumoniae
atggctgcacacactaacgtctgtgtgattggactgggttcaatgggcatgggcgccgcccgcgcctgcctgcaggcgggcctgaacacctggggcgttgacatcaatcccgacaactgtcgcgcactgctggcggcgggcgccaaaggcgcgggccccagcgcggtgccgttcgccacggaactggatgcagttgtgctgctggtggtcaatgccgcccaggtgcgggggatcctgttcggcgagagcggcctcgccgcccatctgaagccgggcaccgtcgtgatggtgtcgtccaccatcgcctccgccgatgctcaggccattgccgaggcgctggcggagtaccagctattgatgctcgacgcgccggtatcgggcggcgccgtgaaagcggccgccggcgacatgacggtgatggcctccgggagcgatgccgcctttgcccgcctcgcgccggtgctggacgccgtggccggcaaagtctaccgcatcgggagcgacattggtcttggctcgacggtaaaaattatccatcagctgctggccggggtgcacatcgccgttgccgccgaagcgatggcgcttgccgcccgcgccgggatcccactggaaacgatgtatgacgtggtcacccacgcggcgggtaattcctggatgtttgagaatcgcatgcagcacgtcctgaatggcgattactcgccaaaatccgctgtcgatatttttgtcaaagatctcgggctggtgaatgacactgcccgggcgctgaccttcccgctgccgctcgctaccaccgcgctgaatatgttcacctccgccagtaatgccggattcggtcgggaagatgacagcgcggtgatcaagattttcaacggcattaccctgccgggccataaacagtga

SEQ ID NO: 247647 - DNA, 297 bp, Klebsiella pneumoniae
atgaaacatcttatacataccttcttatctacatcacgtagcggttcaatcattaagtatgagatattttcagaatatcaggagcttgggcatcacaagaagatcgctgagggaacatgtcagattgttaagtctgaatttgataaagatagtaatgagtttaaggtaactgatatcaacctaaatattgataaactgttcagtgcaaatcaaccaaagcctaatacctggtactccgatgggcaagaccgtgtgagtctcgacatggttatcaactatctcaatgatttaaactga

SEQ ID NO: 247648 - DNA, 360 bp, Klebsiella pneumoniae
atgtcttcatgttacgcagtagttttaaacggtaataccgaaattaaatacttcccgttccacaattgcgctagcgctgaagtagcagctgataaggccgacgaatggcgttatgccgcaattgaggctatcggctgggatgaagcgcatcgcttccatctgcgagtcgtccgcccgaccgtagttttccgcctgaccaatggctctatcgtcgaatgtgacccgttcaacgtggacatagacccggctgtatctgcggaccgggattatcacctttgcgcttttgggtttgacagggagcaccgctgttcaggtgactgggacttagacggcgctgaaattatcgaatacatcgcttaa

SEQ ID NO: 247649 - DNA, 231 bp, Klebsiella pneumoniae
atgagccgtcgcggtaactgtcacgataacgcggttgcagaaagctttttccagttactgaaacgagagcgcataaagaaaaagatctacggaacgcgggaagaagcccgtagcgatatttttgattacatcgaaatgttttataacagtaagcgtcggcatgggtcgaacaatcagatgtcaccgacagaatatgaaaaccagtattatcaacggctcggaagtgtctag

SEQ ID NO: 247650 - DNA, 1278 bp, Klebsiella pneumoniae
atgtctgaaagatcttcaagtgcactggtctctgttgtgatacctgtgcacgatgctgcagaatatatatctgatacgcttagttccattttatcgcaatcgttacaggatattgaagtcatcattattgatgacaattcggctgatgatacgttaaagctactgcagtcctttgccgctaatgactcgcggatacgtcttttgaataattcgcagaatatcggtgccggtgcatcacgtaacatgggattaaaaatagcaagtggcgaatatatcatttttcttgatgatgacgattaccccaatgctaatatgctcaaacggatgtatgatcatgctgcattgctgcaagccgatgtggttatctgccgatgccagtctttagatctacaaacccattcatatgcaccaatgccatggtctgtgcgcgtagatttactcccccaaaaagaactattttcatcagatgaaattactcataatttctttgatgcatttatctggtggccctgggataagcttttccgtcgccaggctatactggatactgggttacaattccaagatttaagaacgactaatgatttattttttgttagcgcttttatgctacttaccaaaagaatggcgttcctggatgagatcttgatttctcattccattaaccgcagtggttcattatcggtgaccagagagaaatcatggcattgtgctcttgatgcgttacgtgccctctattcctttattgactcaaagcacttgttgccttcacgtggtagagactttaataattatgcagtgacttttcttgagtggaatttaaatacgatttctggtccggcgtttgattctttattcactgcttcacgcgaattcatcgcctcattggatattgatgaaagcgatttttatgatgattttatcaaagcggcacactatcgcctgattcggttaacgccggaagagtatcttttctcgttaaaagatcgggtattacatgagcttgaatcctctaatttatcttcagagaagttgcaagccagtattgcttctcaggatcaagttcttaaagccagggaagaagaaattgatgagctaagagcgtccgttgcacagaaaaaagaacgtattgataggttggtccagcgaaatgcatatttagagactgagtatcagaaacagcaagatcaattaactaaactacaaaatgaattaaataacgctgctcaacgttattcagcccttatttcatcattgtcatggaaagggctttgttga

SEQ ID NO: 247651 - DNA, 828 bp, Klebsiella pneumoniae
atggctatcgacatcaaggattcaattaacagacttgactgggcagaagaacttataacatatttagaagataggattcgcaaatatatagattcacaaccactaacattgaaatttgcgataatgggaacccaaagcaattccccaagacaagatgagttaaataatttcttaaaaaagtattttaaaattgatcgtgctggcatggcctcactgagattgaatgttgttaaagaaacaccacctacaattaaccttgctttaggtgacgttgtagagaatataagaataagctatgagtaccttgctcaagctatagcaaaagagcatggcatgtctggcgacgagcttgaatcaatatactttccatcaacagataagcctgaaaatatagatgccagaattaataaaatatttaagggaaaactaccacaagatattgagcgaaagataaaaacacttgaaccattcatgggtggaaaatatagaattagagaaattgcagcattaagcaaccttaacaaacacagagaacctatatctgttatcaatgtggcaaaaaaaatatccatcactaacaaagaaacaaactcaaccatccaagaggtgcaagttggtcttatattaggctcaacggctatcgatgtttattcaatgcctattcttgaatccagtaaagttacattcactcaacccattccagacttgagcattgccctgcacaaaattaaagaaaatgcaactgaagaaggtcatgaaaacgtacttcaatacctaaaggaatctgtcattttggcaaggcaggtagttgatttattcgctaattaa

SEQ ID NO: 247652 - DNA, 3426 bp, Klebsiella pneumoniae
atgtttatattttcacggcgacatttttttagtagaattttaccagcctctctgtattttgcaatttttaaagcaaaaccaaatcatattaatgagtttaatattccagacaatagccatcaagaagacaataacagtcctttagcatcatcatacgaagttggtcccattcatatattaaattataggcaagtgatttattttgatggtggtttttatggtgtgaaaaatgatgttgtattgccatttgttacaactggctctgaccttgcatcttggcattctgattcgaaaaagtttttctcaatcactgaggatggcaatgagttgatttctaggataaactattcgaatattttttttctattaaatgcaaaaaattctcaacatatagtcacagttgacggtttttatagctcaaatgatggcggccaaggggaatggattcttactggtaatatagataaagaaaaagctggtatgcatttcccaaaaaatgcgacagcatataatgcctttggtgtagaatatcgattacgtctgaaagaccgtactattgtcaatccgaaaataaatggcgccaaagagatctctggcatagaaattagtgctatgtcctctgatggattcgtttgtctaggagaggttattaacggcatttatagtacattaccagtattatatcaaccaaacaataatattgaatcatctacaacctttaaggcattaaaaatcgttttatctgatgggctttaccgtattggaaaagagtcaataaaactaagaagtaacatacagtatgacttcggtaaatcaacgatatatgtaaaaggaagagatgctggtgtctatataaacggattggagcattctgttgaggatattgatgatatctacaaaaaatgcggggaaagactgaactgggaatctgttagtttagggttcactcttgtcagaggcgggcattttattggggaccatgtgccaggtacttatgatgaagaatgttcttctggaattggaattttggctttaaatccatggtattgttcttttgaagatattaggatcgagaattttagagttaatctggttggaatgcaagtacgcacagaaaatgatggcgtttttccaaatgaaataataccttatatttcaaatatacttcctgaaaaaattggtaatttttatggttgtgtgtttaaaaacctatatgtaagtactgcacgatattgttgtgctagactccatattgattggtgccaatggataggcggaactatttctaataatggcctctggggaagctctaaatcaggccagcaatgcgatttctatttaattgaaactggccatggctttcattgttctgcagcttatctcagtattcctgcatacaacccactggagagagctccaaataaatctgttattgctacagcagcacgtggttcggtgtatactgcttgctacatggagaatacgccatcatttattacggttcttaataaatggtggacaaatggaaacgaaaagggatttggtctaaatatagattgcatcgcttcacaatatcggccagagaggaattataaatttctaaccttcgagaagaatgcttttgggtactacggtaaaaataactcatggacccccccaacgggttatgcttcttatccctcaacaaatggtattgatttttttcgttttggtagcccttgtcatgatattggtgcctttaaacatggtgggtttgattttaaatatggtacctatggcatttcatacgaacttaatgatcaattttcaaaccctcctgatgttgatacgattagaggtaatatcgtatcaaaagagatgttttccccttatggcttgattgtcagtaatggtattctcaattttcctattcaattcccagtattacacagtaacatttgtatatggtttaaagacttatctaataactttgacctcaataatatatcattgtggcgacatggtaatcttgaacaaaagaaaactaaaggcaatgctgaattgttcgtttcgattggtgaatgtgttatagattatggtaatggttataagatggccattcttcaaaatctaaaatggaataataatgatgaatttaatttagaaaatctttactcatcacttaaaatcattgttccagaagagactccaattatattaaaggcaatacaagcatactccggtggtgttccaatatttcctatgaatttgaattatattccagagtctgctgataattgtatctggggtaatattcatcctagctccggtaaaaaacttgggttaatgcaaaatattggtggtggaattttttttattggcgatataattaatccgtggattggcgttacaagccggcatgacttttattcgcctaacatatcttggcagaaggatgctgtttctacaaacatgccacgaatagttgagagtggtagttgtataggaatgtttttttgtaaggtgtttactgttgttgttaacaatgtaaatgaagaactgaacctaacagaaattactgtttctgctaaagatttaccctatatttatgttggtgttccattgtgtatttcatcaacatcaacatcaacatgtgaagtgtcaattttatcacgcattatcgaggacggaatattaacaaatcggtacattttgactggtattgtaggggaaatcggtacattattagttgtcaatcaaagaatgctggcggctcgaaaatatgtaggaggttatgcattcggtagtattgagatcaatgaaggacaaatagatatagtgaaatcaaaagatagaggctcaaagcaggggctaaacttctatatgactgacaatcggctgacaccgtcagcttctatgacggccaccgaggatagtattctgtttagtgctggcagtttttggttcaacaataatatttgttttagcccagataagcattgtgacctcgcctcagcagattctccgatagagaatatatttgtaaggaatgcaatttcaactgttgctgataaaaataatatacctattattcgaaatgtccccgacaatatcctcgatatttgggggacaatatccgctaaagcttataaatatgattgggctattcgtcaaaaaggagatgatatggcccggtggcatgtgggatggattgcgcaagatatagttgatgcatttgcaaaagctggggaaaatgctagtgaatgggcgctggttgtctataatgaatcaagttcaattaatactcctttattaacttctcctgagtacacactccagaataaattgaaagaaacatcagaatggcgagtaatattagatgaatgtaatgctatggagttgttatatcaacgtcgtcaattgaaaagactttctgaattgctttga

SEQ ID NO: 247653 - DNA, 1275 bp, Klebsiella pneumoniae
atgtcagcatttttatattattcagggggagattacactcatgtatattatcctggctatcctgggagtcaaggggcaaagaaaaatgcaatggagggagtaagtcgcttcctccctacaatagcagcgtggcggcacttctctaatacaaactccttcaagtcattagatggaaatatgatagatatttcggaggttttgcaccaatcctttatcaaaggtaccaataaaacttcgccaagttattggggagatatagatggtgattctgatcacaggatttgtgaagccgctgatcttgcacttgctttatggatttctaaagattacgtctgggtgcgttatacaattacggaaaaaaaaaaaatttcagactggtttaaccaatgcttacgttataaagttatagataataattggcttttttttccactaacgattcagtttgttttgaaatcattgacaggtaatgatcaaatcaatattaaatattatcaaaggattaaagaattttacaacgatgatggatggtttaaagatggtattgatggaggatatgattattacaatgcatggggattttattactcattatactggttaagtgttatcgaacctgattttgataaagagtttatttctgctgctattgataaatttaatgcaggatttcaatattttataggtccctccggtgttccattattcgggcgtagtttatgttatagactagcggttacggcacctttaatagcgggggcctctattggaaatagaccctgctcaattggtcaaattaagagatcattgagttgcagtttgtcatactatataaaaaatggtgctttacaaaatggcattccgactcaagggatttttgcaacggatgaaaggttacttgatgattacagcggtcctggcagtagtttgtggtcactacgtgcgctcaatattgccttttttagtggacataatattggtttgtgggatgctgaggagcaacttttacccgttgaaataggtgactatataattgaaattgaagatgttgggttgtgtattataggtgtaaacaaaacaaaggaaattgttgttattcataaaaaagactcaggaagacagcatgattatttgccgcctgaccggaaattagaaagtataagtttgttggctagatgtattcaaagaattttgggcgtttcaatgcgaaaatcagaaggtttacttgaaaaaggtataacttcttttagctcaaagctgaatggtttgttataa

SEQ ID NO: 247654 - DNA, 195 bp, Klebsiella pneumoniae
atgagcctgctgctacagcccgtcgaaattaaccttgccgatacggttggcgccgcaatgcgccagacgggctttagtctgtgtaccgccgccgaacgttcatcgctctatatgcttccgctgcgcgacgccctacagaaggagaaactggcgcggcaagacgcgccagctcggggatcagcgatggttgcctga

SEQ ID NO: 247655 - DNA, 333 bp, Klebsiella pneumoniae
atgagcttttttatttctgatgcggtagcggcaacgggtgcaccggcgcagggcagcccgatgtctctgattctgatgctggtggtgttcggtctgattttttacttcatgatcctgcgtccacagcagaagcgcaccaaggaacataagaacctgatgaactccatcgccaaaggtgatgaagtgctgaccaacggcggtctgatcggtcgcgtgaccaaagtagcggaaactggctacattgctatcgcgctgaacgataccactgaagtggttatcaaacgtgacttcgttgctgccgttctgccgaaaggcaccatgaaggcgctgtaa

SEQ ID NO: 247656 - DNA, 810 bp, Klebsiella pneumoniae
ttgactaatataataaaagtttggctaatttctcaaacattgttctggaaagttagaactaatttaatgagaattgtttttttaattgaacgtagttcatataaaaataaaacggctctttccaaggttagtaatggtacccacatcttaatatcaataacattaattggcatcaaaagtttattgtttgttgtttttttgttattagctcttgggtttttagagaattatattcgaagtaacacggactttcttcatcatctgagctccgacgacaaaaagttcaatatcgaccaactgaggctatatgcacagctgcttacagctattttttcgatatacttcgctacaattggtatcattgttagttctggatatacgagacttcggcgagacataatacagatacttactaccgaacaagttggtagcgtatattcgcgtgttatggttacttctgccgtattctgcctaagtgcaacagccttacagttgttcggatttgagcccggacttttcatttatgcggcaggaacgctattaacacttataagctcgttggctctttttccattaggtcaaagattatttaatttttttgatctcaatcagttagctcgtagcgagatactccccagaattgctcgccacatagagggggcatcaaattctaaaaattctatatctttagccaatcatcactccaaagccgcacattcagcatttgagcaactaaactatattgacgatcgcatgaggttagggaaggtgcgaataagcaggtcatttcttcccaagctgactcgctga

SEQ ID NO: 247657 - DNA, 552 bp, Klebsiella pneumoniae
atgaaaatgaaatcactttgcctggcaatggcactcgtcggcttgacctcacactatgccgccgcggcggacggtacgctgaattttctcggtaaaattgtcaactcaacttgcaaactggcaaacggcgatgaagagggtgtcattaaagttacgatgggcgctgttccgctgtctaaattaaaaaatgataccaatggcaccgggccagaagttggggtcaatattagcgtcaaagattgtgacgcgggcacgtactttattgtgctcgacggtgctccagccaccgatgcgcctagcactaacatactggctctcgatgcggatccgaatgcggctaaaaaagtcggcattaagctaaccgaccgcaataatactccggtcacgctcgataaacctttcgatcccgaagtcgacccgagtattacgatcgatgccgatagcggctatggtaccttcaacctgaaagcctattactatacctgggataaagccaacgtcgacgctggcgccggcaatgcgaccgcccggtttaccattatacagcaataa

SEQ ID NO: 247658 - DNA, 1617 bp, Klebsiella pneumoniae
atggcaatttttgatgaaaagcggcatttatatgaagccttattgagacataactacttccccaaccaaaaaggttcgataagtgaaatcccaccgtgcttttcttccaggacattcacaccggaaatagcagaattagtttcatctgacacatcagggcgtagaagcttacaaggttatgattgtgtagagtattacgccaccagatataacaatttcccgagaacgctctcaatcatccatccaaaagcgtacgcaaaattagccaagcatatacatgataactgggaggaaatacggtttataaaacaaaatgaaagcagcatgatcaaaccagacatgcatactgatggccgtgttataatcatgaattatgaggatgcagagactaaaaccgtaagagaactgaatgatggttttggacggcgatttaaagttaacgcagatatatcaggttgctttaccaacatctactcacactctattccgtgggcggtcgtaggtattaataatgcaaaaatagccttaaatactaaagtaaaaagccaagataaacactggagcgacaagcttgactattttcagcgtcaggctaagaggaatgagacgcatggtgttcctattggcccagcaacctcaagtattgtttgcgagattattttaagcgctgtagataaaaaactgagggatgatggatttttatttagacgttatatagatgactatacatgttattgtaaaacacatgatgatgcgaagtcttttttacatttacttggtatggagctttctaagtataaattatcactaaatttacacaagactaaaataactaatctcccagggactttgaatgataactgggtttctttgcttaatgtaaactcaccaacaaagaaacgttttacagatcaggatctgaatactctaagctcttctgaagtaattaattttctagattatgctgtgcagttgaacactcaagtaggtggtggaagcatactaaaatacgctatttcactggtaataaacaatctagatgagtatacaatcactcaggtgtatgactacctccttaacttatcatggcattatccaatgcttattccatatctaggcgttcttatcgaacatatttatttagatgatggtgatgagtataagaataaattcaatgagattttgagaatgtgtgcagagaataaatactctgacggtatggcttggactctttatttttgcatcaaaaataacattgatatagatgatgatgttataaaaatgattattagtttcggtgactgcttgagcttatgcttgctagatagcacagggatatatgaagaaaaaatcaatggttttgtggcagatattattaaattagattatgaatatgacatagacagatattggctccttttttatcaacgattccttaatgataaggccccaagtccttataatgacaaatgctttgacatcatgaaaaattatggcgttaattttatgccagatgaaaattataataccaaagctgagtcatattgtcatgtcatcaacaacccatttctcgaagacgaggatgagattgtaagctttaacgattatatggcgtag

SEQ ID NO: 247659 - DNA, 1776 bp, Klebsiella pneumoniae
atgtacagcacgaatagtacgtatgtgaatccgcctgatgtagattcactgcgtggacacaaaaccaccaaggagatgttttccccatacggattgctggcagcaaatggcatcctgcagctgccagtgctgtcgcctgcgctgcacagcaatatctgcatctggtacaaggatttgactggcaattttgacctgaacaacgttgtgctgtggcaaggtgcaaacatcgaccagctcactacagatgacagctataactacaacctatttatcgctaaagcggaactggcagtggattttggtaatggctataaaatggcgattatccagaacctgaagtggaacaataacgacggcgttggtactgccgggagccagcaatcgctgcaatttactatccctgacgcaactccaataaccctcaaatcggtacaggcgttcacgggtgggatccctgtgtttcctgctggactggattatcgtcccgagtcatctgatttgtgtgtgtgggggcatgtcaacccaagtaacgggtttaagtacaacctgtttaagaaggttggtggcggcatcttcatgccagaggatgtagtttacccgtggacagcgcaccagagggcgaacacggactataagtttgcaacaactgtgtatgaggactacggccacacgaacctaccgttgataatcaagggggggcatagccttggcgcgtactttgccaaggagttcaccgtatcaatcgttgaggttgatgccaccaacagccggacgacagtggatgtgcccgctgcgtataagccgtacgtttttatgggcattcctcttaatattacgggagggtcttctacagggtataccggagaggtgcgcatccataagcgcaacttaaaggttgatgggagtcttagtgggcagtatgtccttgatgccgtggttggtgctgttggtgatactctgaatatcaaccagcggacgctaacagcgcgtacttatcgtcgtgactacaccgcagacgctttgaccgcaaacggtagctttaccctgcgggggactaccatgcgtttcgggtataacgcgggttctacaagcacgcgcgcggtcgagttttatgtcggcggaggcactactaaatccgcggatataaacgcatacgggacatctctcggccttaacgcctcaagcgttgtctttggtgggaacatcggcttcagcgcaacaaacacctgggatataggttctgcgggtaataccgttaaaaacatctatgcccagaatgcggtaactgtcgtttcagaccgtaatcataaaccagtgcgtgagagcatcccggataatatcctggatatctgggggacaatatcagcacagcgttataaatatgactgggctattgaagcaaaaggagaggataacgctcgctggcatgttggctacattgctcaggatatcgtagaggcgtttgctgctgctggtgaggatgcgaccaaatgggcgcttgtggtttacaacgagtggcctgcggaggatgcgatcatcgagtcttgggatgacgagtatgagaccgtaccggcgcagtatgacgagcagggacagcagatatctgaggaaactcaggtactggtacgacaggcaggctcccgcgttgtaaaagatgccgttccagccgggggggagtggcgtctggtaatggatgagtgcaatgtgctggaggctgcgtatcagcgcaggcagctggagcgtttagaatcagcgctcgcgcagttgcagaagtag

SEQ ID NO: 247660 - DNA, 1005 bp, Klebsiella pneumoniae
atgtttacagatagacaggcgttgtatcgtgatcttgaaagagagcgtgggtcgaaagttatcacttatgtaaccggtgacagacctggcatggaaacgaaaatccattctgaagtttatgatttctttgtgaatcacttagatgaaattggcgtaaccccaaaaatatctttacttctttacactaaagggggagaaactcttacagcatggagcctagttaatctgctcaggcaattttgtgatgaactcgaagtaataattccctcaaaatgcctcagtgctggaactattatggctcttggagctaacaggatagtgatgacaaagcaggccacccttggccctatagatccaagccttacatcccctctaaatccagttgtaacaattaatggacagacaaatatttccccggtaagtgtcgaagatatcaaggcttatctttccttggccaaggatgagttaggcattcaaaaaccggaagatgctatcaatatccttcttaagctgagcgaaaaagtgcatccccttgtgttaggaagcgtttatcgggcacaaactcaaattcagatgctcgccagaaggcttctgacacaccaggtatctgaacaggataagattgagcggattgtgagctttctttgcacggattctggtagccacgactacactatcagcagaagagaagccacaaatgatcttgggcttacaatagaaaaaccctcagaaacattatatggcttgattaattctatctatgttgatatcaagagcgagctggaacttggtaagccttttgatgtcaataccacgcttggctctgctcctcaacagcaatatacagccattagagcattagtagagtctacagatacgtgttcttaccagatgcgaactcaagggctgttgcagaaagttcaggtatctccaccaccaatgcagcagtttgctatcaacaacacagttagttacgagggctggaaacgtcatgatgaaccttaa

SEQ ID NO: 247661 - DNA, 324 bp, Klebsiella pneumoniae; identical to SEQ ID NO: 202557

SEQ ID NO: 247662 - DNA, 924 bp, Klebsiella pneumoniae
atgctaaatcggggattgactgtgctaaaaagtagcagcactgagaaaaaattagataaaaaaaataaagataagattgttcaaacttactttcaagaaaagactgcaaacctgtatataaagaaaatccttaatgatcctaacaaagaatttttaacaaatagagatttagacgcattaaaagaatcatatgataaagcgcatgatattcgtaaattcgaaatagagctttattggaagagaacagcttatgtatggactcttatagcgtcccttataactgtaactggtgtgttgcttgcagcatattacagactaccccccgactcaggcggaagtaatgctcttttggggttggttgctagtgttgccatattaggcgtacttataacaataatttcatctaaaattattagaggcggtgaatattggcaaaagaattgggaatatcatgtaagcttattagagcctcttttctctggtagaatttacagtacattagtaaataaaaaattaaaacgacactccatatctaagctaaacagtatactttacttcttgtttttaggcgtatggctattattagctgaaggaatatactttgttgtctttcccgatacgaataaaaacaattttttcattttgctagtttccttctcaactttagtttatataacatcatatttgattgatttatggacatatagaaaacctgagaaaacacaactttcaattgctcattggcaagttgagcttcaggaaaaaaccacagcaatttccgttgaatcaaacaaaaaaaatacatccttaaataataccatccgcaaaatatatttccacaccagttctattttgaagttaacgctattattaatttggataatgatttcaataagtttcctttattacattcactacaaatag

SEQ ID NO: 247663 - DNA, 828 bp, Klebsiella pneumoniae
atgaataaaaaagtaaaagttgtagaacttaaaagcctcgatcggttccgtaatgatgtgttaagcacacaaaaaccagaaaaaatagaagaattactaagctggtacttgggtgtttacggtgggattaattttacatttggctatgacaggccaatattcagggcaaggaaatgctatgaccgcaatggattcagtaatattagtgaaatatatcctcctccaccagaaaaatgtcaaattgggcgaatgaatgaaaaaggaaaagcgattttttacggttcatatagtctagggactgcacttgcggaaattaacgccaaagaaggcgactatattcaagtggcccattttaacttaccagaaaaagcagatcatggtataagatgctttgcaataggtgaaatttacaattcctaccatgggaatagtaccatttcatcggcgttatctgatgaaattagaaaactaactggccgattaggtaaaaatgatatacatgccttgttatcatttttgtatatggatgcattttctgctgaactgttgaatagcatcaatgcaagcagtataaattacatatactcaagaatctttagccggttacttctaaacaaacacccagatattgatggacttatttatccaagtgctaaaataaaaggttcagccaatattgtattgcgcacaaaaacagcagaggaaaagttaaatttaagtttaaatgtcgtattggaaattataaaagtttatccctatggcatagtcgattttaatcttattagaagcgctaaaggtcacacctccagtggcgacatcatttggtaa

SEQ ID NO: 247664 - DNA, 132 bp, Klebsiella pneumoniae; identical to SEQ ID NO: 129542

SEQ ID NO: 247665 - DNA, 258 bp, Klebsiella pneumoniae; identical to SEQ ID NO: 129547

SEQ ID NO: 247666 - DNA, 1122 bp, Klebsiella pneumoniae
atgaacctgcttatatataaggccacagcgatgatgactccgacatttaatgcccgtatctcaggaaataacctgattgcttcactgaatgacgacacaccgattttttccctcaatgtgagcgaggacccgagtttctggatcgagggaggcacgctgatggtcagcctgaataccgacagcagccatccggtatatcgggccctggactacaaagaggccgaacaactgctgtctgtcattaccctggttctctgcaatcgtaagccgaaaatgaagtggaagaacaccatcctgcccgcggctgcactgctggttacctgttttgccgtctggcgttttgcacctgcccccccctcaccgggcatgccaccgttcggacaggcagaaccccggaatgccaccgcagaatcggctccgccacgtttccagggattaccgcagctgcgcaaccctgcgccgcggaacccctattttggccacaacacaacacggaatgccgatgatggccagacgatgccggcaagagacccagcccggccttctgcagcccggccggcttccgtggccagccaggaaacgctgagtccgcatattatgcagaatctgcagaaagcggccggacgcggctattttactgtccccctgtcttctggacacgagcgcacgctctacatctttgccgatccgcaatgtccgcactgccaggactttgagccactttttgaagccctgagcacacgttacaacgttgaaattttcccggtcacgtatgtcggcggcaaacagtcttcacaacagatacagcctgtcctgtatctcaataaggaccagcgcgcggccgcctggaagaaactgttttcggttgacgatggcatgctcaccattggcaaaaagaaaaccggtgacgatcaaaaagaagccccggcacaacgcgatgataagcgctggaaaatcgccggcgaggcgctggccatcaatgatgtcgcgttcagccaataccatatccctggcacgccgtgggtggttgctgacgacggccgccacgtaccacagtcaatgatgaaagatccggccaccatgcaagccttcatagcagggcacagcaaagcggagaactga

SEQ ID NO: 247667 - DNA, 1908 bp, Klebsiella pneumoniae
gtgccgccagccggatacggttcgtacccgtcaaccaacggcattgacttcgttcgcttcggcagcccgacacacgatactggcgcattcccacatggcggatttgacttcaaatacggcacctatggcgtgatgtacagcaccaatagtacctacgagaatccgcctgatgttgacagcctgcgcgggcacaaaaccaccaaggagatgttctctccgtatgggctgatggcggcgaatggtatcctgcaactgcctgtgttgtcgcctgcaatgcacagcaatatctgtatctggtacaaagacctgactggcaattttgacttgaacaacgttgtgttgtggcaaggtgcgaatatcgaccaactcagtacagataatggttataactacaacttgtttatcgccaaagccgaaatggccattgattttggtaatggctacaaaatggcgattatccagaacctgaaatggaacaacaatgacggcgttggtacagcaggaagccagcagtcattgcagtttactatccccggcaccactccgattattctcaaggctgtccaggcattcactgggggtattccagtttttcctgtcggactggattatcgcccagagacgtcagatttatgtgtgtggggtcacgtcaatccgagtaacgggtttaggtacaacctgtttaaaaaggttggcggcggtatcttcatgcccgaggatgtcatttacccctggacggcacaccagcgggcgaacacagattataagtttgcgaccactgtttacgaggactatggctttacgaatctgccgttaatcatcaaaggcgggaatagcattggtgccttcttcgctaaagagttcactgtatcaatcgttgatgtggactccactaatggccggacaaccgtagacgtacccgcagcgtataagccatacgttttcatgggggttcctcttaagattactggcgggtcttctaccggatatacaggggaagttcgcattcataagcgtaacctgaaaacagacggaactcttagcgggcagtacgttctcgatgcggtcgttggtgccgttggcgatactctgaatattaaccagagaacgctcacagcacggacttatcgccgggactataccgcagacgccttgacagcgaacggcagctttaccctacgtggtactacaatgcgattcgggtataacgctgggtcgacaggcacgcgaaccattgaattttttgtcggaggtgccaccactaaatccgcagatataaacgcatacggaacctcacttgggcttaacgcctcggcacttgtcttcggtgggaatataggtttcagcgcgacaaatacctgggatataggctccccgggtaatacggtcaaaaacatctacgcccagaatgcggtaactgtggtttcagaccgcgaccgtaagcctgtacgggaagggataccggataagatccttgatatctggggaacaatcggtatcaagcggtttaagtatgactgggctattgctgggaagggtgaagatagtgcgcgctggcatgttggctacattgctcaggacattattgaagcattcgaagccgcaggggaggacgctaccgaatgggcgttgcttgtacgcaatgaatgggacgcggttccggagcaggtggagtcatgggacgatgagtacgaaaccattccggcgcagtacgatgagcagggggttaagatctcagaggaaacacaggttcttatacgccaggcaggatctcgagtaactaaggaagcgataccagcaggaagcgaatggcgtctggtaatggatgagtgcaatgtgctggaggctgcgtatcagcgcaggcagctggagcgtttagaatcagcgctcgcgcagttgcagaagtag

SEQ ID NO: 247668 - DNA, 774 bp, Klebsiella pneumoniae
atgccagttaataattttaaaccgttcgcgatagcttccggggcaaacgtggcgacacaggctgagtgggaggcgctcatcgctttgtctactgggtttacagcgggcattgctcgttcaggtcaggtcaataaagcactgaggcaggcaacggtaattgcatctgctattgcgcagttcatttccgatcagtccgatgttgacgttctcgatgacggagatatggacaaactgggaggacagttgcggtctgctctgacgtcgctacaggttgattccgtttaccccgttggaatcgtgctgtttttcgcacagaacaaaaaccccaacacactgtttccgggtacgacgtggttatacgcaggtgaaaacaaaaccattcgcctgggccttcaggatggcgcagacgttttgactacggggggatcggataccgccactattggtaaatctaatttaccggctgtgtcattgaccgtttccggatcggcggcgtccgtggatctcgggacaaaaaccaccagcagtaatggcgatcacacccatggctggggttcttcaatgcagaaacagggaggtagtgatcaggccgtcggtaataattcggggacagatttcggcactacatctaccgctggcgcccacacgcacagcgtcgctcttggctcccacacacatgccgtttccggtactacagaaaatatgggtaccggcgctgccctgacagttactaacgcctacgtcaagttgatgggctggtatcgcaccgcctga

SEQ ID NO: 247669 - DNA, 756 bp, Klebsiella pneumoniae
atgggaattacattatttactgataatgcagcgtcagttatttctgatgcagatgagttttacccgggttgggatacgaccgatttgcaacggatggaaattttttcgtactccgggatcggtgggaatatgatgcctggggaagaaaagtcggtggctgttgcagacccgcagtttgtatcaggtccctgggtcgaatttaccaactatggatcagatgtaccccatcttcagttggggatgactgatacgtctctgcagacgtggctggtactggtagacccaaataacagcaatctgaacaggatgatcatgtccagctataagggctctaactccactgatcacccggggctgtcgatagcaatcgacgcaaacgggagacttgtgctactggtagggcgatataacacgacatcaggcgtatacggtgcgcaattcgtgccgctcagccagttcgattacacaaagccgtttttagtagcaataacctgtaatgacagaacgtataccataaaaaatctgaccagcggcctgtcaaactcctacaccctcctggcgtccgaggagaggtcgtacgggcctgaaatctaccttggtaaggcgccgtattcctggtatggcgaccaaaacggtaaaaccagaatagcagcatatgcggtttttaatcgggtactctcagatacggagttaggagatttcagagcgtatcttctgaaatgcattcaggcaaaatacccctccgtaattttctaa

SEQ ID NO: 247670 - DNA, 282 bp, Klebsiella pneumoniae; identical to SEQ ID NO: 129539

SEQ ID NO: 247671 - DNA, 438 bp, Klebsiella pneumoniae; identical to SEQ ID NO: 129538

SEQ ID NO: 247672 - DNA, 861 bp, Klebsiella pneumoniae; identical to SEQ ID NO: 129537

SEQ ID NO: 247673 - DNA, 360 bp, Klebsiella pneumoniae; identical to SEQ ID NO: 129535

SEQ ID NO: 247674 - DNA, 489 bp, Klebsiella pneumoniae; identical to SEQ ID NO: 129534

SEQ ID NO: 247675 - DNA, 249 bp, Klebsiella pneumoniae; identical to SEQ ID NO: 129533

SEQ ID NO: 247676 - DNA, 429 bp, Klebsiella pneumoniae; identical to SEQ ID NO: 129532

SEQ ID NO: 247677 - DNA, 981 bp, Klebsiella pneumoniae; identical to SEQ ID NO: 129531

SEQ ID NO: 247678 - DNA, 183 bp, Klebsiella pneumoniae; identical to SEQ ID NO: 129530

SEQ ID NO: 247679 - DNA, 444 bp, Klebsiella pneumoniae; identical to SEQ ID NO: 129529

SEQ ID NO: 247680 - DNA, 228 bp, Klebsiella pneumoniae; identical to SEQ ID NO: 129528

SEQ ID NO: 247681 - DNA, 228 bp, Klebsiella pneumoniae; identical to SEQ ID NO: 129527

SEQ ID NO: 247682 - DNA, 258 bp, Klebsiella pneumoniae; identical to SEQ ID NO: 129526

SEQ ID NO: 247683 - DNA, 567 bp, Klebsiella pneumoniae; identical to SEQ ID NO: 129525

SEQ ID NO: 247684 - DNA, 378 bp, Klebsiella pneumoniae; identical to SEQ ID NO: 129524

SEQ ID NO: 247685 - DNA, 306 bp, Klebsiella pneumoniae; identical to SEQ ID NO: 129523

SEQ ID NO: 247686 - DNA, 219 bp, Klebsiella pneumoniae; identical to SEQ ID NO: 129522

SEQ ID NO: 247687 - DNA, 1068 bp, Klebsiella pneumoniae
atggcagagaacgggccgattgaggaattggcaaaaataatttctaataaaatctttgataaatttttatggaaacaagtgggtccttgcgatcaggatttttcatgcgaaaaagaagagaaacataaaccagtaaataaggagcaaggtcacacacaccctgttgatgttgtctttagctacaaagatccctatctaaataaaattatatatttaaataccgatttaaaaagttacaaaaaaggctctataactcctgcaaaaattgaagcggccttatcatctcttgcgcatactattgattgcgcacgacacagtgatgactggaaaagcaaatacgatactgaagttggcgccaatgaaataagaggaatgctatttgtatataatcatgataatgatttttcacataatttttatgaatatttcaatcctaaaaaacctgatggggcaaaaagaaggcctgcatcagttaatatggaaaaaatcagcatccagcctaatcagcaaatacatataattgaaccaaaaactattaactacctaatgtcaataattgcagacatgaatgaaatgattgctgaaggtacgtttcctcaagggcagcgatatggatttttctatcctcagctaacttatcacaaagtacttgtaaatgatatctatctacctgcgaccatcgaattacttaccgcaccattcttgataattaagcatgataaagcaattggaatagattacaactcacagacatcaatcgaaacatatcctaatggttatgttgtttactataatcggactggtgcaagtgaattagaattcatgtatttattagacttactttcaagctatcaaatacttaaccttgaaaacaatataagaataagagttgcatcaaaagatagaagtgactccatccgttcaagttttaatagagcgctcgaaaaatatgctcacgaatggggctttgatgacactgcaaaacaaaaactcttcaaaatagagttacatttagtgcctgtagcgaaagaattttactcaacacaagaaatatcatgggactattaa

SEQ ID NO: 247688 - DNA, 1098 bp, Klebsiella pneumoniae
atgaagaatatacattgtgttactgacaaagctctttatgatgctcttaatcaatcccaaattagcatgggagaaatgagcgatctattcttagataggggtatcattatatcaaagaaaactcccaggaaggacttggctaaaaacttttcaaaattcaatcatgattattacgatcaccaaaaaatagcttcttatttaggtggaggaaatagaaaggagcgctccacctcaaaaataataaaatccgatatgaccgatgatattatcttggctgcagctgatgagttaaaatctagcatagagaaagaaagtgatctttgccaagtatacaagagcaatggaaaaatatatgtaagcattacatatctatctacaaattatggccgaagtgatttcaaacaagtaatcaagaaagaagccgtaatagaaatagaacgccagaaaaactcttatgtaataagaagaccagacaatgaacaagttgaaaactatgaagtcaagttattagccagtatagaaaaagagatacataaaaataacaatgaagatgggattgaagaggaaatccctccgttaagcattaaagagataagtatggaagatctaactgaccctgatatgaggacaacattcttcactaagctaataacaaacctagaaggcttcattttagaagatgtaacagacgcttacgtataccatcccaaacctgaacgtctggaagaagaagatggaaatactgagacaggagtgcatgtaagtagagcatcactcaagggagagggagttttaaaatctgaagagttaagttcactttatgaaaaaggcttttatatttggaagattagatggactgcaaaggagaatgtccccgacccagatatttatgaattcgaagcacaattcagtaatcaagaggaatttaaagatttttcatattcagctaaaagcgtaaaaaagtacaaaggcttcggaaaatataacaaaaatttcgtgtctctaacaaaatcagaagaaagtaaatttcttaaattaattgaaagtgctgcttattcaattataatagatttagaaaaacaagcacaaggggaataa

SEQ ID NO: 247689 - DNA, 681 bp, Klebsiella pneumoniae
atgactcgacgtgttaaattaataaggattaagacccgaaaaagtctggatgatttttctgttctttttcataaaaaggggttttcagtgggctccgagtatggattcctagatgttaactctcaatccaatgaaattaaatctacatatgtagagatggagaaaattcatcaagattatatcgatccacttggcgaaagatatgagcagacatttgtaagttataatgtcttcgagttcagcattacaactttagataaaggaatatatctactctccatctgcaacccgcctaaatctataaaaaaattcatcgagcgacttagttcttattttgagtatgaagtcactttcagtatggttgttcttaacttgaatgagatcattcataaattactatcgaatgagcgtatacaactacttcacataaataaacttaaagccagtggtttaaagcttaacgatacttctacagcctgcattgatataatatcaaaaggaaatgcagttaaagaagtagagacttatgcaaacggctcgaagtatacaatagataaaatcaagggtcagatgtattatgatgaacaaaagatatcttttgagatgtcaaaatccgggcttatctccattaataatgaagattttaatttcaacgagctaataagcattatttatgtttaa

SEQ ID NO: 247690 - DNA, 264 bp, Klebsiella pneumoniae; identical to SEQ ID NO: 235698

SEQ ID NO: 247691 - DNA, 1422 bp, Klebsiella pneumoniae
atgagttctaactggtctgttaagaagcttggcgacctagttactttcctttccggagggacaccatctaaaagtaataaagattactggaatggagaaattccatggattagtgcttcttccatgcaatcaactagataccatgactcagatctacgggtaacttctttaggaagtaccaatggtactcgtttagtacccgcagagaccgttcttttgttggttcgcggtggggcccttcataataaaattccagttggtatcacgacacgggaagtaacctttaatcaagacgtgaaagcgttagtgccaaaaagtgaagacataactccatattatctcctcgcgtggttgatttcatcgagagagcttcttttaggcaaggttgagaatactgggattggtgcaggtaaattagatacaaaaatattacaagacttagatgtgccagtgccgccgaaggcggagttattacgattagagttatttagcaaagctcttgatgataaaatcattctcaatcagaacatcaaccataccctcgaacaaatggcacaagccctgttcaaaagttggtttgtcgattttgaaccagtaaaagccaaaatggcggtgttggaagcgggtggctcgcaggaagatgcaacgcttgccaccatgacggccatttccgggaaagatgctgatgcgctggcgatttttgagcgtgaaaatcctgagcaatatgccgagttaaaagccacggcagaactgtttccgtctgcgatgcaggaaagtgagctgggggaaattccggaagggtgggttctgtctgaaattggggcacagatcgatattgctggtggagcaacaccaccaactaaaacacctgagttttggaataacggagatattcactggactacacctaaagatctatccaacgttgaagaaaaaatcttactgcatacagaaagaaaaataacaaaagcaggattggataaaatttcttctggcttattacctgttaacaccgtgttgatgtcttcacgtgctcccgtgggatacttggcaattgcgaaagtccctgtggcgattaatcagggatatattgccatgaagtgtaataaagaattaagccctgaattcgtgttgcagtggtgttccgcaaacatgccagaaattgtatctcgtgcaagtggtactacttttgctgaaattagcaagaaaaattttaatccaattcctcttgtgatgccgccagttgaacttgttaaaagttacaccaagcaagcaagtgcagtttactcgttgatagaaaataatatgcgggaaaataatagcctcacccaactccgcgacacccttctccctaaactcctctcgggcgaaatcaccctgccggaagccgagcaggcggtcagcgaggcggaaaatgtataa

SEQ ID NO: 247692 - DNA, 1176 bp, Klebsiella pneumoniae
atgtataaagtcgataagcccaccaacagcctgcactccctgcaggaagtgtcgttcagcagcctcggctttcgcgagcgcgatcacttgcaggagtggctggcaaaaaaccctcaggcgctaacccgcgataacgacgacgaactgctgatcatccagaaagagttcgctggttttgacgacaccaaagaacgcctcgatctgctggcactcgataaaaagggcaacctggtaataatcgagaacaagctcgatgactccgggcgcgacgtggtctggcaggcgctgaaatacgcgggctactgcgccaacctgcgtcaggaaagcgtggttgagatcttccagctttatctggatcagcacgagcccaacgagaaccgccaggcggcagacgtcatcgccgaatttatgggctgggaaagcctgaaagaaggggtgctcaaccgtaaaggcacccagcgggtcatcatggttgcggccaatttccgcaaagaggtcaccaataccgcgctgtggctgatgcagtttggtatccgggttcagtgctttaaagtcacgccttatcgtttcggtgaagacgtgttcgttgatatccgccaggtgatcccgacgccggaagcggagtcgtacatgatcggtatggcgcaaaaagaggcggaagaacagtccacctccagcagtagcgaactgcagcaacgccattatctgcgccgcgagttctggacgatgacgctggaaaaattccgcgccagcccctgttcactgtttaacaaccgcgctccctcaaccgatcactggctggctgccggatcgggtgtcagcggcgtgccgtttgaactgatcttttcccagaaagatgctcgcgtgcagctcaatatttcgcgtggggatgcgctggaaaacacctggttatttgagcgcctgcaggaacgtaaagcgcaaattgaatcgctgtttggcgagccgctcgactggcgattactgccggagcgaaaaagctgccagatcgtctgttcaaaggcgtttgacggcggcaataaagagatctggcctgccattatcgactggatgatggatagcatgaaccgtctggaaaaagcgattcgcccgagcctgctggagctggcgatggaactgaaacagagcgggatgattaccgagggagaggaagagtaa

SEQ ID NO: 247693 - DNA, 489 bp, Klebsiella pneumoniae
gtgaatgacatacagaaactacaccgggtaatcgattcactcgaagagcaatcgacgcaagtggcagagtttaatggcctgttgagcgccgtcaacgatgcaagaactgagatagaggcagcgaaatcaacgctcgcaagtctagcttatgaacaggctgaattggttacgaagaactcgaataaatttgaagagtttgacggtcgccttacgtcactgaatgatcttctaggccagatcaaagatgaacagttgaaactaaggcgtgaggttgcagccttgaagtttgtaacacctgatcagtttgaacaaggctgcacagcaattgatagccgcattgctaaacaattagcggaattgaaaagcaagttagaggcagcggtggagtctcagcaaagatcgataagcgggctacgaaccatagttgttttaggtatcttggtgttggctggaggtgtcggattcttggctatgaatatggttctttaa

SEQ ID NO: 247694 - DNA, 4677 bp, Klebsiella pneumoniae
gtgataaaggtcatcgtcctcgatcttgatgacacgcttattgatacatcaagcctcgaaccacttcggtcagctggccgatggagagacatacctaggtactttaatggttgtgtcatctatcaggacgttgtcggccttgttacaacggctcggtcggttggaatcaaggttgctatcttctcgaatgcgccttcgaactacgttcaggggctactcaaacacttcagtatcactgttgattatgtagtagcctaccatgatgtaacgcagcataagccgagccctgagggcgttactcgtattctcgagtacttcggtgttagcgccgacgagtcaatttatttaggagatagtaacctagatcgagacgctgcttccaatgcaggagttgagtttttctcagtagattggggttctgcctcggagatcgattcgtcacataagggaataagtggtctcaccgagcttattggaaaaaactcgacgcggaactccgcaagaactggacgttctgagttaatacaatctgggaataaacttcatctgggattctatttagatggtatcaaacaggaagtttggtctttcaaagataacaagaatacttctgttcgccgctgggttaacaagactgttgagctagctccttcattcccagccatagatatagttgttcgagcgttaggtcacgctgagcttagggctgaagatggcgataaagcattagataccttgggcaaatcgctggctgttgctttaggggcttcttaccaacctaagatattagagaaagatcacgtattagataaatcgactaattgcactgcagcacaaagactccaccaggtcagaggtgcctataaagcctattttgattcaatagaagctaattcaaatccgacatttctgatcgttgacgacgtattaacttcgggggctacaactgatgagataacacgctgtctatctcaagcttttccgaattcaagtatttacatttttacgttggttaaaactctctatagattggagctaggcactgacagccaagaacaacaacacaataacaaactgttttcagatttgtacaacccaatcatcgactcgctggcggacgaaagtgaactatctagacatgtcaggtcgaagtctagtagcaggcttgtaagcaagaagttttctgctaactacgcgagaaccaaccataacttcattttccacaatcttctccagtattctatctcgtctgaaacggcgtctggacagctatttgcagcaattcaagttcttaagaatatgcttcagagagggaagccaacaatagcctcgcggaaactgaggaaggcatttggcattgaactggagaagagcggtcttaatacatcagctcaggctcttgtgtcagataagccagttttttggaatagattgattcgaggcaacaagcattctgggtactacccagcgaaaaggttttttgatgagctgattccaaagtatttcggtgagtacatttttgtaaaacaactaatgctccctgaagttcagatttacgatatgactcaggtctacgttgaacaattccagaaccgacaggtagatttttacattcctcaagttggtttaattattgagatagatggtcaacagcaccaaaattctcagcatttagatgagatgagggatgcgtttactgaaaccttgggactgaagacagttcgtttcactgttcaagaagtggcatctgagaatcagtcatttatcagtaagataaattcgattatttctcaaattcagatcgttgatagtctagagcgaaatggtgtcctaacgcctcctaatggtatttctttattgaattaccaagaggcttatgaaaatggagtcgatgttactgactcgcgattgaggctgacctcggcgttgcgtttccagatactgttattagagcttcttgaacgaggtcagatcagactaggggagttgaaaaaactattcatagtcaatcgtgatggaactgattttgctgaatcggcactggacgacctgaacgatttgttatcgaatatctttcgtctcatcggcattgaagaaaagcgaattgaggttgcgctgatcgaatcagatgagcttccgagcgaacggtctggtgaaaatatattcatcgacttcagcttactggagcgttatgacgattcctttcaagttaaccaagacgtcatatattcacgtacggattacttcgatttctatcgaaacttcgaagattctgatgctgtttcaatagaaaccagtcaattgattgactatgactttttcgagctttcatgtagtaaccccattacctacaagctagatcttagcccaggcagcgagcagcgagagtcgctgagatacttcctcagcaacctgtttctaccatacctagaggatgtagatttcagggaagggcaggttggtatcataggatctgcactttcgaaaaacggcacaataggattgctgcctacaggttcgggtaagtcgatttgttaccagctgtctgcggtcctgcaaccagccgttagctttgtcgtgtgcccgataaaaagtttgatgtatgaccagaaagcagatttggatagcatcggcttcactcgaagcaattttattacaagtgatttgaaggcaggagagaaggccaaagttcagagagatttcggacgtggtaagtacttcttcgttttcatatcgcctgagcgattccaaacccatgcgtttagaaaagagatgttggctatcggactagatctctcatttgcctacgcggtgatcgatgaagctcactgtttgtctgagtggggacatgatttcaggacttcttatctgaacctggcaaatacaatcgaacggtttgctcctagtgcaagttatataggcctaacggcaacagcatcagttaacgtcttaaaggatattcaaacagagtttgatatccccgatgattttgtccgtaccccaatggacttcactcgcgaggaactctcattccacgttatcgacgataaaggccttaaaggtgatgcagtcgtcaagcttgtttctgaaatggagggtaaatggaattccgatcgggaagacggcaataaggcggggatcatattcacacctaccgtcaacggagctaagggttgtcataccttagcgggccgaatttcaacattcttgaagatggatgttagatatttttcggggtcggctccgaaaatgggtggattgcagggagaggctttcgataggtataagcgccaagttcaagacgaatttaaagaaaataaataccgcctacttactgccactaaggcattcggaatgggcgtgaataaggggaatattgcctatacgattcacttcggaatacctgggtcgatggaggccttgtatcaggaagcaggcagggccgggcgagataaaaaactattcaaggaagtacccgcagattgctatgtgcttctcacaaaagagcccaattcagctattctcgacaagatttgggacgctagcacgaacgtcaaagatctgaaggagtacgtgaagtcattgagtcgcgatagcgacctgaacacaaatctattcctgatgacaaacggcttggacacaatcaatgatgagttcaagttgatggcaaatgtatacgaattctttaagtacaatcaggaacacaacacggtgatcattactgccaggcagtttggtacggaaaagtttaaattggaaaaggctatctaccgtctttctcaattaggtattgtctctgactgggtaatcgaagacttttttaatggaacgctctatgtcgagttccagtgcctatcggaagaaggcctggaaaagaaaattgagcataccgtcagaaagtatgatcctgagtttaagctcgctgatgtgttcagtagtgataaccagtactacaaaattctctgcgacaagctgagaaaagggtctatcgataaatcgcaatttatctttcttgttcttttactttggtcctatgaccattttgtctacaaccgccgccagtcacagaagaacgtttatgaacactgttgtttatttgctgaaggcaggatggatggcaaagaatttaaggagaagttggagggttatttcagacacgacaagtcgagccaacttttgctctatatggctgagaattctgcatcggcgaagttatggccatcagttttttttgaaactgatgaagaagagggcacggaacatctagtaggcagcgagaagatgacgatcctacgaggtcagatttctcgattcctagagtcatacaaagataatgcattcttgaactacttgagtggtgtgctacgactagcttccgatgagtttgatgatgcagatggagagcgaagaatggcatcgtcatttgatcggttgatcagtgataatagggatgaagcactagagctggtccgaaaaactatgcagctaaagccaatgttctctgaaaatgcgcgaagccgctttgctcgtttggtccatgagaaatttgaagatttggattttcttgaggaggtaaatgaagagctaggagatccgttctcctatcacactttgttagctccactagcaattagacttgaaaaacttaccagcctatacaaggggattaattggtga

SEQ ID NO: 247695 - DNA, 966 bp, Klebsiella pneumoniae; identical to SEQ ID NO: 129586

SEQ ID NO: 247696 - DNA, 468 bp, Klebsiella pneumoniae; identical to SEQ ID NO: 185229

SEQ ID NO: 247697 - DNA, 342 bp, Klebsiella pneumoniae; identical to SEQ ID NO: 129642

SEQ ID NO: 247698 - DNA, 411 bp, Klebsiella pneumoniae
atgaatgtcgatgtgggttccatccggcgcaccgacctgaaaggggtcggcaccaccgccggcgggaaggattttaatatcgacctgcagtgcagcggcggcctgagtgaaacgggatatgccaacatcagcacctcgttctccggtaccctggccaccagcactaccgctaccatgggcgccttgctgaatgaaaaagccggcagcgggatggcgaaaggcattggcatccaggtgctgaaggatggctccccgctgcagtttaataagaaatacaccgtcggccgcttgaatgatcaggagacccgctacatcaccataccgctgcaagcgcgtttttatcagtatggcccgacgaccagcaccggcgaggtggagtcgcatatgatctttaacctgacgtacgattaa

SEQ ID NO: 247699 - DNA, 546 bp, Klebsiella pneumoniae
atgatcaaatcgttaaaaaaaattaaaagcaagatatccagagactattcattatacaaatgtaaaaaaaatcaagatggcaaaaccatatggttgtcattaggtgaaaattgtctacccgatgatgttttaagaagattttacctgaaaagctatagctcactatttgcatctggcaggtcaaatattgattacattcttaacatgcatgaaaatgattataatggcttactagatagaaagcatgttgtttacggaaaaataggtgatgaaaatgtactcaggagttcaatttataatacttgtgagcgattttaccatgaaatgcatttaaatggttttgagttcactcatcatgactggctgaaaaaaccagagttgaaacacaccctagaaagaagaataatgaggatgaaatctgaaattggcaagtttgacatttcatttctttatcttcatcgaatctctgaaaactccaacatagaagaaatcaaatcacgtttattaaagttatctaaggaaggtgcgaacaagttcctgatatga

SEQ ID NO: 247700 - DNA, 846 bp, Klebsiella pneumoniae
atgaatattatagcttgtatggtagttaagaacgaagaagatattgttgagaagaccatattaagtgcattacattgggcgacaaagataatcataatggataatgggagcactgatagtacgcttgctattattaaggagttaactaataaatatgataaagtaactctttggggcgtatatagcggtggttttagagactcaatccgtgccatagtatttaatgattattcatatttgtgcaataatgaagcatggtggtgtcgacttgattctgatgaaatatatatcgatgatccacgcgactttttgtctgaatgtccacggaaagttgatcatgtctattcagcaagcttccagtattactatacgaagaagatgattgacatggaagaaaaggacgaatcgtatatctccttgccaattgaagaacgactgaaatattacttatgtgattggtcagaaataaggtttgtaagaataacccctcaaacactttggccgctaaactttgctaatcctttgtttttgaatgaaccctatcaaaagcgtataagactaaaacattatcaatatcgtagcgcaaggcagatgaggtctcgacttttattaagaaagccagaagaaaacaagaaacttttttcacacgaactacggaaaaataaaatttgggatgaatcagaattgaattatgatactggacagtatatatatgatgatgcaaaacttcctgaaatgaaaaggcgaaataaaatattaaaagttgttttttcattgataatacacatttgtaaagtaaaaaaaattagacgctttctgacaccgtcaactgaattaattcgctaa

SEQ ID NO: 247701 - DNA, 129 bp, Klebsiella pneumoniae
atgctggcaaacgtcctgctcgccggtgaggtctgtcagacgttatctggaccagctgacgggaatatctgctctgtattcctcatactgctcatagatcgcatgctgaagcatcgtaatacgttctga

SEQ ID NO: 247702 - DNA, 312 bp, Klebsiella pneumoniae
gtgccaccccttaaaccgctgccggatgtgctgcccttcccgtataccggtaatgccctgcatccgacgcagaagccggtggaggcgctacagccgctgattgagtcattcagcgccccgggcgcgattgttctcgacccgtttgccggaagcggttcgacctgcgtcgctgcataccgcgccggacgccgctatatcggcatcgaaatgctggcgcagtaccaccgggccggaaccgaacggctggccgccatgcaccgggccgtcaacaccccggcggcgaacgatgaatggctcccggaggctgcgtaa

SEQ ID NO: 247703 - DNA, 312 bp, Klebsiella pneumoniae
gtgccgccccttaaaccgctgccggatgtgctgcccttcccgtataccggtaataccctgcatccgacgcagaaaccggtggaggcgctacagccgctgattgagtcattcagcacccctggcgcgattgttctcgacccgtttgcggggagtgcctcgacctgcgtcgccgcataccgcgccggacgccgctatatcggcattgaaatgctggcgcagtaccaccgggccggagccgaacgactggccgccatgcgccgggccgtaaataccccggcggcgaacgatgaatggctcccggaggccgcgtaa

SEQ ID NO: 247704 - DNA, 135 bp, Klebsiella pneumoniae
atgcgtttcagccgcggcggcgcgacggtgaatatcgtctatcccgacgtctattcgtcccgggtatataacaccaccgactattccctcgaagggtcgcgctttacgctggagattatcggctttgttgaataa

SEQ ID NO: 247705 - DNA, 435 bp, Klebsiella pneumoniae
atgaacatcgaaacagtaaacgagctcattcggtcgctggagtcggcaggcgagctgtcaatcagagagcagaagttcatgaagctggcgaaagcttaccagcagctggttgcggagaatgtggcgctgaaggcgtttggcgacaagctgagtgaaatgcataacgcactgaatggagaagggacaggcattcaaggacgtgcagaagtggcttgccagcaggtcgcactggaagcggcaatggaagagttcgacgctatcgaaacccccgccaccgatcgcatcgtagccgggattaaggctgatggggtggaggagttcgtatccaacaccgtgcataagatttttgatgaaagcggagtagtgtcagctttggcttacctttcactggctaattcacacgttaagcagctgcgcgagtgggccgacaaatga

SEQ ID NO: 247706 - DNA, 255 bp, Klebsiella pneumoniae
atgccaccagcgatgttacatgatcggaatatcatcatcactcacccacccggcccggtttatcaggtaggtaacgacaccccgcacttcaacatcgtccagggcttccccttccagcgcctcaccatcatcagtgatcagcgcctgcccacggacgacagcgaattcagttttcccggcatatgcgataaggacatgatcaccctgctttggcctgcggcagtctccagggcgcgacagttggcgtcatactga

SEQ ID NO: 247707 - DNA, 1197 bp, Klebsiella pneumoniae
atgacctcaagcgccaattccgagtccgtaacctacgccaaagctttcggcgtcaaaaccgccgcagaaaccggtgaccgcattgaacacgtcaagctgtcgctggcttttctgccgttggccactcccgtcagcgatgccaaagtgctgactggtcgccaaaaaccgctgaccgaagtggcgattatcatcgcggaaattcactcccgggatggattcaccggcgtcggctttagctactcgaaacgtgcgggcggccagggcatttacgctcacgccaaagagatagctgataatctgcttggcgaagatccaaacgacatcgacaagatctacaccaaactgttgtgggccggagcttccgtcggccgtagcggaatggcggtacaagctatctcccctatcgatattgccctgtgggatatgaaagccaaacgcgccggtctaccgctggccaaactgctgggttcacatcgtgattctgtgcagtgctacaacacttccggcggcttcctgcataccccactggatcaggtgttgaaaaacgtggctatctcccgtgaaaacggcatcggcgggattaaactgaaagtcggtcagcctaatactgccgaggatatccgtcgtctgacggcagtgcgcgaagtgctgggcgatgacttcccgctgatggtcgatgccaaccagcagtgggatcgcgaaaccgccatccgcatgggacgcaaaatggagccgttcaatctgatctggattgaggagccgctggatgcctatgacgttgaaggacacgcgcagctggccgccgcgctggatacgccgattgccaccggcgagatgctgaccagcttccgcgaacatgagcaattgatcctcggcaacgccagcgacttcgtgcaaccggacgccccgcgcgtcggcgggatctccccgttcctgaaaataatggatctggccgcgaagcacggccgcaaactggccccgcactttgccatggaagtgcacctgcatctcgccgccgcctacccgctggaaccgtggctggagcacttcgagtggctgaacccgctgtttaacgagcagttagaactgcgcgatggccggatgtgggtttccgaacgccatggtctgggcttcaccctcagcgagcaggcccgccgctggacccagcaaagctgcgagtttggaacacgcccgtaa

SEQ ID NO: 247708 - DNA, 414 bp, Klebsiella pneumoniae
gtgcttaaccgcgataaagcctcagcgcgcaagaaaggcctcaagttgctggagcgcgttggcctggcggcgcatgcggaaaaatacccggcgcagctctccggcggccagcagcagcgcgtggccattgcccgagccctgtgtatggacccgatcgccatgctgtttgatgagcccacctcagcgcttgacccggagatgattaacgaggtgctggacgttatggtcgaactggccaacgaggggatgaccatgatggtcgtgacccatgagatgggctttgcccgcaaggtggcgaaccgggtgatctttatggatgaagggaagattgtcgaggatgccgataaagaggccttctttgccaatccgcaatccgagcgtgccaaagatttcctcgccaaaatacttcattaa

SEQ ID NO: 247709 - DNA, 528 bp, Klebsiella pneumoniae
atgacgagcggccgtttatcagccggcgcgcggcgggaggcccacgatgagctggctgctggagccgtttggctatcactatatgctcaatgcgatgtgggtgtcggcgctggtgggcggcgtctgtgcgtttctctcctgctacctgatgctcaaaggctggtcgctgattggcgacgccctctcccactcgattgtacccggcgtcgccggggcctatatgctcggcctgcctttcgcgctcggcgcatttctctccggcggcctggcggcgggcagcatgctgtttttgcagcagcgctcgcggctaaaagaggatgctattatcgggctgatcttctcctccttcttcgggatcgggctgtttatggtgtcgctgaatccgacgtcggtgaatattcagaccatcatcctcggcaatattctggccatcgccccggaggatattatccagctggcggcgatcggctttatctcaatggcgattctgctgctgaaatggaaagacctgatggtgaccttctttga

SEQ ID NO: 247710 - DNA, 318 bp, Klebsiella pneumoniae
atgattaccctgaaaaacgtttcaaaatggtatggtcactttcaggtgctgaccgattgctccacggaagtgaaaaaaggcgaagtcgtggtggtctgcgggccgtcaggctccggtaaatccacgctgattaagactgtgaacggccttgagccggtacagcaggggcagattattgtcgatggcaccgtggttaacgataaaaagaccaacctggctaaactgcgctcgcacgtcggcatggtgtttcagcattttgaactgttcccgcatctgtcgattatcgacaacctgacgctggcgcaggggctttgttga

SEQ ID NO: 247711 - DNA, 534 bp, Klebsiella pneumoniae
atgacgcatgtcgttaatcttcttccctggcgcgacctgcgtcgccgccagcgcctgcgctacgtcctgttgttaaccatcggcattgtgctgctgggcgggatgggcctgctggtgagccgaacggcgcgtctgcagcgcgacttcctggcgacgcttcacacgacggccgacgcgcagctgctcgcttcgcttaagcagcgcgagcaggcgatgcgtgaggcgtggcagcagcatcaacggcagcgccagcagtaccagcgcagatcggcgatcgccgcctggcaacccaggctgcaggcgctggcggcagatctgcccgcgcaggcgtggctgacgcggctggagtaccagggcgtactcctcacgctggacggcctggcccttaacctgcaggcgttaaccagcgtggaggctgcgctgactcgcgtcgcgggattcgcgccggcaaaagccggcgggacccagcgcgacgccgaggggcgttggcagttcagttttaccctgacgggagcgcgcgctgatgcggattaa

SEQ ID NO: 247712 - DNA, 834 bp, Klebsiella pneumoniae
atgcgtaacgatcgcagctttatcgaactgcgcgctcgcgaacgcgcccacgccctgctggacgacggcagctaccgcgaactgctggatccgtttgacggtattatgtcgccgtggctcggcgcccagggcatcgtcccgcaatccgatgacggtatggtggtcgccaaaggcacgatcaacggccagcctgcggtggtgattgccatcgagggcaccttccagggcggcagtatgggcgaagtgtccggcgccaaaatggccgccgcgctggagctggcggcggaagataaccgcaacggtatcccgacgcaggcggtgctgtgcctcgaaaccggcggcgtacgtctgcaggaggccaacctcggtctggccgccatcgccgatattcacgccgcgattgtcgacctgcgccgctacaccccagtggtcggcatcatcgccggcaccgtcggctgctttggcggtatgtctatcgccgccgcgctgtgcagttaccttatcgtcactcgtgaagcccgtctcggcctcaacggcccgcaggttatcgagcaggaagccggcattgaagagtacgactcccgcaaccggccgtttatctggagcatggccggcggcgaaattcgcgccgccagcggactggtcgacgcgctggttagcgatggcgttaacgccgttaaaaccgcaatgaatgaggcgatcgccaaaggcgtaccggtacagcaccgcagcgacaactatgacgattatctgcggcgcttgagccagttcgacacccgccagcaggcggataccgcgcagattaaacagctttttgcccgggaggataaataa

SEQ ID NO: 247713 - DNA, 381 bp, Klebsiella pneumoniae
atgattattaccaccgctgacgcgcctgccgctatcggcccgtacgtgcagggcgtcaatctcggcgcaatgaccatcacctccggtcagctgccgattaatccgctggacggcaccatgccaggcgatatcgccgaacaggcgcggcaatcactggagaacgtgaaagccatcgtcgaagccgccggactcacggtcgggcagatcgttaaaactacggtgtttgtcaaagacctggcggattttgccgccatcaatgccgcctacgaggccttctttatcgaacaccaggcggcctttccggcgcgctcctgtgtggaggtagcaaggttaccgaaagatgccggcgtcgaaatcgaagcgatcgctttcgcccgctaa

SEQ ID NO: 247714 - DNA, 1152 bp, Klebsiella pneumoniae
atgaacgcctactcgctatcacgtctgtttatcgcctggctcacctgcctcgcgacactgttattcgctcctctgctgccggcagtagaggcggaaaaagcgccgccggcagcagccgaagacaacacgctatcgattcatatcgacgatatgctacggccatggagaggcgatttgcctggcatgatcgaccgtcgtaccattcgggtattaaccacctacagcaagaccttcttttttattgataaaggcacccagcgcggggcgacgcacgacatttttatcgcgctggaaaacgagctgaataaacagctagcgaaggataaaaagctcaaacagcgccacctgaagctgcatatcgtttttgtgccggtcagtcgggacaatctctttatcgcgcttaatgaaggtaaaggcgatattgcggctgccaatctgactatcacgccctcgcgggaagcacaggtcgatttcgcccagccgctctacagcaacgtgaaagaattactgatctccggcccggcttcaccgaaggtcgacagcctggagcaactctctggtcaaaccgtctttgttcgccgctcctccagctattacgacagcctgcaagcgctgaacgcccgatttgccggtgagtcgcgcccaccggtgatactggaggcggcgccggaagcgctggaggatgaagatctgctggaaatgctcaacgccgggctgattccgctgatcgtcgtcgatcagcataaagcgttgttctggaaacaggtgtttccaaaaattcaggtccatgacaatgtggtgctgcgcgacggcggcgacattgcctgggcggtacgcaaagacagcccgcagctgctgacggtactgaacaacttcgtcaaaaagaatcgtcagggcaccacgctgggcaatactctcctgctgcgttacctgaaaaatgctaaatatgtcaaaaatgccgcggcgagtaaggaacgacgcaaattcctcgcgatggtagatgtcttccgcaagtacggcgatcgttacgacgtcgactggctgctgatggcggcccagggataccaggagtcgcggctgaatcagtcggtacggagccacgtcggcgccatcggcgttatgcaggtgatgcccagcactggaaagagctga

SEQ ID NO: 247715 - DNA, 1305 bp, Klebsiella pneumoniae
atgagcttcaacacaatcatcgactggaacggctgtagcgcagaccaacaacagcaactcttaacgcgcccggcaatttccgcctccgacagcatcagtaaaacggtgacggagatcctcgataacgtcaaagccaacggcgacgcggcgctgcgcgaatacagcgcgaagtttgataaaaccaccgtcgccgcgctgcaggtgagcgaggcggagatcgccgccgccggtgaacgcctcagcgacgagctgaagcaggcgatggcggtggcggtgaaaaacatcgagaccttccacaacgcgcagcagctgcaggcggtggatgtcgaaacgctgccgggggtgcgctgccagcaggtcacccgccctatcgcctccgtcgggctgtacatcccgggtggctcggcgccgctgttctccacggtgctgatgctggcgacgccggcgcgcatcgccggctgtcagcaggtggtgctctgctcgccgccgccgattgccgatgagatcctctatgccgcacagctgtgcggcgtaaaaaccatctttaacgtcggcggcgcccaggccatcgctgccctcgccctcggtaccgagtcggtgccgaaggtggataaaatctttggcccgggcaacgcttacgtcacggaagccaaacgccaggtcagccagcgtctggacggcgcagccatcgacatgccggccggcccgtcggaagtgctggtcatcgccgacagcggcgccaacccggactttgtcgcctctgacctgctgtcgcaggcggaacacggcccggactcgcaggtgatcctcctgaccccggacgccgacatgggcagccgcgtcgccgaagccgtggagcgccagctggccgccctgccgcgcgccgaaactgcccgcgtggcgctctccgccagccggatcatcgtggcccgcgatctggcgcagtgcgtggctatttccaacctgtacggcccggagcacctgatcattcagacccgtcaggcccgcgagctggtggacagcatcaccagcgccggttccgttttccttggcgactggtcaccggaatccgcgggcgactacgcctcgggcaccaaccacgtcctgccgacctatgggtataccgccacctgctcaagcctcggcctggccgacttccagaagcggatgaccgtgcaggagctgtcgcgcgacggctttgccgccctcgcctcaacgattgagatcctggccgccgccgagcgccttgacgcccacaaaaacgccgtaacgctgcgcgttgccgccctgaaggagcaagcatga

SEQ ID NO: 247716 - DNA, 900 bp, Klebsiella pneumoniae
atgttagacaacacccgtttacgcatagctattcagaaatcaggccgtttaagcgaagattcacgcgaattactcagccgctgcggcattaaagtcaatttgcacacccagcgtctgattgcgctggcggaaaatatgccaatcgatattctgcgcgtgcgtgatgacgatatcccgggcctggtgatggacggtgttgtcgacctcggcattatcggcgaaaacgtgctggaagaagagctgctcagccgccgcgcccagggcgaagacccgcgctacttcaccctgcgccgtctcgacttcggcggctgccgcctgtcgctggcgactccggtggatgaagcctggaacggcccggcggcgctggacggcaaacgtatcgccacctcttacccgcacctgctgaagcgctacctcgatcaaaaaggtatctcctttaaatcctgtctgctgaacggctccgtggaagtggcgccgcgcgccggcctcgccgacgctatctgcgacctcgtctccaccggcgccaccctggaagccaacggcctgcgcgaagtggaagtgatctaccgctccaaagcctgtctgatccagcgcgacggcgaaatggccgacgccaaacagcagttgattgaccgcctgctgacccgtattcagggcgtgattcaggcccgcgagtcgaaatacatcatgatgcacgccccgaccgaacgcctggaagaagtggttgccctgctgccgggcgccgagcggccgactattctgccgctggcaggcgacaagcagcgcgtggctatgcacatggtcagcagcgaaaccctgttctgggagaccatggaaaaactgaaggcgctgggcgccagctccattctggtgctgccgattgagaaaatgatggagtaa

SEQ ID NO: 247717 - DNA, 1164 bp, Klebsiella pneumoniae
atgttaaatattactgacaggcggataatatattgccttccctctattttttgtcaggaaacaataaagcttggaaacttattgatcaggcctttaagtgaggctgtaaaagataatgataattgcgccaagcttctaatggattttccgtttaacagagaaagctccgttattgaaactctaactttcaaatcaggagattttttcacacaattgaatgatattgaaattagggattctttagaaatattaaaattttcctatttttttgaatttccttcatctttattggatatcaatgggtttgttggcaatgaaacattcgagtgctatcctgtaatagaactcaactctgaactaacctgctttggtgttgaacataaaatgccctttacaaatggtatgtcaaactatttgttgagtttgaaaagttattttcaatatcgcacgatatttttagaaaatttttctttaagacttaagcaaaaagatttttcttattactctgttttctatgggctcaataaaaaaactgatacactagatttgtttaaaatgtataataaatgctggggggtatattcggcttatgatttctcagataaggccctatattctaaaataacattggaacttttatcaagcagacatgtggcaaacggtaacaaggtgggcaaaacattcactttgttttttgagaagttaagaatgattataggtagtattgctgatgacgaactttttcatgtctacaaagaaaaaattgactctaaaattgatattgtaacaaaacgtatcgaagattattttttgagcttgaatatagaaaggaaaaatattgctcacgagggtaaaagttcccaccaatttatcaatgttgcaccgtatcttgttttttttcctgtgtttttgatggtcttagaatgcagtgatgatatacagcgtaaagatatatatagattcatttttttactttccctttttatgtatgaagttgatacgtggcagatgattgattttgaaacttttccgagtaaaagaactcatctccagtcctacattaatttctcccgctgttatcataagtatgtaaaggataataaagagtcagcaaaatatatgttgattggctttgaaaattggttgaaagaaattgatggttaa

SEQ ID NO: 247718 - DNA, 930 bp, Klebsiella pneumoniae
atgctcgcaactctgacgcggctgttcccgttatgggcactgctgctctccgttctggcctattacactcccaccaccttcaccccaattggcccatgggtcaccaccctgctgatgctgatcatgttcggtatgggcgtgcatctgaagctggaggatttcaaacgcgtcctgtcgcgtccggcgccggtcgctgcggggatatttctgcactatctggtgatgccgctcgccgcctggctgctggcgctgctgtttcatatgccgccggagctttccgccgggatggtgctggtcggcagcgtcgccagcgggaccgcctccaacgtgatgatctttcttgccaaaggggatgtggcgctgtcggtgaccatctcctcggtctccaccctcgtcggcgtcgtggcgacaccgctgctcacccgtctgtacgtcgacgcgcatattcaggtcgacgtcatgggcatgttgctcagcattctacagattgtggtcattcctatcgcgctgggactgattgtccatcatctgttgccgaaggtggtgaaagcggtagagccgttcctgcccgccttctcgatggtgtgcattctggcgatcatcagcgcggtggtggcgggttccgccgcccatatcgcctccgtcggcctggtggtgattatcgcggtgatcctgcataacactattggtctgcttggcgggtactggggcggacgtctgtttggttttgatgaatccacctgccgtacgctggcgatcgaggtggggatgcagaactccggcctggcggccgcgctgggtaaaatttacttcggcccgctggcggcgctgccgggcgcgctgttctccgtctggcataacctgtccggttcgctgctggccgggtactggtcaggaaagcccatcgccaaaaaagccgacaagcgctga

SEQ ID NO: 247719 - DNA, 600 bp, Klebsiella pneumoniae
atgttgaacgcccggcggcgctgcgcttgccggccctacgggttctgcggtcaccggctggaccgtaggccggataaggcgaagccgccatccggcataaagacaggacccgctctaatgttgaacgcccggcggcgctgcgcttgccggccctacgggttctgcggtcaccggctggaccgtaggccggataaggcgaagccgccatccggcataaagacaggacccgctctaatgttgaacgcccggcggcgctgcgcttgccggccctacgggttctgcggtcaccggctggaccgtaggccggataaggcgaagccgccatccggcataaagacaggacccgctctaatgttgaacgcccggcggcgctgcgcttgccggccctacgggttctgcggtcaccggctggaccgtaggccggataaggcgaagccgccatccggcataaagacaggacccgctctaatgttgaacgcccggcggcgctgcgcttgccgggcctacgggttccgcggtcaccggctgaaccgtaggccggataaggcgaagccgccatccggcatcttgtccgacacgcggccttaccgggccgcctga

SEQ ID NO: 247720 - DNA, 540 bp, Klebsiella pneumoniae
atgctgcaatatcctgatattaacatcgaaatcactgttgataatgggctcacggatatcgtgggtgaccgcttcgacgccggggtgcgtctcggcgaacaggtggcaaaagacatgattgccgtgcgcatcgccccggatatgcggatggcggtggtgggttcgccggcctatctgcagcgggccggtacgccgcaaacgccctgggatcttgcccaacatcgctgcatcaatctgcgcctgccgacacgagggggactttacgcctgggaatttgcccgcgatggccgggagattcaggtgcgggtggagggacagctgatcctcaacagcctgccgcagcgcatcgacgcggcggaggcgggcctcgggctgacctacgttccggatgactgcgtggcggcggccttagccagcggccggctggtgcgggtgctggcagagtggacccccgccttccccggctaccatctctattaccccagccggcgccagcataccagcgctttcacgctgttactggaaactctgcgacgctga

SEQ ID NO: 247721 - DNA, 558 bp, Klebsiella pneumoniae
gtgctcgccgggctcatcggcgaaatcggtatctccagccgctttacgccggatgaggagaaatccctgcgcgctgcgggtcgggccagcgccgcgaccggcgtgccgatcgaggtccatctgcccggctgggagcggctgggccatcgggtgctggatattctcgagcaggaaggcgccgatttacgccataccgtgctgtgccatatgaatcccagctttgccgataagcgctaccagcgcgaactggcgcagcgcggggcgtttctcgaatacgacatgattggcatgagctattactacgccgacgagtcggcgcagtcgccctccgacgaggagaacgcccgcgcgatccgcgagctgattgacgacggctacatccagcaaattctgctgtcgcaggacgtcttcctgaaaaccatgctcacccgctacggcggccacggttatggctacatactcaagcattttgttccccgtctgcggcgccacggcgtcagcggcgaacaacttgaaaccttaatgattggaaacccccagcgggtctttggcggataa

SEQ ID NO: 247722 - DNA, 495 bp, Klebsiella pneumoniae
ttggcgacctttattcgccgtattccggtgattgtaaaaattctgccgatcgctgaacgcggccaattcgagcggctggcgtttatccaccactttttccgccgtgaagcccagcgtttgaaccacgatctggagctggatggcgaaatcgtcagccagctaatgcgtgaaacgcttgaaggaaatgtcggtgggctggaaaatttgattcgcaatatttgcgccagcgcctggacatttggcgaacgtgatagcggtcttttacatataaaagcgggtttgctgcccgaccgattactggcggatgcgccttttacccttcagcaaaatagcgagcgggttatgatttaccgcgatggcgacgcgcagcctcttttttctggtcgtcaccatgaataccaacggctaacggaaaatattgtagcctgtgcgaggagttggctcaggataatattagcgtgcggacctttgaaaagcttatttatcagaacgtga

SEQ ID NO: 247723 - DNA, 246 bp, Klebsiella pneumoniae
atgaatccttcgttaaccgattcccgccgtcaggcgctgcgttcagcttcccactggtatgccgtgctaagcggcgagcgcgtcagcccacaacaggaagcgcgctggcaacagtggtatgaacaggatcaggataaccagtgggcctggcagcaggttgaaaacctgcgcaaccagcttggcggtgtgcctggcgacgttgccagccgggcgctgcacgatacccgcctcacccccgccacgtga

SEQ ID NO: 247724 - DNA, 621 bp, Klebsiella pneumoniae
atggacgctatctttgacagagtcgtaagggaattttttccaaatacaaccatacctttttggaaaaaatggctgttcaggacggcatttggcaataaggtattttctcgcttaatatataacgagcgactcgttaataaaaatggggtcgagtgggttaatgcagttgttgaactccttgagttgaaatgtgaaagcgaacaccaccaatttaacaacatacctgagcatggggctacggttgttatttcaaatcatccgacggttatcgatggacttagcttaatacatacggtctcccgagtcaggagtgatataaaaataatagccaatcacgttttgccaattatattcccccaggtatcggaacttaccattggaattgagaatatggccggtaagatgagccataaaaaattccgcgagatgaacgatcacctgcgaaaaggaggcgtattgattatatgtcctgcgggtaagctggctaactggtctctttccgggttacaggagcataagtggaaccccggttttttacagcttgctatgagaaataatgcagcattggtaccaattcatattacgggagcggctttgttgaataaatcgaacttttgctga

SEQ ID NO: 247725 - DNA, 759 bp, Klebsiella pneumoniae
atgaataatgaaatgacagtggcggttatagtacccgtttacaatggtatgtatacaatagagcgagctatagcctctgtacaaaaacaaacttatacaaagtggcatttatatgtaataaatgatgcatcaactgataatactttaaatatattaaagaaatatgataaagaaccaaaagtaacaataattaacctaaaacgaaatgccggagcagcaaatgcaagaaatgaagcaataaaattgagcaaggagaaatatattgcttttttagatgcagatgatgagtggcatgacaataaattaagcatgcaaatggatagcattgtaaatgataatgttaatctggcctgttcgttttataattatataaagggcgaatcttgcgtaacaatctcaacaaaattaagatatttgagcatggatgattttttgaagaaaaagtttagagtttgcttttcttccttaatttataaacgccccaaaggaaatatattatttaataacatggggcatgaggatttctattttatttatttattgcttaaagaatacaacctgctatcagtaacaaggcaacctgttgttaattactatgaagtttctggctcgctttcaagaaataagcagaaagcagcgggatggcattataagatattaactaaaattttcaatggggaaaaattgaaagtatatatttattatatatattacgtgttaaatggcattagatttactctacaggtgaaaagaaaatga

SEQ ID NO: 247726 - DNA, 1032 bp, Klebsiella pneumoniae
atgaaaaagatcgcatttgttatcgagaatgcctattcatacgcaggtactgaaaatgtatgtaattttatgagtgagtgccttggggatcatgctgacataaccatttattcattatcgggacaaggcgagactttttatccttataataagatagtaaatcttaaaagttattcagggcgtaataacaaaatttttaatattattaaagatattaatgagcaaaagcctgatagtgtctttgttattagcatggggaaattgagcatattttttattgttttagcgacattttttttgaataaaaataaaatgaaattgattgcatgtgaacatgtttcgcttgattcgttttcttttatggtaaaattcttaaagtatacattacttcgcctctataataatgttgttgttcttacagagcgtgattcgaaaaagttgagtaaatatcatattaagaatataaaaatatcaaatccacttaaatacagatattatgttcgaaaggttcgtacaaaaatcgcattagctgtcggtcgcctagaagaacaaaaagggttcgataggctattacctatatggcatgatttcctacaactaaatgatactgatggttggttattatacattgctggagatggttctaaacgtgctcaactcgagtctcaggtaaagtcactaaatctcgaatcaaaggtcaagtttcttggtaaggtgtcagacatgccttcactttataaagagtgcgatatattattaatgacgtcacgttatgaaggtttgcctatggtattgttggaagcgaaatcatggtcaatgcctgtgatagcttttgattgtccaactggccctcgcgaaattatttctaatgatgtcgatggctttctggcatgtgattcagctacatttttaaatgcgctgagaaactatacaaatgatgagatttatttcagaatgagtagaaatactgagcaaacagctattgctttttctgtagaaaaaattgctaagctttggctttctctcatttaa

SEQ ID NO: 247727 - DNA, 927 bp, Klebsiella pneumoniae
atgagtttaaatgctatcaatggtttttcatataacgcagagtcattaaaaaataactcaggcgttactcttgctggtcgatccaataatggaagcactattaccgggaagagaatacaaggtgaactaaaaaaaaccaatagcattctttccatttacagggcattgttaaacaatgaaaaaaagatatcacatcaacttagtgatttagataactatgctatttactccccctcaacaccaatactacgtggagtaacaaccgacaacagcaataaatcgccattggggttgtatggtggaagattagctgatgccttaaatgaagtattagagtatacagaaagagataaaccaaacgagattattaacttctttgaacttctggattggttttccagtttaggtgttaccagtagcattgacagttctttggtttctgagcatgtcagcttagggagaaaagtagttaagtacaaagacatgtacatgaaatctaattttaatgatctctatgcatatgatgtaagtgaaggggcattattcatattatttgttttaattctaattgcacataaaaactctccaaacatttttgcgcttgataatgtggacagtgctttaaaccctggactagtgcgtaaattgatggagaaaatagtgttgtttttaagtagtgaaaagcattgccaaaagcagatatttttaacaactcataacccatgtacattagatgcgcttgacctctttaacgaagaacataggttgattgtcgcttctcgttctgctgatggacaaagcatctttactcgcatcgcccctcccaaagatatgactagggagatgtgggaagaacaatattttggaatgaaattatcagaaatttggctttcgggagcctttggtggcatgccgacggagttctaa

SEQ ID NO: 247728 - DNA, 738 bp, Klebsiella pneumoniae
atggaaaaacctcttctttttttactggtatgtgaaggtccatcggatattcctgtcatacgtagggttgctgaggaaatttgccgtaatgaaggtaaagatattgaaataagacatattgcgccccaacaagattctacgggagcatgggaaagacatggttacgttggcgtagctaagtggtgtgccttatatggtaaaaaaagtgagcaagctcttcaaaaactacctgaaaacatcaggaaagctgttattagaaaaaattgggaagcgcttgttaaagcagcatctgctgatggtttgatcatccaaatggatactgatatagttgatcagcttaattttttaccaaatcgctttgatgaaactaaagataacagaagagaatattgcaaatcatcactactgatgaaacttgggttacagagtactcctgagaatctagtattgttactcccatcatattcaactgagacatggattattgccagctttaatgaggaccatgttatttttaaagatttagcaaaaccaatctctttcgaagagttagataattgcgaggatcttcttattaacgctggcttcaaaaaagaaagaaaacatggaaaaacacgactaaagaaatctcatgacatatatttacagtatgctgaaatcgtggcaaataatatcacaaaagtagtggaaagatgccaagaggtaaattcattcaaacaaaacatattacaaaaataa

SEQ ID NO: 247729 - DNA, 897 bp, Klebsiella pneumoniae
atgaatatggcgaatttgaaagcggttattccggtcgcaggactaggcatgcatatgctgccggccacaaaggcaattccaaaggagatgctgccgatcgttgataagccaatgattcagtacatcgttgatgaaatcgtcgccgccgggatcaaagagattgttctggtgacgcactcctcgaagaacgcggtggaaaaccacttcgacacctcctacgagctggaagccctgctggaacagcgcgtgaagcgccagttgctggcggaagtgcaggccatttgcccgccgggcgtgaccatcatgaacgtgcgtcaggcgcagccgctgggcctgggccactccatcctctgcgcccgcccggtagtcggcgacaacccgtttgtggtggtcctgccggatatcatccttgacggcggcaccgctgacccgctgcgctataacctcgccgctatgatcgcccgctttaacgagaccggccgcagccaggtgctggcgaaacgcatgccgggcgatctctccgaatactccgtcatccagaccaaagagccgatggtggctgaaggccaggtggcgcgtatcgtcgagtttattgaaaaaccggacgaaccgcagaccctggactccgatctgatggcggtggggcgctacgtgctgtcggcggatatctgggccgaactggaacgtaccgagccgggcgcatggggccgtatccaactgaccgacgccattgccgaactggcgaagaagcagtccgtcgacgcgatgctgatgaccggcgaaagctacgactgcgggaagaaaatgggctacatgcaggccttcgtcacctacgggatgcgtaacctgaaagaaggcgccaaattccgcgaaagcattaaaaaactactggcctga

SEQ ID NO: 247730 - DNA, 1335 bp, Klebsiella pneumoniae
atgtcacgtatagatacgctggtctgtactgacgccaggaaaacgaaatatcgtttcgtggttttgacgatgatttttctggtgtatgccatcaattacgccgaccgaacgaatattggcgcggtactgcctttcatcattgatgagtttcatatcaataattttgaagccggggccatcgccagtatgtttttcctcggctatgcggtaagccagatcccggccggctttttcatcgccaaacgcggtacccgggggctggtatcgctctccattttcggcttctccgcctttacctggctgatgggcacggtgagctccgtgtttggcctgaagctggtgcggctgggactggggctgagcgaagggccttgcccggtggggctggcttccaccataaataactggtttccaccaaaggagaaagccacggcaaccggcgtttacatcgcggcgaccatgtttgcgccgattattgtgccgccgctggcggtgtggattgcggtgacctggggctggcggtgggtctttttctcttttgctatacccggaattgtggcggccatcgcgtggtatctgctggtcaaatccaagcctgctgagagcggatttgtttcccaaagcgaactggcagagattaatgccgggcgtgaaagtcataataatagcgtacgcgaaaatatcttaattgccgaaagattcacctggctggataaaatcattcgggtaaagaaaatggcgccaattgatacggcgaaaggcttattcacctcaaaaaatattctcggtgactgcctggcgtattttatgatggttagcgtgctgtacggattattaacctggatccccctgtatttagtcaaagagcgcggtttcgatgtaatgagtatgggcttcgtggccagtatgccgtgcatcggcggctttattggcgcgatcggcggcggatggatttcggataagctattaggccgccggcgtaaacccaccatgatgttcactgccgtgtcaacggtggtcatgatgttaattatgctgaatatcccggcaagcaccctggcggtttgtattggattattctttgtcggcttttgtttaaatatcggctggccagcctttaccgcgtacggtatggccgtttcggatagcaaaacctatccaatcgcctcttccataattaatagcggcggcaacctcggtggatttgtcgcgccgatggcggctggtttcttgcttgataaaaccgggagttttaattctgtatttacctattttggtatctgcgccgccattggtttggtggtgattcttttcctcgatgaacggctttgttga

SEQ ID NO: 247731 - DNA, 1059 bp, Klebsiella pneumoniae
atggagtcattgtacggtatctcgaccatcaaggcattaaatttgaaagaacgtcggtcccagcattggcttaatataaatatcgaagcctgcaacgctgggatcaaacaaactcgtttcgatatgctatttagtgggatcaataccttcattactgctatcgatcaggtcgccgtgctctggcttggcgcgattatggttattgataataatatgacccttggtatgtttatggcgtttaacgcctatcgtggtcaattttcacaacgcgcttctagtttggtcgatctttgtatgcaactgcgaatgctctccctacataacgaacgtttgtcagagatcgttttcagcgaaccggaacaggagcttcccacaagagaggttttttctgcagactcgggtgccaaactggaagtcaaaaatttgtgctatcaatatgatccgttttctcagccgatcttttctaatttaaatataaccgtagaacccggtgagtccgtagcacttgtcggcccttcaggcgtcggtaaaactacgttattaaaagtgatgtgcggtctgctttcacccactagtggtgatgtactagctgataatctcgatatcaccaaaattggcctcaacaattatcgcctgggtaccgcctgtgtcctgcaggaggaccgcctattttccggctcgcttattgataatatcagcggattcgaagataacgccgatattgattttgtaatggaatgtgccaaacgctgcaatattcatgaagagattatgaagatgccgatgggttatgagaccattgttggtgaactgggtttgggcatttcaggtggccaaaagcagcgtattctaattgcccgcgcgctatatcgaaaaccaagtatcctttttatggatgaggccactagccatctcgatttaaagaatgaatcagttattaatcagtcaatctcagcgttaagcattacccgaattattgtcgctcatcggccctccacaattgcctcagccgatcgcgttatcgacctgtcgcagacaaagaccgtcgcgcaagcttaa

SEQ ID NO: 247732 - DNA, 393 bp, Klebsiella pneumoniae
atgcaaggaacgtttattggatttaataccgcagggattacctttgaagaccgctttctggcgctgcttttgaaaatcaagcagcaaaatggcccctgtcagcaatactatctgcaagcacctatacttctcgattttcttcttatcctacaaaatcgtttgcttatgacatataagcgattacaagaagaaggggaaacctataaagaagagcttatcgcttataatgaatcgctgatcgctaacatccctgccgtagagatggcggagatccagcagccgaatcctgagcggcgtattatgtcgattacgcttaaaccaggcgagactgaatcgactctcattctggttctgcagaatgagcaaatttgtacattatgcaggctttgttga

SEQ ID NO: 247733 - DNA, 648 bp, Klebsiella pneumoniae; identical to SEQ ID NO: 212897

SEQ ID NO: 247734 - DNA, 657 bp, Klebsiella pneumoniae
atgggggcttgctatagtcggaatattttgattcatcgagcaaaaggagaatttgttactggtttagatgatgacgattatttttttccggaaagacttgaactttttattacatttggtgagttaaataaatactcatttatttgtgctaatgtaaccatagcatctacggagcgaattaaaactcgagaaggcggaatggtaatatccttagatgagatgaaaaattataatgctgtgggtaatcaaatctttgttaaaaaacacatcattgagagtgttggttgttttgatactgatatgcctgcatggcaagattatgatacttggctaaggattattaataagcatggtgcagcatataaactaaatgcttgtacaatgtatttggataccgatacatctagaaatagaataagcacaacaagtaaggcttataacggatatgaaacattcataaggaaacacgcaggaattttgagtgaacataacttgttaagcttaaagtatatggatctgataaataggaaggtgggattttcaatattttgcaaggaacttatcggcgagtttagtctacaaaaaagactacttaaatataggatgccatactattacccaaggctttattatttttataataaatatattaaataa

SEQ ID NO: 247735 - DNA, 732 bp, Klebsiella pneumoniae
gtggataccagccaggtggttttctccgatgacatgatcaccccgctggcctcggtgctggtcaatcgcttaacgggttcgcggacaattattacccgcaagatgcaaacgccgccttccctgacctacgagcaaaagctcaaactggacgacctcgccgagcgactgattgccagcgaggagccggttaccattttaattgacggccatgaggcggaaatcagtgaatatttaattaagaaactgcccaacgccagggtcgtgatggacggcgggtcactgcgcgccagcaatattaaactggcggcctggactgactattttgtagtgagcgaacatttcgcccgcgattatatgagctatcgctcgctgagcaccgaagcagaaattaaagcggccctgattgagttgaataaaatttgccgcggtgaagcatttattacccttggcgaaaaaggctgcgcttttttaaaaagcggtatgctgcagatcgtcccgtcctggctgtgcaatgccgttgataccaccggcgccggggatgtatttcacggcgccttcacctatggcgtccattactcatggcatatcgataacattattttatttgccagcctgaccgccgccatttctattgagaaaaaaggggttcgggaatcgatgccggacctggcggtcgtccaccactcgttaaatagctacgagagaaacttaacgcaatattttgaagaataa

SEQ ID NO: 247736 - DNA, 651 bp, Klebsiella pneumoniae
atgaaccactatgtggtgctgactaaagttcgcaaatccagctttatcgtacacgatccagcgctgggtaagcgtattatcggcatccaggagatgtccaattattttactggcgttgccttagagctttggcccgatcagaacttccagcaggaaaaggctaagtcccgccttcgtctgctggatctaatgcgcaatatagtaggcttaaaatcagcgctgctgaaaatttttgccttctccgtggtcgtggaagccatcggcttactactcccgataggtactcaactggttaccgaccatgtgattatggcgcacgaccaaagcctgctatcagttatctgcattggcctggtcttttttacactatttcgcaccttcatcagtatgctccgcgcctggacgtccttaacgctgaataccctgacaagtatccagtggaaaaccacgcttttcgatcatctggccagtctgccactatccttttttgaaaagcgtcatttaggagatatccagtcgcgtttttcctctttggatactattcgctcgacgtttactaacagtatcgtcagcggcattattgactcaatcatgaccatcggtctgctgatcatgctaactttgtatggtggctggggctttgttgaataa

SEQ ID NO: 247737 - DNA, 258 bp, Klebsiella pneumoniae
atgtatatgccaacgctcaaaatcaatttacgcaaactggaagaaaatgcgcgaactgagaaagctttgttagccagtagcggtattgacgttatggcggttaataaagtctttgatggctgtgtggaaactgcacaggcagtttttgatggcggaattcatattattgccgaatcaagaacttataacttgaaaaaaatccgtgagatcggttgcacgacttgtttacttcgtagcccttgcggctttgttgaataa

SEQ ID NO: 247738 - DNA, 999 bp, Klebsiella pneumoniae; identical to SEQ ID NO: 169064

SEQ ID NO: 247739 - DNA, 2133 bp, Klebsiella pneumoniae; identical to SEQ ID NO: 169063

SEQ ID NO: 247740 - DNA, 1125 bp, Klebsiella pneumoniae
atgggtgtgccctggttccagattaaaaatcagagttacagggaaaaggtgcacgttttcagttcgaattatgcgctttatcatagccttagtcagagagtcatgagcgctcttgaggagattacaccgcgagttgaacagtacagcatcgatgaaatgtttctcgatttgacgggcattgatagttgcgaagattttgaacactttggccgacgtctcaaagcgcatgccctgaataccgttgggctgcctattggcgttggtattgggcagaccaaaaccctggccaaatcggcccaatgggccagcaaggagtggaaacagtttcgcggcgtcctggcgctcacaccggataattcgaaacgcaccatgacgctgctggaaaatcagcccgtagaagaggtttgggacgtgggcaggaaaataggcaaacgccttaatctgatgggtattaaaaatgctttacagcttgctcaatccagtccgagatttatccgggaaaatttttcagttgttctggagcgtaccgtacgggaactgaatggggagtcctgcattcctcttgaggagcttccgccatcaaaacagcagattatttgctcacgctccttcggtgagcgcatcacgtcaaaagcagccatgcagcaggctctgtgtttgtacgcgacacgtgcagccgaaaagctgagaggtgaacgccagttttgccgacacatcggcatatttataagaacctcaccccacgccattaacgaagtgtattacggcaatagcgctggagaaaagcttgccctgccgacccaggatacgcgagacattattgaagttgcactgcgttcactagatcgcatttggctggatggtcggcgctatatgaaagccggtatcgcgcttgatgattttacgccgaatggcatagctcagttcaacctttttaacgagaacaaacccagagagaaaagcgcccaactgatgaaggtactggacggcatcaatcagtccgggttgggcagtgtgtggtttgcgggtcaaggcgtagatacagcgtggaggatgaagcgggaaatgctcagcccggcgtggactacctgctggaatgatattccgatagcgcgaataaagtga

SEQ ID NO: 247741 - DNA, 159 bp, Klebsiella pneumoniae
gtgtgcagcgcggccagggggccgctggccgccacaatcgggccggtgaccacgaaagtgagcatagtgccgatggtgccgcaggtgaggataaagttcaccagcttcggcgaagcgacccgcgtctgctgcgaaccgagcgtaatgatcgaggtgtaa

SEQ ID NO: 247742 - DNA, 621 bp, Klebsiella pneumoniae
gtgcttacgcaaaaattagagttgatcaagacgcagcgagggagcacgggagaatcggcggccgccggagtggatggcatcaggtggatggactacgccggaaacatgaagaacaacataacagatctgcaccggaggctacatcagggcagctacagggcgcagcccggcaggcgtcactacatcccaaaagcggatggaaaacaacgcccgctcggcatcgcctcgctggaggacaagatcgtccagtatgcgctggtgaaaatcctgaacgcagtctatgaaaacgactttatggggttctcatacgggttcagacccgggcgaagccagcacgatgcactggacgcactggccacagggctggtacgcactaacgtaaactgggtactggatgccgacatcagtcagttctttgacagggtgagccacgaatggctgatcaggttcacagagcatcggatcggcgaccggagggtaatcaggctcatacgtaagtggctcacagccgggacgtcggaggagggtcaatggcgagcaacggaggaaggcaccccacagggtgcggtcatctcaccgctgctggcaaacatatacctccactacgtcttcgatctgtga

SEQ ID NO: 247743 - DNA, 477 bp, Klebsiella pneumoniae
atggcgaataacaatgcggcgatggggtctactgaccactccctgtcgtcaactgcgtggaaggcagtgagcggcgtcgacggctccctgctgacgcctaccggtacggggaccgccgggaccgattcctgggtgccgaccacgaccaactccgtgcggatcgacatatcgggaacagggaattacacactggtttatggtgagaatacgctgtttacgagcgcccgaaatccgggtgctacgccggtagcagaagcggcgctaagagtgctgcgcagactgatgctgttcccgctggcgggcctggtttccgatgattcgctgtcgtactcaaaaggaggcgaggtgatgacactgcggggcggtgcatattcgaacggtacaggcggcggtatcaacgcgctactcgctaaccgtggacgtacttcagttggtcaatctaactctggtgtccgtcctgtttactacaagccttga

SEQ ID NO: 247744 - DNA, 471 bp, Klebsiella pneumoniae
atgaactcatcatcggctaactttctcgatgcgttaggcgccagccagacgctcagcgcgcaaatgaaacacgagctcgacaccctcggctacaccgtcgtgcataacgtcgttgacgcccagtggctgagcgaaatgcgcctgcttattgacaccctggttgaacgcgaaggcgataatctggcgatggagcaccatcaggaggcgacggcgacgcggatcgctaacctgattaataagggggttatctgggagaaagtctggtcacacccgctgatcctctccgcttgtcgctatatcttcaacggggattttaaagtctccagcctgaacgcccgcgaggcgctgtataacggcggccaccagccgctgcacgccgactggaaaataacgtcgaggcggccagcggcagtccctgttcattcagttggccctccagcacaatttccagacgcggaaacggcacgttga

SEQ ID NO: 247745 - DNA, 543 bp, Klebsiella pneumoniae
atgaacacgcttcgtcaggactctctcgccggcatcgtcgtcttccttgtcgccctgccgctgtgcctcggcatcgcccaggccagcggcttaccgcccttcgtcggcctgctgaccggcatcatcggcggcctggtcgtcaccgccctcagcccctcccgcttcgccgtcagcggccccgccgccggactggtcaccatcgtcgtcgccgccattgaatccctgggttccttctccctcttcctgatggcgctggtgctggccggcgtgctgcagctgctgttcggcatcctgcgcgccgggcgctttatctcgctggttcccgccagcgtcatcaaaggcatgctggcggcgatcggcatcctgctgattatgcagcagatccccgtcgcgctcggcagcgcagaagagaccgggctcgttgatatcgtgaagggtaacgccaccttctccctcagtgctatcgccgtcgccgcgggcggcctgctggtgctctggctgtggggttcgccgcttatccgccgggtgaagagcctgcgctag

SEQ ID NO: 247746 - DNA, 1056 bp, Klebsiella pneumoniae
atggcgaaaccggctggtcaggacacgcctaacgccccttcggaagctgttccggtccagaaggaaaccttaaccacgcgtaaactcggctcgctggaggtgtccagcatgggactcgggtgcctgccgatggtgggttattacggcggaggtccgcgcgatcgtaaagccatggtttcgcttatccgggcagccttcgaacaaggtatcacgttctttgatactgccgaggtctacggcccccatctcagtgaagaatttgtcggggaagcactggcccccgttcgcgatcgtgtggtgattgccaccaagttcggcttcggcgtggaggaggggaagcccacttcccttaacagccaccctgaccatatccgccgtgccgtagagggctcactaaagcgtctgaaaacggaccacatcgatcttctctatcagcatcgccccgatccgaatgtgccgatcgaggatgtggcggaaaccgtgaaggcgctgatccaggaggggaaagtgaaacactggggactgtcggaagcgagtgccaggacaatccgccgcgcacatgcggtactccctgtgactgcagtgcagagtgagtatgccatgtggtggcgggaaccagagacgcggatatttccaacgctcgaagagctgggtatcggtttcgtaccttactgcccgactgcccgcagcttccttgccggagcagtcaatccaagccagcggttcgacagcaccgatcggcggcataacctgccacgcttccagcccgatgccctggccaaaaacatggtgctgcttgaatttgcgcagtcgtgggcccgtcgcaaaaacaccactccggttcagttcgcgctggcctgggtaatggcccagcggccctggattgtcccaatcccgggtacgacgcaatatccgcacctgatagaaaacagcggcgcaccgcaagtccggttgacggacagcgagctacgcgaaatcgatgcggcgcttgccaaaatcccattgcagggcggtcgcgccgatccgtttaccgaaagtcagtttgataaaagttaa

SEQ ID NO: 247747 - DNA, 903 bp, Klebsiella pneumoniae
atgaatggactaaatcataacgcgcttacatgcagtgccgtccccataccgcactgggagcgttctcttcagaccgtggaggcccagccgtacttcaacgtttcacaggcgtcgctcgtgctcgaagggatcgtgttcgatcggaacaataacctgctgtttgttgatgtggcgacggggcgcgtgtttaagctcaccccggagcggcagctttccattgtccttaaggagaattcattcggtgcttccggcctggcggtacacaaggatggacggatctttatcgcctcggtgggcgatatgcagcgaggttctgtccgggctatcgaacccgacggcacccgtgagcagatgattgttgcccctgatactggatttcttgtcaacgacctggtctttgataatcagggcggattttattttactgacagccggggaaattcagccgatccacagggtggggtgttctacgttagtcccaatgtcgggtcaattcatgccatcctgcctggactcgcggtcgggaacggcatagcgattgaccctgtcggctctcagatatgggccacagaacacgctaaaaacaggcttcatcgcgtaagactgtcagacgccaccacggtcgccccgtttggttcagttgttacctatcagttcaccgggccggcgccagacggggcccgtgtcgacagcgaaggcaatgtatatgtggtcatctcaggccagggccgcgtcatggtcttcaaccgcaacggactgcctattgggcaaattgtgctgcctgaccgcgacaaaggccgtaaccttaaatcgacaagcctggcgatccgccccgggcatcgcgagttgtttattgtcgctaacagcgggaccgaacctggtggagcgatgatttttctttag

SEQ ID NO: 247748 - DNA, 624 bp, Klebsiella pneumoniae
atgtctgacgatattaacgcagtatttgatagcaatttaattgcaactcaggctggtaccgttcaggtatttcattttgatatgagttcccgtgagtttattggtactgaagaagtttatattcatgtcggtgttggccttcctgcattttcatgcatggaagaaccaccagtgcaaagtgaatatcaggttgctgttcgttcggaagataattcttcctgggctgtcaccgaagattatcgcggtgtcactgtctatgaccttcaaacgctggccagtcacgttattaccgagcctggacctatccccgacactgtaacgacctctgcgccatctactccatacgataaatgggacggttctgcatgggtaacggatgctgatgcacagcatgctgcggatatcgctgctgcggacctgcaaaagaaacagatgattactcaggcctcagccgaaatttcaattcttctggatgccgttaacttgaacatggcgactgatgaagagaaattccggcttactgctttacaggcttatcgggtgcagcttaaccgggtagatacatcgcttgctcctgatattttttggccggttatgacgaccccggaggctgataatgtctaa

SEQ ID NO: 247749 - DNA, 1086 bp, Klebsiella pneumoniae
atgaaaactcgtatcgcgtcactctcactggtcattaacctggccaacaaaaatgaaatccagctttttcctgctggtcactttcgtgcgatggacggtcgcccggaagaatgcccggatggctggtttatcgatgcggatatagcgacggctctgatcgctgcggctgaagagcgcacaaccccttatgtactcgactacgaacatcagacattacgggcaaaaaacaatgggcagccagctccggcttccggttggtttaaaacgctcgaatggcgcgagggtgaaggccttttcgctactggcgttgactggaccgaagtcgctgcggcctacatcgataaaaaagagtatcgctttatttcccctgtatttctgtacgacaccgatggtcgtgtcagaacgatccttcatgcagccctgaccaatactcccgcactggacgatatggacgaggtcctgctcgctgccgcatcgctcattgcatccactacctacgaggacacaacgatggatgaattactggagcagctccgctggttcctgggcctgccgctttcggcaacgaaagaggatgtgctcgccgagcttcagaagctcatcaacaaaatcaaggcggctgacagcgaagcggctgcgggtcttgcctggattaacgggctggaagccagcattgcggcgctgacgtctcaggttgaaaccccggacccggctctctgggtctctgttgacgtcatgaatcaggcgatcgagcaggcccgcgcatccggtgaagagcgaattgctcagctgacgctgcagcagtccaccgacctgattcaggcagcattgtctgatggccgtctgttgccggcgcagaaaggctgggcggaggcgctggccaaatccaaccctgacaaactccgtgagcatctgagtaaacagacccgtatcgcggcgctcaccaccactcagaccggcggccgccccccggccggcctgccgtcccgcacggttgatgagccggaaagcgagctgaacccggctgtactgagcctgatggggcttgatccgaacgattttaaagagggaaacagcaatgtctga

SEQ ID NO: 247750 - DNA, 210 bp, Klebsiella pneumoniae
atggctgacaaattaatccgggtgaattcccgcgtcagcgtgatggccagccaggtggcttacgtcatcgcgccggagtttaaggatcgtatcgacgttcacctgctcgatggccgcgttgaagagctggaatactctatgcgtaacgaacgctggagcgctaaagaccgctttgaacaggctgttaacgacgctttaaagggggaataa

SEQ ID NO: 247751 - DNA, 162 bp, Klebsiella pneumoniae
atggtcgccgatagtatcgcggaggagagctgcacgttgagcaccaagagcgcggagaccttttccgatcggaaaggtggtgccaccgaatgcggacagcaggcgctcggtggccgggaagccgatgaggtcagctatctgaatgactaccgggggcagtag

SEQ ID NO: 247752 - DNA, 699 bp, Klebsiella pneumoniae
atgaccagcaatttaacaataaacagaaaacgtcttgaggctattgcctacggctcggttcgtcagagccaggaggaaggcattgaacttgcccggatggccctgaccactatcgatagcgaaatggccgtgccagattatttttcattgctggtatctgctgcaagattcagagctgataaagcaatgcgcaggtttccgcagccaaactacgtactgaacaaggtggcggaggaaagcggtgaagtgataaaggccgtaattcattacaccgaagggcgcgaacagtggtcgaacgtcgaatctgaaatcattgacaacctggctatgctactgcgcctggtgacagaaggagatcaggtaataggctttacccctcctgacggatgccagccctgcatcaaacatgttgataatgatatcgagccgcacaagcgcatcatcagtatcaggcataaggattattcccatcttgatgattttgaaacatcagctcgttcattgtctgctgtggctccacagcctgccgaccgtcagaccagctcgctggtaatgtgggtcaagcgcctttccctgtcacttcgttcggcatgccctgataacaaattacccaaagcggcgatgggctatctgcaaaataacggccttatcagcattgctgattgccttcgggggaacaatgaagaacctcctgcgtaa

SEQ ID NO: 247753 - DNA, 678 bp, Klebsiella pneumoniae
atgagtcatgacaaagatgttttaaataggttcctgataaataccgccgaccacacaatgaagattcaccgtgatgatggcatttatcgtcatctggagttttcacgtaatggcagtaacagttatcgttttgatctggtcacatggccaggctatctgtgcgtcaccggcgatatgggaacgtggaccttcagtcgcatcgctgacatgttcgagttcttcacagccagccatttcggtcggcgggagagctttcttattaaccctggctattggtccgagaaatttgaagctggtgcagggcgtagtcggcgtgaatctccttgcttcgagtttaacgcgcaggcctttgatagcgggttacagcagtggctcgatgcttatatcgaagaatgtgacgacgatgaggatgctgaagaagttagaaacgctatatgcgagctgaaggacaacaacttcaccacagagagcgatgcgtatcatgccctcgatagcgcctattttccaggcaatgtcagtgcattcgacatctgggatggtatcgaaggcctccaggcatatagcttccactacctctggatctgctatgcgattgtgtggggtatagagcgttaccgcaccaccaaactcactgataaggcaatgaatatattcctggctgtaagggttaattcatga

SEQ ID NO: 247754 - DNA, 159 bp, Klebsiella pneumoniae
atgaacttaaaccagcaacataaagatatcgagaaacaaaagctgatgactgacgcatcgagattccgggacccggcagagcgtcgtagtttctggtcggtcatcttcatcacccttatttccgcattagctatcgttctttttaactttattttttag

SEQ ID NO: 247755 - DNA, 225 bp, Klebsiella pneumoniae
atggcagcttatctttgtgtctccgggtgtgaagttcaggatatgggcggtaagcgtatttatcaccttaacgataactccgttgtcattgagcatcccgattatccaggcaagacccgatttcagttttatacccatagcggtcagtcaatccgtaaaccggctgataaaaccgcaatgaaacaggcagtcgaacgtcataagaaacgctggagattagcatga

SEQ ID NO: 247756 - DNA, 894 bp, Klebsiella pneumoniae
atgaagctttctcctcaattgaaaaatacgcacgttataaaggatatgctaaaaaaagttaatgtttctatttttctttcagatggaagacgtgttgaaacattgttagtttacctgccttcaaccaatggagtaataaaccatacggcatttttcgacttgatagcaaatgagttgctccatcactttgctctcacttgtcaagatattgagaaaaaacttaagcgaaatggtgctcaagctgcggacattcttttcaaaaaagcgttaagtaaactaagtcaacaaacggcacatggtgaacttggtgaattaatcctatttactttagttgatgtttacctagaagctcctaagttacttagtaaaatctccctcaaaaccagtccgcaaatgccagtctttggcgctgatggcgtacatatccagtacgtcaataataaaatacgtgtatatttaggtgagtcaaagctttatactacctttagtaatgctgcaactaatgctgcaagctcaatagaaaaagctaaaagtagatatcttgatgagttcaatttaatcgatagttacatagacctccctcaattagatgaagatgcagaagaacaacttcttggaatactaaacccatttgaaaataaaaatattgatgatcatattcattcgccttgttttattggttttgccgataaaaatttaattgagagctgtctcaaaggtgaagattttgttcaatgctatataaatatggcattcaatcatattgacgattattataaaaagctcgagaaaagaagtgtgagcattgaatcgtcaacattaatgattctgccttttaccgatactgaggctttagtcaaggattttataacccatcttgggatacaaaaatga

SEQ ID NO: 247757 - DNA, 2535 bp, Klebsiella pneumoniae
atgagcgaattctacaccaaattatctaatcggataataaataatgaaaaattcaaaattggcacatcagagttattttcaggctatattaagatgcttattggtgaaaaagaaaccatttgtaaggaactcgcaaaaaatataactacagcctctcagattttttataaatctgaagatgaaaaatatttgaaagaaggtgctaaccttctatcaatgttaatcgattcttgtggaacagattatcctgaaataattcctattgctgcacatgtttttaccagcaacggagactttccaaatatagaattacttgaaaaacgctttccggaaatacatttcaaacataatttactctcagaagctacacttaattttcgtcgttcattaaataatgtagaaactttaaatattatattgactgattttcaaaaaaggctttgggatgatctacagagaggtgatgatgttattaccgttgcaccgacctctgcggggaaaacacatattatactaaattatttagttgatagtgtactcgatagccttgatggcgcatttgctgtaattgtagttcctacccgagcattaattacagaagtatcatctaaaatttataatcttgctaaggaaaggggaagagaaaaggaaattgaaatttgtactataccaagagatggtaatttttcagacaaaacattctttgttatgacgcaagaacggttacatgaggttctgctaagaggcgatatcaactttaactatctttttatagacgaagctcataatatttctgatgaaagtagaggggttctacttcatctaacacttgaaaaagtcttggataatggtactcctcagatcattattggaatgccatcaccacaatatcagaatagtttcacaagtgtatttaatgatattgcctttaaaaaggagataaccaaccattctccggtttcaaaattaataatgaatgtaaggccgaaaggaagaaatcttgaaattgatagattgtattccgcagacaaggtggtaatccctaaaaactttaaagaaaaaaaacttgctgatatagtttatagattagggaaaaatcatagcaatattatttatagaaaccaaactaactattgtgaatcaattgctcaagatatttcaaacagaatagagactgttgctgataacgaagcacttatcgaagcttctgaatatattaaacactttattcatgaagagtttactttggcttctaatcttctgaaaggtgttgcatttcattacagcccattgccgacatcagttagaattatggttgaaaatttagctaaagaagggcatgtaaaatatatatgttgcacaagtactttagcagaaggggtaaaccttcctgcaaaaaatttatttattcaaaatccattctttaaacagaaattccaaagcccagaaagacttgaggatgtaaaaataaataacatcactggaagggcaggtcgaatgcttcagcacttttctggtaatgttttccttattgagcaggataaatgggcctttgatgattattttactgaaagtgatgaacttaaagaagaaaaaataccgacctattttaaattaatcaatgataaaactgatgatgtgataatggctctatcaggtcagtaccctagggaggatgagcaatataaattttactcagtagctaataagttaattaaagcttttgataatggtagccttgataatacacttactgctccagaagtaaaacttgatagccatatgattcgcagattgaagaataatgttgagcaggcatttttaaatttgaaagtatcatccctgattttagagtctaaccccacgataggatatattcagcaaaataaagtctatgagtttctaatgagcgaggttgatttacatgaatggtcattaccacaccctaaatcggaagatttgtatgagagattattaaaaatttcaagtaagcttattgaatatggcgtttttatcccatctggaaactatacagctaaatatatctgtcttatatctaaaaaatggattcaaggaaatagcttaaaagaaatgatatcggaacagatttattgggataatgcttctccttcgcaagacgccaatgatgaagatgaaggtataaatgaggttaaagttaataagtcagttcgtaatgttataaatgtaattaatagcgatgttagatttaggctatcaaatgcaataaaatgttattatacactttttgtattggcagtcagaatgaaaagaagtaatgttcaaagtgtaaaattacattactttttggaaattggtgctagtgacgagaggatgatggatttattaaaccttggattgtcacgagaagcatctaaagaaattgatgagaaagtgccttctggagtgccaattaaaaatcttgctgatttaattagattattagactcagaaagcatttctcgaatacacgttgttataaaaaaagaaatagaacatttagttaatcgttcttga

SEQ ID NO: 247758 - DNA, 879 bp, Klebsiella pneumoniae
atgagtgcaaataaaataaaaaaaaatgtcacggtcattttttttaaaatagatactaaagatgagtattttgataattttgctcttaactatgctacagtatcggaattagatgagaacgttagagtaatttctcatcgggacagaaagcatttaattaaagttgatcattattgtcttcatgatgagttaaaaacttttaataccactattgtaaaagagcgcaacacatggcaaatcaaagcaactagagatggtgtaataagtggaattagcctgaaccaaggtatcataggcgacccctactttattactgtgataccctcaatgaagatcatctttggttttacctctgggcctagtgggactataaaaagtatctgccgatttatattggagcaatttaacaccgatcgcaggaataagataaaacttgatcttattcctaggagaaaagagtttacaacactaaataacattcctgaatttgatagtcttcattttaaaatgaattcttcttatctagttgatttagctgatgatgcaccaacattttttaaagagctggcttctacaccacttattgggccaggaatgcaattatcatttgatttggcattcaataatgacaattataatcaacttacaaaagaacatgttgttgaaatagttaacttcttatccgatcacgatggttgttcaggtttgaaagttaagggtaaagataatcaaggaaactcaattaatatggatttttctaattcgtttctcacctataaaactgaaatcaatacgcgcaacaaatttattgataaagacgtgtcgtttggtgtattgagatcagctcttcaggagttgttaaaattcaagaacgattaa

SEQ ID NO: 247759 - DNA, 939 bp, Klebsiella pneumoniae
ttgaagtcaatacttaactgggttatgaaaaatggttggaatatatttagctttattggagtgatagggacattctatttttcgcttatatatgttcccggttatgtaaaagatataactgcagcaaaggtaaatatcactcatgaaagcttagtggatgatgttcaagagttattattttataataaaaaaataacaattgatgatatcaattcattcattaaggccaaagagttagagcaaggaactccttacccatactcggctgatgaacttttattacaaatccaagatcgctttatgggaaacaaatttattccattagagaaaagggagtcactaatggatacagtaaaatctattcgctccacatattcgaagccaaaaattgctgagaagaaaagtataaatgaagattctctagtatcaatgtttgtttccgctataggagcactcattgcagctataggtacatttagtattttcaggaaaataaaaattgacaaagaaattgaggccgatattacttcgggtgatgtaattaataacttggcctatccagatttaactccaggctcgaaggagtttgaacgtatggttggtgaagtacttaatgaacttggagtgctttcagaaagagttggagcaggaaaagatgatggttatgactttgagattaaaacccaagaacagaattatattgttgaggtgaaaaggtattcaaaactactcggtttggctacagctcgtgaatttatatataaagtgaatcaatcaggtaagggtggtattttaattgttagctctggctttaccgaaagaacaaagcagcttataaatgaacataatgcttcatctgaaaaccaaaaagtatatcttgtagtagctaaggcaaagactgagcttaaggatatattggccaaaattttacagctatag

SEQ ID NO: 247760 - DNA, 234 bp, Klebsiella pneumoniae; identical to SEQ ID NO: 193227

SEQ ID NO: 247761 - DNA, 1845 bp, Klebsiella pneumoniae
atgcaaaaaaaaacgccgcgctacaatatcaattcgcctggtggcgatgtctttgacggcatcgccatttttaatgctcttaaacatcatggtgcgtcaattaccgttcatatcgacggtctggccgcgtctatggcctcggtcattgctatggtaggtaatccggtcatcatgcctgaaaacaccatgatgatgatccataagccctggggctttgctggtggtgatgccaacgatatgcgtgactacgcagagcttctggacaaggttgagtctgttctgatccctgcttatgcagagaaaacgggtaagagcgccgatgaaatagcggcgatgctggaagatgaaacatggatggacggcaaagaatgcgtcgctatgggttttgccgaccaggtcaccccctctcttcaggctatggcctgtatccagtctaaacgtattgaggacttcgaaaagatgccaaaaaatattcgcaacatgttaacgccgccgcgagctaccacgcaacgcgatccccagcaaccacaaatgcagcagccggtggtgagccaacctcccgtaattgacgaaaacaccattcgtgctcaggtaatcgctgagcaaaaggatcgcgttaatggtattaacaacctctttgcgatgtttggtggtaaacacgccgaactgcaggcgcagtgtgtagcagatatggattgctctgtcgatcaggctaaagacaaactgctggcgctgctgggtaaagatgcttcaccatcggcgaaaaccacgccagcgcatattcatgcaggtaacggtaattttgtcgccgatggtattcgccaggcattgatggcgcgtgccggatttgaagatcaggaacgtgacaatgtctacaacggcatgaccctgcgtgaatatgcccgcatggccctgactgagcggggaattggcgtatccagctataacccgatgcagatggtagggctggcgctgacgcacagcacctctgattttggcaacatccttcttgatgtcgccaacaaatcgattttgcagggctgggacgaagctgcagaaacctttgaactgtggacaaagaaaggccagttgtcggactttaagacagcgcatcgtgtggggatgggcggattcccgtctctgcggcaggttcgcgaaggcgctgaatataagtatgtgactaccggcgataaaggtgaaaccatcgcgctagccacctacggagaaattttttccatcactcgccaggcaatcatcaacgatgatctgaaccagctcacagatgtaccgatgaaaatgggccgtgccgctaaggcgactatcggtgaccttgtttacgccattctgaccaaaaacccaaaactctcagatggtaaggcgttattccacgcagaccacaagaacctgtccaccggtgctatttccgtcagcagcctggacgatgcacgtaaactgatgcgcctgcagaaagagggagaacgatctctgaacatccgcccggcatttatgctggtgccggtcgcgctggagacactggctaaccagacgattaaatcagcgagcgtaaaaggggcggatattaacgccgggattattaacccgatccagaattttgcagatgtgattgcagaggcccgccttgacgaagctgacgcaaaagcctggtatctgatggcggcaaaagggacggacaccatcgaagttgcgtatctgaatggtgttgatactccttacattgatcaacaggaagggtttaccactgacggtatcgctacaaaagttcgtatcgatgctggtgtggcgccgcttgattaccgcggcctggtgaaatccagcggccagtaa

SEQ ID NO: 247762 - DNA, 282 bp, Klebsiella pneumoniae
atgacacccggtcgtggctgggatgaagttaatgcgattctgaaatcgtatgccgggtttggggatgcttcccgctataaggcaggtaatgtcagcaatatcagcattaataacatcattgagtgtgcgtcgaaaaattacagtatcaatataacgctggaggggaggaatatccgcgtcaatcgttatatgaaactggacacccgcgcgaaaacaaaaggtgcgctgaacatcagcagttcagccgccccgtatgtaacgacctctaatattgtggaataa

SEQ ID NO: 247763 - DNA, 420 bp, Klebsiella pneumoniae
gtgggaaccgacaacgatattcacgatatcactgctacgaatatcgggttaaccggtaacgagcaggtcagcaccattctgaccacgcagtttaaaatctacaacgtgacaatcagcggtatcagcagcgtcaactatatgactccaggccgtggctgggatgaagttaatgcgattctgaaatcgtatgccgggtttggggatgcttcccgctataaggcaggtaatgtcagcaatatcagcattaataacatcattgagtgtgcgtcgaaaaattacagtatcaatataacgctggaggggaggaatatccgcgtcaatcgttatatgaaactggacacccgcgcgaaaacaaaaggtgcgctgaacatcagcagttcagccgccccgtatgtaacgacctctaatattgtggaataa

SEQ ID NO: 247764 - DNA, 540 bp, Klebsiella pneumoniae
atggtcaacagcgatgattcacttgtttacggccctgataagaacccgacggaaggttcgattcgtcagtggatctacccgacttgtcctttctggtacggatgggctggaaatgaggctgtgggaaccagtaacgatattcacgacattactgccacgaatatcggattgaccggtaatgagcaggtcagcactattctgaccacgcagtttaaaatctacaatgtgacgataagcggtatcagtagcgttaactacatgacacccggtcgtggctgggatgaggttaatgcaatactgaaatcatatgccggttttggtgatggctcccgctataaggcaggtaatgtcagcaatatcagcattaataacatcattgagtgcgcatcaaaaaattacagtatcgatataaccctggagggccggaatatccgcgtcaatcgttatatgaaactggatacccgtgcgaaaacaaaaggtgcgctgaacatcagcagttcagcagccccgtacgtcacaacctctaatattgtggaataa

SEQ ID NO: 247765 - DNA, 282 bp, Klebsiella pneumoniae
atgacacccggtcgtggctgggatgaggttaatgcaatactgaaatcatatgccggttttggtgatggctcccgctataaggcaggtaatgtcagcaatatcagcattaataacatcattgagtgcgcatcaaaaaattacagtatcgatataaccctggagggccggaatatccgcgtcaatcgttatatgaaactggatacccgtgcgaaaacaaaaggtgcgctgaacatcagcagttcagcagccccgtacgtcacaacctctaatattgtggaataa

SEQ ID NO: 247766 - DNA, 168 bp, Klebsiella pneumoniae
atgaaaaaaccgttatcgcggtggccgcactatgtctggcagcaggaaccccagtttattcctttgccgctgacccgtgcgaagttgttctttgtatgtacggaaaagctacgggtaatagtggcgggcgtgaatgccgttctgcagaaaaggctttttttaaaatag

SEQ ID NO: 247767 - DNA, 147 bp, Klebsiella pneumoniae; identical to SEQ ID NO: 190555

SEQ ID NO: 247768 - DNA, 444 bp, Klebsiella pneumoniae
atgattgaagaaaaaattcttatcctctatcccacgctagtccaggcggggcttgccataacagcctatatggctccaacgccacttataacagtaggtagctttgattctcccttgtctttttatataactatggctgttttcctagattcatcaaaagagtatgtaactacccttgacgttaagcataacggtgattcagttttagactcgaacgcaaacaatgacgaaaatcattcgcaaaattttatgttcacaaaacctgatgagaacagtctccttgttggaactcagttgcatctaaaaggagttaagcctacaaccccaggtacatatgacataactttggagttatttgaaatagatgaacaaagcaggcagcatttggttgatgaaaagacttgctctatagtaatcgttaaaacaacgttgagggatcaatag

SEQ ID NO: 247769 - DNA, 240 bp, Klebsiella pneumoniae
atgttcaaactgatacagcgcggccaggtttacgccgacagccacggatggccggttctgattcacagctgcgacaccagaacagtgcgttactggcgccagggtcggatcaacatggcaagcatcgaccgatttaataacgatttcgagccgctcacttgcgaagaagcgcaccagatacgagccgaactggagcagagcgaacacattaagaagctgcgcgcccagcgggcggcataa

SEQ ID NO: 247770 - DNA, 198 bp, Klebsiella pneumoniae
atgcgttacattagaaaacacattgcaaattttgatttcaatattgtatccattatatatttgctgattgcttgcattgtaatcatgaagttcccattattacttcaagataaaaccttcttagtttgtggattattcctctcggtagcattcattttttgtgcctataacaacaaaaaaaaatcgtcaataaaatga

SEQ ID NO: 247771 - DNA, 288 bp, Klebsiella pneumoniae
atgggctccccttttcgtttgttagtgatggccatgtccatgaccgtgaccgcgcccacccgggccgcgttcccagccgccgcggtggtcatcgcggtcgttccagccagcacgatagccgcgctcccaggctttatctctgcctttgtaccagcctttgtgccagccgttgtcatgacgatgccaacggttatcacgtcattcatagtgacgacgccagtaatcacggtcgcgccagctgccaccgtcccagtagttaccgtaattgtcacgatcgcctatttgtaa

SEQ ID NO: 247772 - DNA, 1233 bp, Klebsiella pneumoniae
atgaaggggatgcagaagataaagcgaggtaagaacttcgctggcgtagtgttttatgcattgagaccagcttctcatcacaaagttgatccagttgtcgtaggtagcaatatgatgggatgcctcgctaaagagctaatagctgagtttggtgctacaaaaacacttcgccctgatgtggctaaacccgtttggcacaactcgcttcgcttacctaaaggtgaatcactaacggctaaacagtggtcctacatcgcagatgactacatggcaagaatggggttctctgaaacgcatctcagatgctacatcctacatgacgacgaagacggccagcacatccatatcatcgcaagcagagtttctcttgatgcaggaaagctctacctcggcaagaacgagaacctggcaagcacaagaataattcagcaacttgaaagagattacaatctgacaagaaccaaaggaccgaaagcttctccagcagcgccctcacctacaccgaagctcaaaaaatcccgtaatgagctgatgatagaaaagagaactggtgagctatgcccaaaagcaatcatccaaaacgcccttgatgaactgctagataccaggcaatcgattaccgacttcgtgcaacagcttatggcacaaaatatcaggccaatccctaacattgcttctgcgggtaagatgaacggtttttcattcgaatatagggggattgctttcaaagcttcgcagctcggtaagggttattcttggtcagccttgcagaacaaactcaactatcaaccggaacgtgataatgctttcctgtttgaactgaaagcatctgtcagtgaagcgccttgtacgttcatgactacagatgctcctgaaatcacaacaagagtggttcacagccccatagaagcgcttatccatgataaccgtgctggtcaggacgaatacactaacgcttctgtaaagcagtttcacttagaagctggtgctaaagaagcgttaaaagaagcccccaaccaaagctatgcagtttcagcgttcaggtggttggaatacatcccctacctcgatgtaatttatcgtatgttgaaaaacctcaaaatcccaacccttaaacgtcctctaaaacacaaaaccatcactgacgtgagagtggtagagattatgcctctcccccaaaaaaatcgcatcgaatcagcacctcaatccagaagagcttcgctttcgatgtaa

SEQ ID NO: 247773 - DNA, 402 bp, Klebsiella pneumoniae; identical to SEQ ID NO: 100841

SEQ ID NO: 247774 - DNA, 414 bp, Klebsiella pneumoniae
gtgtttggcgactggagcgccgccagcggttggcagaaaactttcgagctcctccacctgcagccgcggatcagcgccatagtggtggcaaacgatcagatggcgctcggcgtgctcagcgcgctggcccagctcaatcgcagcggcagccaggcggtatcggtgaccggctacgatgacaccgccgacagcctttacttccagccgccgctcaccacggtggcgcaggacttcgatctgttgggcaaaagggcggtggagcggctgattgccctgatggcggccccgcagctgcggatccgcgagctgctgccgacccggctcatcgtgcgccagtcggcctggcctgtcgccgccgcggaggaccggcagcagaccctggcgcagctgaaagcgctggtggagaagctttag

SEQ ID NO: 247775 - DNA, 1089 bp, Klebsiella pneumoniae; identical to SEQ ID NO: 234484

SEQ ID NO: 247776 - DNA, 588 bp, Klebsiella pneumoniae
atgcaggtcagcagaaggcagttctttaagatctgcgctggcggtatggcgggaaccacggcagcagcgctgggctttgccccggcaactgcgctcgcggagacacggcagtacaaattgctgcgcacgcgcgaaacccgtaacacctgcacatactgttctgtcggctgtgggctgttgatgtatagcctcggcgacggcgcgaaaaacgccaaagcatccattttccatatcgaaggcgatccggatcatccggtcaaccgtggtgcgctctgtccgaaaggggctggtctggtggactttatccattctgaaagccgcctgaaattcccggaatatcgcgcgccaggctccgataaatggcagcaaatcagttgggacgaagcgttcgatcgcatcgccaagctgatgaaagaggaccgcgacgccaactttatcgcgcaaaacgacgccggcaccaccgtcaaccgctggttgactaccgggatgctgtgcgcctccgcctccagtaacgaaaccggcatgctaacgcaaaaatttgtgcgatcgctcgggatgctggcggtggataaccaggcgcgtgtctga

SEQ ID NO: 247777 - DNA, 792 bp, Klebsiella pneumoniae; identical to SEQ ID NO: 180612

SEQ ID NO: 247778 - DNA, 168 bp, Klebsiella pneumoniae; identical to SEQ ID NO: 180609

SEQ ID NO: 247779 - DNA, 339 bp, Klebsiella pneumoniae; identical to SEQ ID NO: 199853

SEQ ID NO: 247780 - DNA, 366 bp, Klebsiella pneumoniae; identical to SEQ ID NO: 199846

SEQ ID NO: 247781 - DNA, 231 bp, Klebsiella pneumoniae; identical to SEQ ID NO: 236285

SEQ ID NO: 247782 - DNA, 285 bp, Klebsiella pneumoniae; identical to SEQ ID NO: 180585

SEQ ID NO: 247783 - DNA, 288 bp, Klebsiella pneumoniae
atggctgcgaaaaataaagcagtggagccggaagaaacggtcgtacaggacaaccatgcgaccgagaccgcacaggacaaccatgcgaccgtggtcgcacaggcagaacgtaaatccgttgtgttcctcggtccgcatagccgttattcccgtggtgatatcgcgtggtttgaaggatcgcacgccgaagagctggttaagcgccgtatcgcggtatggccgaaggatgccgaacgcgcgctgaaaccgaagccgggagacagcgattttgatactgacattggatga

SEQ ID NO: 247784 - DNA, 402 bp, Klebsiella pneumoniae
gtgatccgaatggaaattaaagggctggatgagctggagcggcagttaacggccctgggcgaaaaagtagcgacaaaggtattgcgggatgccgggcgcgaagcgctaaaggtcgtcgaggaagatatgaagcagcatgccggctttgacgaaacgtctgccggaccgcacatgcgggactcaatcaaaatccgctcttccacccgcaagggtaaagggaacgcggttgtaacgctccgtgttggccccagcaagcagcaccatatgaaggcgctggcgcaggagtttggcacggttaaacaggttgcagacccctttatccgacccgccctggattacaacctccagaccgttttgcacgtgttaaccgtggaaatccgaaacggcattgaaaacaggtag

SEQ ID NO: 247785 - DNA, 462 bp, Klebsiella pneumoniae
atggctgataaaacttcacctgaatatgcgatgttgccagcgggcaccattgtgaaatacggggagcctggcgctgccacgtcagcgctgaaaccgctgattaactgtaaagcgctgggtgcaatggggcagacggggggctttgtcgactgcaccacgttactggataagcagaaacagtccatcagcgatctgcctgacgggcctgaaaagtcgctgggctttattgatgatccaggcaataccgattttgccgcgctgctgaacgcagcagaggcccgcaagaccatccagttatacgtcgaattacccaacaagcgaacagcgacgatgctactggcgctgtccgggtggcagatgaatgaaatcgccgctccggcgaatgaggtcatccagatcactgttcagggtaagcaaaacaagatcacctggggaaccgtcgctgataccagcggcgcctga

SEQ ID NO: 247786 - DNA, 648 bp, Klebsiella pneumoniae
atgagttatggtgtcacgcttactgtacccagcggtgaaatgtgggttactccggatagtattccgctagcgctgtattcgaagcaggaaataacgcttaggggagggacaaattctgatgaattcagagcggtaacttatgaccagacaaaaccaatgatagcttttgtctgtttcactaacggccaggcaaaagctaataccgtttataatggaaacgaatgtcgggtagtgttttcctacggaagccagcaagccagggcagaaatttatttcttcaccatatttccacaaccaaagccagactatggtctggcaatttgggatgcatcagggactcttgttctaactgataagacaaggatactaacggacgtgcaaagctacggtgaaggatacaatataaacataacgaatgaggggaaatgggcagtctccccgctggccctaggtctggttgttggtgtggttaatgatccactgccgaggccatttcagggggagtatcatgcttatgccatttttaacgggtcaagtaccaatattaggggtatggtgacgcagatgcctggaggtaacatatcgggagtgtcgtaccttaatatgcgtaatcattgtcttgctattgagtgttctaaatatgactga

SEQ ID NO: 247787 - DNA, 12159 bp, Klebsiella pneumoniae
atggcaaataacataattaaagggcgcaagggtggcggctcaaagcagcgtacaccgacggaacagccggatgatttacagtccgttgcgaaagccaaaattctgctcgcattaggtgagggtgaatttgcaggtggtttaaccgggaaagatatttatcttgatggcaccccgcttgaaaatgctgatggttcgcaaaacttcagtggcgtgtcctgggaatttcgccccggcacgcaggctcagacttatattcagggtattcccggtactgaaaatgaaatcagtgtgggatcggaagtttccagcaagacagcctggacccatacctttactaatacccagctttctgccgttcgtgtccgcctgaaatggccgtccctgatgaaacaggaagatgacggcgacgtggtgggcaataccgtcaagtatgcgattgacctgcagaccgacggcggcgcctggcagacggtgctggaaaccgctgtcacgggtaaaaccacctccggttatgagcggagccatcgtattgatctgccccaggccggcagtacctggacgctacgcctgcgtaaaatctctccggatgcaaacagtgtcaaagttggcgacgtgatgacgctgcagagctataccgaagtgattgacgcgaagctgcgttatcccaacaccgcgctgctttatatcgagttcgactccagccagtttaatggctccattccgcaaatttcctgtgagccgcgtgggcgcgtgattcgtgtgccggataactacaatccggaaacccgcgaatataccggcgtctggaccggcgggtttaaatgggcctggacggataacccggcctggatctattacgacattgttatagctgaccgttttggtctcggtaatcgtctgagcagcgccaatatttcgaaatggacgttgtaccagattgcacagtactgcgatcagctggttcctgacgggcgcggtggtgacggcatggagccgcgctatacctgtaacgtctatgtccaggaacgcaacgatgcttacaccgtgctgcgagactttgccgccattttccggggcatgacctgctggaacggtgagcagattgttgtgcaggctgatatgccgcgtgatgtcgattttacctatacgcgcgccaatattatcggcaaaccccgttattcgagcagcagcagccaggttcggtacaccaacgccctggtttcctggtctgatccggataatgcttatgctgatgcaatggagccggcatttatcccggaactggtttcccgctacagttttaaccagctcgaaatgacggcgattggctgtacgcgccagagcgaagcccaccgtaaggggctgtggggcatactgaccaacaataaggaccgcatggtcgaaattgatgtcgggctggacggtcgcattcctcaacccggttatattattgccctggcggatgagttgctggccggacgggtcaacggcgggcgaatcagcgcggtgaatggccgggtgattacgctggatcgtgatgtggatgccaaacctggcgaccgcctccagctaaacctgccatccgggatctcacagagccggacaattcaggctgttaacggacgccggcagattacggtcacaacggcgtacagtgagacaccagaacgggaatgcgtctgggccattgaatccgatgacctcttcctgcagcagtaccgggttacaggggtaaaagagaacagcgatgccaccctcacgatcaccggcgtggcacatgacccggataaattcccccgcatcgataccggcgctattatcgaccagcgcccggttagcgtattgccggcgggcaaccagtcacctcctgacgatattgtcatcacatcccgctcggtcgtgaatcaggggatcagcgtcgaaacgatgcaggttaactggtcagcggtcagcggcgctattgcctacgaggcgcagtggcgccgtaacgacgggaactggattaatgtgccgcgcagctcgaccacctcgtttgaggtcagcggcatttatgccggtcgttacctggttcgcgtccgcgcgatcaatgcggcggagatctcgagcggctgggcgtattccgaagagaagaccctgaccgggaaagttggcgaaccgctgccgccgttggcgctgacaaccgtttcactgaccgcaggtattgaaatccgctgggagtttcctgcaggagcagaggatactcagcgtactgaactgcagtacagcccgaatcagaacggcaacggagcactgccgctaactgatttggcgtaccccggtaaaaagtatcagcagatgggcctgcagattgccacgcagttctggtaccgcgcgcgtctggttgaccgcctgggcaatgcctcgtcatggaccgactgggtgcagggaatgtccagcgataacgtcagtgattacttccagcaattggatgaagccattaaagatacggaaacgtatcagtcactggtgaaagagattgatacccgggccgtggccgaagaggtggactcggcaattgaagcagcgaaaaaggacgttgcttcacaggtaacggatgcgaagcaggaagcgcagcaactggtgcaggaaaccagaaatgacatcgaacaggccctggcggatgaggcgctggcgcgggccagtgctattgctcaggaatcggctgaccggacagcagccatcgcgcgcgagtcggctgaactgtctgatgccattgcccgggagtctgctgaccgggcaaacgctattgcacaggaatcggctgaactatcggatgccattgcccgggaagcagctgatcgagcttacgcgctggcagatgaagcccgggcccgggcaacggcgatttcagatgccgtgaaggatgaagctgctgcccggagtaaggctattgctgacgaagcacagaaacgtaacgatgctatcgctgcagaaaatgccgcccgagtgaaagccgtatctgagcttgacaccagaacagccgatgcactggcaaatgaaacagctgagcgtattagtgcggtgtccagtgaagcgaaagcgcgtgcggatgcattgttgaatgaggagaataatcgcgaagccgcgatccgttccctcaactcacagctgcagacggctacagagtcactggcacaacaaatctcccaggttgccgccggtacgggcgaacagtttgatcctctgaatatctggtattttgataccagcaatgagggctggaccgaagatgacaatggttacacgccaatgatcgtcacggatgatggatggttgaaagcggataacggtacttccagtgcccgctccccgaatgatttgggcatcgatgccgccgcctaccgcttcatcaagcttcgcctgaaaaaagtcggtaacccggcatggaatggacgcctgctctggattggcgcggacgaatccggctgggataatgcgcgttcagttgtgattgatgagccggaatatgacgttaacgatacggcgacggtcacgctgcatgatattccgtggctgccatcgcagcgcatccgtcgtttccgtttagatctggcgcagggtcagaatgaagagaattacttcttaattgactggctggccgtgggacgtccgacgccgggggccggcatggccgcgctgcagaacgagcagcttgcccggacgcaggcggacgcggcagaggcggcaaacagacaagacctggctgttcagctgcgaggctcgtatgacggaaatgatctgaccaaagtcagttctggtctgatttatcaggaacaacaggcacgagtcacaggggacaaggccgaagcttccgcccgacagtctcttgagacccggatcaacgacagcctgtcaacgataaaccagtcccttgatacgctgaatacagccgatgaggcgatggcatccgacatcaccggcctgaagtcatccctggccggaaaggccgatgcgtcggcgctgacgacgctgaaaacgcaggttaccacgcagggggacacgttggcttctcagggggccagtctcacgaacctgcagaatagcctgaaccgcctcagcagcgatgtgagcaaaaaagcagatgctgccgctgtccagtcactgcagaatcaggtaactcagcaaggtaaggatatcactgccgctaacagcagcatcacgaacctgaaaacgtcgctcgatacgactgacagcaatgtggcgaagaaggctgacgcgacgacagtcagtgacctgacatcccgtgttacatccgcggaaggaaaagtgtcgagtcagggcaacagcattacccggctgaacaattcgctgaacaatgttatcgcggattccgacgctgcttccgccattccaggcaaccttatcgtcaacccgtcctttgaacgtggaacggacgggtatatcggggttagtgcacagagcacggtggtggcagtacaggcgccgcgaaccggtacacgtgcactaaaagttgatcctggcagtgttgccccgggtcagactatcgactttgttaagggtcgcacttacgaggtaggtgtttgggttaagcagatcgcgggcacgacggacaatggcgccggcaacaataagttaagaatcggcaacagcgcaggtaatccagtactggaggttccgtataccggagctggtacggactggacaaaatacagtaagcgctggaaagcaacggaaacagcccgccttccagtaacactgaataactacctgacagccggaaatcgttattttgatgacttctatgtcatcgatgtgacagacagcgtcaatatagacgccaacgcctctgctatcgcttcagtccagaatacggtgacgcagcagggtaaggatattacgtcacagtcatccagtatcacagatctgaaaaacagtctaaaaacgacggatgcgaacgttgcgaagaaagctgatgctgccgctgtacagacgctgcaaaatacggtggagcagcagggcagagatatcaccactgcatccagcgatatctccggtctgaaaaacagtctcagcacgacggatgcgaacgtggctaaaaaagcggatgcttctgccctgggcgcgctgcagagcaccgtgacgcagcagggtaaagatattacgtctgccggtaacagcattacgcagctgcagaacagcttagcctcaacaaacagcgcggtgaacaaaaaggccgatgctcaggcattgtccgcattgaccggacgcgtctcggatgccgaagggaagctctcctctcagagcgatcagttgtccacgctggaaaattccctgcgtctggggagcctgatttcaaacggcagtctggacaacgacgccaccttctgggcggactccggctcaggctctgcgtttgtatatgaggccgccgaaaaagcgctgcgcaccaccacaggttctatccggatcgccaacaccacacgtattcctgtggaagtcgggatgacgctgacactcagctttgagtttaagacgacagagaccatttcggccatttcgtctgattcggtgggtttcattacggacctgaacgatcaaacgaactggctggtttcccaggcatcatggcttacagcggtcacgacagaatggcagcgacagaccctgacatttacgatccccgataaattcaccgggcagtatgtttaccttcgttttgctgcggggggctggtctccgtcgaacagtgcccggctttacctgaaagatatcgaggtttattcctcaaccgggatcgccggaaaagcagatgcctctgcagtgagtgaactctccagccgtgttgagacggcggaagggagcatcacttctcagggtaacagtctgacgaatctgcagaacagcctgaacaccaccaacgcaaatgtcagtaagaaagccgatgcaagcgcactgcaaagtctgcagaacactgtgacacagcaggggaaaacgctctcctctgcctccagtgatctgtcttccctgaaaaatcgcctcgacaccaccgacgggaacgtggcgaaaaaagccgatgccactgctttgcaggaactgaaaagcacggtggagaatcagggcagggcgctgaacagccagagctcacagctcgtgacgctgaacaacagcctgtccgccaccaggaacgatttgagtaagctggcagcggatgttgatacggccgggaaaacaccgggcaaccttctttccaacgccagctttgagcgcggtacagaaggctggagtaacgacggcaataactggcaggtctatgccgcacaggggccgcataccgggaaaaacatcattcgcatgatcaccgccggcgatgcgatgctgacgcagtcttttgtcgttaaaggcgggcggacgtatcgtgttggcgtatgggtacgacgtaatgccgctgtcgtgattgctaatgccgggaataccaaaatcagcctgcgtgacgcgaacaatgttgaagtgaaaaacgttctgctgacactggaaaatatgggtaatgcctgggcggacgtaagtctggaatatcgtgcaccggcagacgccaccatgcagatttcactgcgcgcatcgctgagtgcgggtgaggtctacatggatgatgcgtatgtcgtggatatcactgatgcggttaacattgatgccgccgctgcggcgaccactgctctggaaaaccgagtttcgaaaaacgaaagtgcgataaccagccagagcaccagtctgacgaatctgcagaacagcctcaacaccaccaacagtaacgtcagcaaaaaagctgatgcgacggcgctgacgacgcttcagaacacggtgaagcagcagggggattcattatcgacccagagcggcaccctcacgaaactgcaaaacagcctgacgaccacgcagtcagatctggatgccgcaaaagcgacactggcgaaaaaagcggataccgcagccctgtcttctttacagaataccgtgttgcaacaggggaacacgctgacctctcaggcttctcagctgacccggctgaacaacagtctgacaacgacacagtccgggctggatgccgtgaaagctgatgtggatgccagcgcgccgggaaacctgctggtaaacagtacattcgaacgtggacaggatggctggaacggctggacttctcaggcctccgttgttgagctacagcaaccacgtagtgggaaaatggcgctgcgtctggcacctgcttccggcacagcggcattgcagcagaatatttcggtactgggtggtcacacttatgagctttccgcgtggacgaaagtggccgcaggcaccactatggcgcccggctctgcgggcaataacaaattacgtatcgggaacactgacggatcagcggtagcggataagcagctcgatcctgctacgatttccacgacaacgtggcagcagaccaccctgcgttataagccggcgacggaccgcatcatcactgtcgggctgatgtattacctcagtgccggtatccagtattatgacgacgtgacattcactgatatcaccgaccgcattgatatcgatgcgaatgcgaacgcaacaagtaatctggattcacgggtgaccgcggcagaggggaaggtcacatctcaggggaattcccttgtttcactgcgtaacgacctgacggcagtacagtctgatatcacgaagaaagcggacgcctccgccctgcagaatctgcagaataccgtgtcgcagcagggggatgccctcagctcgcagagcgatctggtgacgatgctggaaaacagcctgtcggaaggcagtctgattggtaacggcagcctgaaaactgatgcctcgctgtgggaagattcaggtactggctcgggctttacctgggatgcgagcgagaaagccatccggacgaccacgggctctgtccgggtggcgaacatcacacgaattcctgtggaagcgggtgtctctctgacggtgacgtttgaatttaaaatgtcggaagccatcacggcgtacagttcggacacggtcgggtttatcgccagtctcagagacccggtaaactggctgacctcacaatccccgtggctggacggcgtcaccacgcagtggcagagccggactgtcacgctggacatcccggcaaccttcaccggacgctatgtttacctgcgttttgcagccggcggctggtctccggctaacagtgcacgactttacctgcggaacattgatgtcacctcggctacgggcgtggcgaataaagcggatgcctcggccgtcagcagtctgtccggccgggttgataccgttgaggggaaagtaacgtctcaggcgtctgatttgacgaacctgcgtaacagccttaacacaactaacaacaatgttagtaaaaaggctgacaccaccgcgttacagagtctgcaaaacaaagtggagcagcaagggaatgatatctcttctgccggcagccaaattactgaactgaatgccgcgatccttgccgcgaaagcggccggggatgattacatcccgaatccgtcgcttgacccggcttataaccgcatggggtataccgtgcaggcctccgacgctgatggcgttcctgcagggtgtccgtttgcatatgtgatccgtcttgccagtcgtgaccatattcccaacatcaacaatattgccgtcacaccgggcgacgtttttgaaatgtctgcgctggttgcgtgcggtgcaggcagtgccgactttaatttttacatcggtcgggcaaccaccgttaccggcgatgtcaaagcgaggtcctccggtggcaacacaaaagccacagcagcatggacgcgcgtgacctggcgcttcaccgtaccgtccgacacgaatctgatgcgaccgttcctgcaggtgaaccagagttctccgttcggcaccatctggtatgcaactgactggcatctgcgcaacgtgacggcggcaaacaaggcacaaaataccgctgacaataccgcctctgccgttgagtctctgacgacgaaagtcacccagcagggtgatacgctcagcagcatcgggagccggaccacgacgctggaaaatgggctaaaaacgacgaataccagtgtcagcaaaaaggcggatgcggataccgttcagacactgcagaacacggtaacgcagcagggtaaagacatcacggcggcgaacagcgcaattacgaagctgaccggcgatctgtcgacgacgaatgccaacgtcaacaggaaggccgatgcaacggcgctgtctacgttgcagaacaccgtaacggatcagggccaaaagctggcctctcagggcagcagtctgacgcagctggcaaataccctgagtgatgccatgaccagtctggccgcggatggcaaaattccgggaaacatgatctccaacgggtcatttgaacgtggtcaggatgcgtttaccggatggaacaatgtgacctcagttatcgacgctcagtcccccaattttggcagcaggattttgatgtgtgctgcggggcttgccgggatcacacagaaagtgcctgtcgtcaaaggcaacacctataaaatcggcgtgtttgcccgcgctcaggctggttcggtcatgcaggacggaaacaataacaaactgcgtattggcggcacgagtttgctgtacgaccgccagtttgacaccgcgaatctgccaaccggctcatcatgggttgagctgaccggcacatggaaggcgacggtcgacgggatggtcgatgtgtcgatctattcgtcccttaaatccggcgcacagtatttcgacgatttctatctggtcgatgttacggatgaggtgaatatctcagccaatgccggggctatcagcggtctgactacgcgggtgacgaacgcggaaggcaaagtgacaagccagggcaacagcatcaccagcctgcagaacagtcttaatacgaccaacagcaacgtcagtaaaaaagcagatgcagaagcactgcaaaacctgaaaaacacggtgacgcagcaagggaaggatatctcaacccagagcagtaatatcaccagtctgcagaacggcctgaacacggcgaatgccggcatcgacagtctggttgccgataatgacgcgtcgaaaagattcgtcggtaacctgttggccaacccgtcatttgagcgcggtctgaccggatacagtggcggtggtgcttttatcacggtgattgatgcccagtcacccaacaccggcagcaggattttgtcctgcggtacggggactggcgcagtctctcagtccgtggatgtcacaaaagatcgcacctataaaatcggtgtttttacccgctgtcaggctggttccgttctcgatgcccagggtaataataaactgcgtattggtagcagcagcctgttgtatgaactgcagttcaggcctgccagctcatcatgggttgagctgaccggtacatggaaagccacgataacgggcaaagtggatgtctcgatcaattcctcactcaaatcgggtaatcagtatttcgatgatttttatttcatcgatatcactgacagagtggatctcgatgcgacaagcaacgcggtcagtagcctgacttcccgcgtcacgaatgcagaagggacgatttcaagtcacaccggcagcattacgaacctgaataacagtctcagctcgctgaacaaaaccgtttccgggaaagcggataccagtacggtacaggcgctgcagaataccgtgacgcagcaaggcaaagatctggatgcaaacgccagcagtctcacatccattaacgcatctctgagcacgctgcaaagccagggattaaatccctgggtggacggttcattcgagtcatatgctgccggtaagagcctctatggtgatacggccatagtaacgacagacgtttcccgtaacgggtcgaaatctctcaaaatcacccgcaaagcgggcgaaaccggcaacagtgataaaatgctggggaaatggctatctgttcgaggtggcggtaagtaccgcttctccctctgggcatatatggacagcgatatgtcggcgccgaacgcatggagtgcaattgttggcctctatgcgcgcggtgagaatggtggagccaatcagtggccgggcgcggttaccataaatgagacgaacatcacccgtgggaaatggacattcctgacaggagtcgctagcgtggccgccgaccgcagtatcgctcagatgtggatttccactcgcggtccatcgggcggcgccgggttctcgctgtatttggatgatatcaatattgtcgatgtgaccgatgctcaggcagcgcagaccgatgcgagcgcggcagcgaatgcggtgacgcagctgacagcgacggtcagtcagcagggacgtgacatcaccgcacaggctaagcagttcacggagctgcagagcagccttaacagcactgatgcccgtattgcccggcaggacgaaactatcgcagccaatggcctggcgatggcgaatggttttaaccagatgcgcagcatgattggcgacaacagcgccgcgatcaccactacgaataaaaccgttaccgacctggaaaaatccacgacggaaagtatgacgcaactgacgtcgcaggtaggggacatgtcggcctctgtccagcagacggcatcgactgtggcagatctgaacgggaaactgagtgcgcagtggggagtgaaggttggcacgtcctccggcggtaaacactatgtctccggtcttcagctggggatggatggcagtggccagtcacagtttctggtgcaggctgatacgttcggggtatatgtccctaacggcgataaaagcaatctggtcttcggtgtcgacgggaacggtgcctatatgcagcaggctatggccaggaacctgacgattaactttggccagatttctgacagtctgcagtcgactgactaccagccaggttccactggctggcgtttgcctaaaagcggtgcttttgagatgaacggtaatgtccctggagaaggacgcgttcagcttgattcttctggtctggctgtttatgaccagaacggtgttctgcgttgcaaaatagggagaatttga

SEQ ID NO: 247788 - DNA, 2013 bp, Klebsiella pneumoniae
atgaacgccctgcgcagtgggatccagagttatgcggcccgcagcggggacaccgccagtctggtcaatatggctaacacatcatcccttgaaaagcagcggctggcgcaggccacaatggggcaccaggcgcttcgcacacttccgctgatgcagaccgttatcatggggataatgattgggatgttcccgatcatggtgatggctgccatgtttaacatgatgacgatgcaggtgcttaaggggtatgtgtttgcgcttatctggctgcagacgtggccattactgttcgccatcctgaacagcgcgatggcctactatgcgaagcaaaatggcgtgccggttgttctctctgagttgtcgcaggttcagctcaaaaactcggatattgcgaccaccgcgggttatattgccgtgatgataccgcccttgtcgtgggggatcgtgaagagcatgggggccgctttctccagtgcctacagccatttttcttcttcggggctcagtgcaacatcgcaggcggcctccggcgtggtggacgggaattactctttcgccaacatgcagatggagaacgtcagcggctacagctggggtaccaacagtacaaccagtttcggacagatgtcgcggcagctggcgaatgggggtatgagcacgcagacgcgggatggatcgatggtctgggacagtggtggtgcaatgtcaaaactgccggtggatatcaacgtcggtcgtcagatagccagtgcgcagcaacagatggcccgtgaggctgatgtccaggccgaaagcgcgctgcatggctataacagcagcgtgacaagtgcctggaatagtctgcagcaatttggcaccaataaagggaacagcgcctcaacaacgaccggagctgatactaccgagtcttcacaggatttgatggccagaagcaagatgtggaatgcggttgttgctaatgcgaaagccaacaacatcagtaatgaggagtctttccagcagttgatggatgagtcaagaaaaagaacaatatcgggtgagttgtatggcggtgctaaaattgactcttctgatgcagctcttggtaaattaggaagctgggttaccggaggcagtatatatggaggtattaaggtggcagctagtggagccgccactacggggtcaacggataatgttgggcgatcaggtaggcattcagaagacaatcgccatgatatcagtagtcaggcggcgaaagactttaaagaagcttcggattactttaccagtcgcaaaaccaccacatcgggtaattttaccgataataatgccagctcgcgtgttgaccagtttgccgcgtcactctccagtgccaaaaacagctatgaccagtatacaaccagccggacacgcagccatgagtacagtgagatggcgtcacgcacagagagcatgactggccagatgagcgagaatctcactcagcagtttgctaactttgttcagcgtcgcgctccacaggatgccgaggccattctgaccaataccagttctcctgaaattgcggcgcagcgtgaagccctggcgcgtgaattcgtcaaagagcaggtagaacccagggttgatgctgcatatcaacaggggcgtgaaagcatcggacagaatatgacaggggtgtcaggaggtggagacaatggttcggtaatggccgactacggacataattccgcccgtatcgatgcgatgacgcaacgggcagatattaaggataatgtgggtcagaaagtggatgggatgattacagagaataaacaacagcatcagaaaacccgtgaaaacatacaacagcaaggtgttgaggtgaaaaaagagaatgctgacctggaaaaagaccacaaaacaaaacaaaatgatttcaaaaattcttataatgataagaacgaacatcaaaccagactgcctggcgcggattcaactaaagagctactggataaagcaaccaaattagaaaacgagaaatcaaagagatag

SEQ ID NO: 247789 - DNA, 228 bp, Klebsiella pneumoniae; identical to SEQ ID NO: 213970

SEQ ID NO: 247790 - DNA, 231 bp, Klebsiella pneumoniae; identical to SEQ ID NO: 213969

SEQ ID NO: 247791 - DNA, 876 bp, Klebsiella pneumoniae; identical to SEQ ID NO: 213968

SEQ ID NO: 247792 - DNA, 174 bp, Klebsiella pneumoniae
atgatgtacgccatcccttatgcgctgatcgctgttggggtggggttctttgttgccggagtgacattagcgatccgcaattttttcagttatcaccttaagaccctttttattctgagaaatgacagagttaaaaagaatgctgtgcgtaatggaggacaggatgcgaattaa

SEQ ID NO: 247793 - DNA, 294 bp, Klebsiella pneumoniae; identical to SEQ ID NO: 139644

SEQ ID NO: 247794 - DNA, 600 bp, Klebsiella pneumoniae
atggatattctggagaaactcgccacactccaggcggccaccaaacggtcgttgtacgaagccattctgtatccatcgtctgaaaacttcgtgaagtatttccggctgcagaactactggacgcagcaggcaggtttgttctcgatgagtgcgaagaaagccatgctggaaaaccccgaactcgattacaacctgcagtacagccactacaacggcacggtaaaaaaccagctcgctgccgactatgccgaacagcgacaggctatctccaccctcgcacagcactacggcgtgatgttcttctaccggggccgggaagcgatcgatggccagctggtccaggtgattaaaaattttcgcgaaacctatggcctgagcgtgataccggtgtcggttgacggagtgattaaccccatgctgcccgacagccggacggaccagggccaggcagagcagcttggcgtgaagttcttccccgcgatgatgctggttaacccgaaaagtggccaggtgaagcctctcagttacggctttatcagtcaggacgacctggcgaaacagttcctctatgtctccagcgactttaaaccgaatttctaa

SEQ ID NO: 247795 - DNA, 234 bp, Klebsiella pneumoniae
atgagcattcgagctaagtatggattcggacctgtgactgtagaggttaattggctagataagtgccctaattgcaacaacagaacagttagagtcaccggttggtcaaccactccagaagctctatgggctggcgataaagctgagtgctcaaaatgcggccataaaggcgagattgatgccgatggtgacaatgcctgggtggaatgggacgaaatcaaggaggcccaatga

SEQ ID NO: 247796 - DNA, 303 bp, Klebsiella pneumoniae
atggataagaaaaatagtgacgacttggtgtattcgaaggtgctgatccagaaaattgtggaacataaagatatgtttggggttcctgacagtaaaagagatttgcaggttatgccgctaagcgaataccgggaactggttaagagagaggctttcttttttgtggatcacaatggcttcctgcgtcatcaattctctggtgatgttatggccgccagcaaagaacaactggatatccttatcgaggaactgaaagcaaagagtaagctgcttgatgatgctctggattgtgccaaggaataa

SEQ ID NO: 247797 - DNA, 1803 bp, Klebsiella pneumoniae
atgagttacttcggtctgaacccagtaaatcaaaaccaacaactggatgatgctgtttcaaacccggcagggtttaacagtgacgttggtttctttgataatacttttggtgcagcggcatctggcctgtattccggtctggttgccaagccagatcagcttctctgggctggaatggataagttagtgtcaccgatcgcgcagtttgttaatgacaacacgccgataaatgacacttcggcagcttacattgcggagcaacgaagcctggcgcagcagcaagtaaagcgtcttacaccagatgctgctactaccggcactgcaggtcaggttctttatggcctgtttgatatgggcgggcaggcagtggtcggtactgctcttgccggtcctgctggtggtgctgccgctgttacatcacttcaggggttttcagagtttgagaggctgaaagccgagggagtagattttgggacagctcaggaagctggcttgatacaagggatcactgctggcgccggcacacttatcccaatgagtctaggattgcgcgctggtggtgctttagctgaaagtgttggctcgcagctggctagaaccggtgaaagcgctatcagaaatgcagcggccactgcagccagggctgcaccagatattgcctatgccgccggaacaaacatcgcattcggaatggcccagcgagggctgacggcacaaactttgcgggctggtggttatgatgaaatggctagccaatatgatgtttttgacaagcaggctatagcgattgatgccgttttaggtgtcgctttcggtgggattggaagattcatgaattctcgtggtgaatcaatgagcgccccggaattctcaccaattgaagtagatgcagcattatcggctaatgcctctcaccatgcagaaattgatgttgctcctggcgtaccagtcaatgttctttcccgtgatgcgcacatccaggctttgcagaaagctatgcgtgatgtcagtgaggggcgcccggtagatgttgctaacatcgcagagccagcatccttcagtgatatccctgggcgcaaaaaccttatagcccaaacgattgatgaagcgttatttaatgcagatgaggggagcgcatccagagcggttgaaacgcgcattctcgaagagcaagcatcacaagttattagccgaggagagcggaaggcactgcaatcagagatcgctaatggcgagcgagtgctgcaaaagttaagggatgagagaaatgctgttgtggctgaagaggtttcaggaagtggcgctgctctttccaggaccagagcagaaaaacaatcacgcttacgcagtttagataagcggataaacgaaacatcttcccgactacaaaccgctaaagagagtctggcaccgcatgagcctggcggtgctaattatgaggctagggcagaattggctcgtcgccagcaggcagagagcgatctcaatgcccaggcgctttcattctataaaaccgctgaggttcgaaccgctgatgaggtggcgccgtttgatacagccacatcacttcgacaagtagagcagaaaccgacggccgatcaggctggagatatggatttacgcattgccgaggattctctaagcgaatcgccagacatgatgattactgttcttgatgacgatggtaacccgcagtcccgtagtgcgcgcgaggtgcttgacgaggccaatagagaaagcgaacaggcaatgcaggactcaagcctattcgatgtggctgtgacatgtttcttgagaggttaa

SEQ ID NO: 247798 - DNA, 672 bp, Klebsiella pneumoniae
atgaataccaaaccttcagttttttctttcgagtcaagcagtcaaatccgtgcagttattatcaacggcgagccatggttcgtagcagcagatgttatcaaagctctgcagttgacgaacccaacgatgtcaatgaaagctcttgatgaagatgaacgatctaagttgaacttaggccgtcaggggactgcaaacataatatccgagtccggactctacaccttaatccttcgctgccgcgacgcggtgacgccgggaaccatcccctatcgtttccgcaaatgggttaccagtgaagtgcttccgcagatccgcaagacaggtcgttacgttcgcgaagaactatccccggcggataaagctcagaaggttgtggccagctttatgccagccatcctggaggcaatgaaggaaggggataagccttcatacagctacccactcaagccaggataccgtgagatgatccactgccctgagggtgttgtcggcctggctgagaagtcactactgatgaacctactgcagcagcttgatgaagatggtcatgacgtcgccggcgccgcggcagaattcacaacaatggtgagctatattgttggtgttagccgatgcctgcaagacatacgcagccacgcgcagtacatcaacaagaacgcatctgagttctga

SEQ ID NO: 247799 - DNA, 411 bp, Klebsiella pneumoniae; identical to SEQ ID NO: 203205

SEQ ID NO: 247800 - DNA, 483 bp, Klebsiella pneumoniae
atgactgccgaagccattctggcgctggtgaaaaggttctggttgccggtgctggttggtttgcttggtggcgcactggccatcgctgccagccattacaaggaaaaggccgagcacgaagcaacccgcgccgataacgcagagctcaatctgaagctggctaacgccaccatcaccgacatgacaacccgccagcgtgacgtcgctgcgcttgatgccaaatacaccggagaactggcagatgctaaagccactatcgatcagcttgagcgtgatgttgcttctggcaagcgcaggctgcagctcaacgccagatgccccgcgaacggagcgcccagcgccggcgccatggtcgatgcttccggcccccgacttactgactccgctgagcgggattatttcaccctcagagggcggatcatcaccatcaccgggcaagtgagctacctgcaggaatatatccgcacgcagtgcctgaaatag

SEQ ID NO: 247801 - DNA, 699 bp, Klebsiella pneumoniae
atgactgagcgcgggatgatttttaacgctgagatggtacgtgccattctcgccggtcggaagacgcagacgcggcggattatgaaggtgcagccatccgaagccttcacgcccatgaatatggcgcttgaaaccgattataaggcgcgctggtacacaccaggcgttgtcgataaggacggttatttgcagccagccagtaaagaggtttttggcgtctccaatgaaaatgaagggtattcatgcccgtttggcgcagtcggcgaccgcatctgggtgcgggagacgttcaccgggcattatctcgacgatgatcaaattcaggacatcaaagatggtcgagataaagcgagcagcctttgtgagtaccgcgctgattatcctgatggctatcaggcggctgatggatggacgccatcaatccacatgccgcgctgggccagccgcatactgctggaaatcaccgacgtgcgggttgagcggctgaacgctattagccaagaagatgctcaagctgaaggcatggagcttaccgggtggcggcctacatactctgacccggatagcggcggcgaggttatgacgccatacgacaactttgctgagttgtggtcatccatctacggcgaaggaagctggaaggccaacggttgggtttgggtgatttcgtttaagcgcgttgaaggcggtgcagcatga

SEQ ID NO: 247802 - DNA, 345 bp, Klebsiella pneumoniae
atgccggttaaggcgcaggaggagctctgtgtcactctggtttgcgttctcgtcgtaggcaccttcccggtatatggccagccagtaatcgcagtcctgttcaatctgcccggtgtcgcgggagtcgctcggcaaggggcgcttattggttcgcttctcaagctcacggttaagctgagtcaggagaactacgacgcaatccagctccttcgccagggtcttgaggcctttggtgatcagcccgtaagcgaggtcatttcgctctgctttatcggcagtcatcagcgtcaggtagtcaacgaggatcattccgaccttgccgcgttcgcgtttgatgcgacgtga

SEQ ID NO: 247803 - DNA, 1227 bp, Klebsiella pneumoniae
atgaaaattttaatttatgggataaattttagtccagagttgaccgctactggtaagtattcaggcgaaatggctgaatggatggctagagaaaaacaagatgttagagcagttactgcaccgccttattatcctgaatggaaagtgaagtcaccttattcttcctggaaatataagaaagaaatcatatcaaacgtaactgtctttcgttgtcctctgtatgttcctaagaaagtttctacgttaaagcgattaatccatttaacatcatttacactttcatctttccctcaactttttaggaattttttttggaaaccagatcttgtaatttgtgtggcaccaactttgttttgtgttcctttcgcaaagttattttcgaaagtgacaaaggcaaaattaattattcatatacaagattatgaagtcgatgcaatgtttggcttgaatcttgctaatacgggggggctatctaaactagctcgtagatttgaaaagtggtgcttatcaaaagcagattttgtgtcaacaatttctaatacaatgattgacaaggccgtatcaaaaggtgttaaaagacaaaatactatttttttccctaattggtctgagttagacaaattcaaaaatattttatttaaagatatagaggaatttagagaaggtttgaacttgccttcaaatcgaaaaattattctttactcggggaatgtaggtgataaacaaggattagaaataatacctgatattgcttcaaatcctgcattttcagatagtatttttttgatcgtgggtgaaggcgctggtaaaaaacgtctcgaagagaaagtactcagcagtcaattaacaaatgttttatttcgtcccttacagccttataacaaattaccgctattgctaagtatggctgattgccacttagttattcagaaaagaggcgcagctgatgcggtgttaccttcaaaacttacaaacatcctcgctgttggtggtaacgctattattacagcagaaattcatactgaactaggtcagttaacaactaactatcctggtattgcagtacgagttgaaccagagtgtgatgtttcacttacggaaggattaattcatgcattatcacttcctaaattcaatagcatagctgtgtcttatgctaataaaatgcttgataaagaagtgatcctaaatgaataccttgaggtaatatctagtaaggttaactaa

SEQ ID NO: 247804 - DNA, 525 bp, Klebsiella pneumoniae
atgagtaatatttctatagaaaaaggaattaaagatgcagtaaatactacctttatgctaagagaaaaaggaattaatgcaaagttaaagataggtggtgtctgtgataatattgaaatcgaaaattatttgaaggacacaataaaatcaaatcctagttattttaaatttgtcgggtttgttgacaagaatagtaaactggattttttcaaagaacttgattggtttttattcccaacaagatatgttaatgaagctcaaccgaatgttttatttgaatcaattgccgctggagtaccatttattacaattgaaagaggatgcattattggtgattttccggattatccttatgtaatgagggaaaaggaaaattttccagagtttgctacaaaagctattattgataatatcactccttattcttatgaaaaaaatagggcagatctagttttgaaagttaggcatcaattgaatgatgcagaacgaaaagaaaacgcaatgtttgaaaacattttaaattaa

SEQ ID NO: 247805 - DNA, 573 bp, Klebsiella pneumoniae
atgactaaagggataataggcaaagcccttgttaaggcagtaatgtctttgcgggaattatattatacaactattaatcgaatcttcttagggttaatctgggatcttggtaagtcttgtacttttgaaggtgctatatatgtgccagctgtcaaaggaaatgtaaaagtaggcaataatgttagattcggcccgtttgctagaattggcgctacagaaggggcaaaaataattattggtgataatgtcagcgttaatcaaggaagctttattatatctagggaatctatagttattgggaataatacgcgggttggagaatatgtttcaatccgtgataatgatcatgaatggagagataaaaatacgccgattttaaagcaaggattcattacaaattctgttgagattggaagtgatgtttggattggaagaaatgtcgtgatctgtaaaggggttaaaataggagatggcgccgtcattggcgctaatgcggttataacaaaaaatgtaaaccaatacgaggtagtagtcggaaatcctggccgtgttataaaagttagaggtgaataa

SEQ ID NO: 247806 - DNA, 345 bp, Klebsiella pneumoniae
atgagtcattataataattatgatgttttagctaatgaagtaaagatacaggcaaaaaaagaaaatattataaattgggatgatttgtcatggggtagaggggtttcatttaaaaataacaatcatataaaaaaagataaagacatgggagcgcattttcaacaattatcaaaggttattatatatagagagtgtttccctaatctcagtaaatcattactttatttggcggtcataaaaattatggaaagttcattcttcactttgaatgtagaaccacatattgttaatattaattctgaggttatcaacaacattttattcctgtctcttatacacatctga

SEQ ID NO: 247807 - DNA, 765 bp, Klebsiella pneumoniae
atgaatgactaccttttagtcatgctgatgatatattcggggcgaagaccaatgcagatcgctcaattaaaaaggaaggatctttatatcaaagaaaatggtaattttttaaacatacccagattaaaacaaggagatagtttcagaactgatttttccgaattgcgtataggggataatttgttcaattcactatcagagcttaaatcagtagttaaggtttttgtgcagggtgaggtaggcgatatattaagtgaagatgaattaaacaatttacccctctttattgatccttgtttttttaactcgacttacaaacttgataaattatatgaaaataacttcttcaatttgcatatgagttctaagaggataaccggtagggttcaggccatttgccaaagggtaagtaaagataaaaataaaaagattaactctcggcaacttagggttacattagccacaaggcttgcacttaaaggttatggattaggtacgatagcaaaagctttagatcatagcaatttgaaatcagtattgtcgtatgcaaaaaacaatgaagagttttcattcagaatagatcaggcaataaatgagttagtaagcccttatatttcctcatttttaaaaaacagtgacgacattacccttagattggttgacgatttgataatcataaaaaagcttactggagtattaatagcagattatacgaagcaagcagactttgaaatcctaacggacttattcacaatgttagaatga

SEQ ID NO: 247808 - DNA, 240 bp, Klebsiella pneumoniae
atggtgatgcaggacgggagaacccataaacaaatttgctcacttttcaaacgcgccaacaaagattcgttctggtgcaaaaacgtgcttagcccgtcgaaacttcgggaaaaatgggatgagctgtcgttaaaactttctgctccactcaatagctcccgccaggagtcgtccatttcgcgagccagcttcgatggggttgattactcattgccagaaaactcggggttccgcacatga

SEQ ID NO: 247809 - DNA, 144 bp, Klebsiella pneumoniae
atggcctcgatcgcctttttcttcggcatcatgcggccgcaggccagcttcacggcgtcgatagccgcttcaaccatcgggtgcatattctctgccggcgccttgaagccgttacccgtccagaggcatgtctgcttcgtgtag

SEQ ID NO: 247810 - DNA, 369 bp, Klebsiella pneumoniae
gtgctgaaagattgtgccggccagccggagctgatcttcatcgccaccggttccgaagtggagctggcagtggccgcatgggacaaactgactgccgaaggcgtgaaggcgcgcgtggtctccatgccgtccaccgacgcgttcgacaagcaggatgccgcttatcgtgaatccgtactgccgaaagccgtttctgcccgcgtcgcggtagaagccggtatcgcggactactggttcaaatacgttggcctgaacggcgctatcgttggcatgaccaccttcggtgagtctgcgccggctgagcagctgttcgaagagttcggcttcaccgtcgacaacgtggtcgctaaagcgaaagcgctgctgtaa

SEQ ID NO: 247811 - DNA, 1305 bp, Klebsiella pneumoniae
gtgacgcatcaggatgttctgctacccattacctcagtcgcgtctgctagctttgtcggggaggtactgccgctgctcgccgctggcggtaccttagtattggcgcaaaaagcgcagagtttggatagtgatgcgctcattgcgctgctggcatctcagcgggtgactatcctgagcaccaccccatcgctttctgccagcctctctgtgctggctcagtcgatgggatcgctgcgcttgtttctgtgcggtggtgaagcgttagagtatgagcagatagcgccgcttctgccgcacatggcagtggttaacggttatggcctgaccgaaagcggtatctgctcgacctactttcctgtcgcaaagcgtagggagcaagaaacgggagcattgcccattggccgcccgattcagaacacccaagcttatgtggtggatgcatataatcgtttggtaccgccaggtgcctgtggagaactctgtttctctggtctgggcatttcgcccggctaccttgatgcacgacaggatcccgagcgctttgtcgagttgccggaataccctggcgttcgggtgctgaaaactggcgatcgtgctcgttgggcaaccgacgggatgttgttctatctcggcagacaagatcgccaagtgcagatccgtggataccgagttgaactgggcgacatcgaaagcctactgaaacagcatccggatattgctgatgcgtgggtcgatgtgcgacgcaatgcggcggcaacgccgctactagtggccttctattgcagcgtcaacggcgttgcgctggatgctcagcaattgcgcgtatggctcagcctgcggcttccgttgcatatgctgccgttgctctacgtgccgctgagcgccatgccgctaggtgtaaacggcaaaatcgatccccagtgcctgccgctggtcgatctgcggcagttggaagggccgggcgagtatgtccctccggcaaccgaactggaacagcgtctggcggagatctggcagcagttgcttggcctggagcgtgtcggcaccaccacaaatttcttcgatctcggtggacactcacttctgctagtacagatgcagcaatacatcgggcagcagtgcggtcagcacgtggcgttggttgacctgctgcgcttcactaccatcaaacgcttggcggaatttctgctggccccggacgcagcgcaagggaccacaggagatcagacacaactgcgtgcggcgaagcagcgtttggcctttggtcacacgcgctgggcagccacaaccgacagtcatcactga

SEQ ID NO: 247812 - DNA, 1152 bp, Klebsiella pneumoniae
atgataaaaatcggaaacgcaaaacggtcagtgatggccgtttcaattctggccttcagcgtacagtcagcatttgcctatacggtcaacgttaacagcagcattcccatctcaacgcaggttatgccggcgttgagcacagctaatggcctgttaggtaacatccaggccacgctgattaacattggtacggcaatcagccagcagggcgatcgccaggcagcattaatgcagcaggtggctgaaactaaccgacagttcgaagtcgagcaaaaacgtaatgaccggctgctgcaggcacaggataagtaccgtgttccggatgatatttgtgcgcagtctattggcggtggtgccgcgggggtatcctctgcggccgctggcggtcagcgaacgctgggaagcgccagttctgcgaaagatgtaaaggccatttttgaagtgccggcacgcgcaaccgacgtggacgcttcttcaacggccgaagttcacagccagtattgcgacagttcggattatgctgcatttggcgggacttcattctgcccaagtgtatctgacatgccgcgggcagatacgtcgctgagctcgttgctttatggcgccggcaaagaaggcaaggcacctgatctgacgtttacagatgagcagacagatgcggcgctgcgttatatgaaaaataccgcgttgcgcagtgctggtcgtcagctgagtcgtggggaagttaaaggcgccagcgggcgaatttacctgggcatgattcagcaataccaggcgctcaccgacgcggccgcacaacctcagatggaaatgatcgccaactccaaaccgaacccggccactgatgccgcgcttgcagatgcacgcaaagtgccggaagtcgaatcctatttccaggcgacggccagtaacagggcgaaacagcttaaccgtatgtctgccagagagtttgaggaattcgaagtaggtcgccgttacagcaaccctgcttaccaggcgacgttgaccaacaagaacaccgaagatttgatgcgtgagcaaatcaatatcgccaatctgaacaactggttagtgctgaaaaccaaacagcagctggagaaacaaaatgtgctgcttggccagatcctggcgaacgacgcatatcaaacatag

SEQ ID NO: 247813 - DNA, 159 bp, Klebsiella pneumoniae
atgtttaatacggattcgcttgcctggaagtggcacattccggagctggcccggcagatttatccgtgggtcagctggctgtaccaggagtattacggtctggccggggctttcctagttatggggtttgaggtccaaccgtacgaaaacgtacggtaa

SEQ ID NO: 247814 - DNA, 480 bp, Klebsiella pneumoniae
atgccgggaattatggttagcgcagcattagccgcgtcgatggtgccttcctatggaagcgtacctcagtaccaaattgcttttgaagatgctagtcttaccagtagaccatatgaaaaatttaccagtctgccgctggataaagagaccgaatcacatggaagcagtgtaaacttggaggccgatgtgagctcagcaagcagagaggagatcgacgcaaaactggccttgacaaaggctgagattgaactatctcaggctcataacttttcgtcaattgaaaagctattgattgaagttaaaggagaaatagcgtctttacggggagagctgtctggtaataaagatgctgtctctgggcaaatagacgggctaaaaacatctatttcaacgatgcaatggatggtggggactgttcttgccatgatgggtattgctgtcgctattttagccattcccggaatcgataaactcctgtga

SEQ ID NO: 247815 - DNA, 288 bp, Klebsiella pneumoniae
atgattgccacgctggatagtttcatccccgaagatgcgcaagcgtcccagacgtatcctgttaatttagtgctcatgatcgtcctttatttctctgaatttacgtctgaactgctcaagggggctaaagcattcatgctcgtaccctttacgcaggtatataacgcgctgtgtctggggctcccagcgtatgaccctgaccgggacgccgtagtgatctctgaaccatcggttgagctctcgcatactttctccgcctggccgttgaagtcccctaccacccactga

SEQ ID NO: 247816 - DNA, 312 bp, Klebsiella pneumoniae
atggctgaataccagttaagttttgatggttttgttcgacttttttttgcaatggcaatcattatttgcggttacggctatgtaattattggtgtttttataagagatacgcttgcctgtattttaatgttgtttgggcttgcaggtctcagtgctttattttctttcatggtattcatggataaaaatatgtgggccggttctcctgatttgacgctgtcagtaataacgggatttttttcagctacagtgatcttttatatgttttatgtcttgatttattactttgatcggatgggggcgggtgaatag

SEQ ID NO: 247817 - DNA, 219 bp, Klebsiella pneumoniae; identical to SEQ ID NO: 246685

SEQ ID NO: 247818 - DNA, 1089 bp, Klebsiella pneumoniae
atggagcgttacggcatcgagaaaacaacgaaggcgatcgagttgctgtactcccgcaacgggatgacggcagagcagaaattcgatgctattcaggggctgttcactgagataaccgagcacgtaaaaaccggccggcggacaggccttcgcacgttctacgacgctgtcactgactggtcagcagaattcgacgaaaggctcaagccggatggtcgttcccgcgggttgtcgaccgggatccgctctctggatgagcttctcggtgtgaaacgcattgtgcgtggcagcctgttcgttatcggcgctcgcccgaaaatgggtaaaaccacgctctacacccagatggggatcaactgcgcgacggtcgagaacgagcctgcccttatgttttccctggaaatgccggaggggcagatggtcgagaaaatcaccgcccagaaaagtcggatctcgccaaacctgttttacccggacatgacgaaggacgactacgggtatcagggagactggaatggcgacctgaaaaaagctactggcgttatgggcgccctgattgataccaacaacctcctgattgacgacactcccggtatttcactggcgcacgtcatggctgagtcacgccgcatcaagcgagaacgcggcaaggtcgggatgatcctcgttgactacctgacgctgatgactgccgataaggcagagcgtaatgacctggcttacgggctgatcaccaaaggcctcaagaccctggctaaggagctggattgcgtcgtggttctcctgactcagcttaaccgtgagcttgagaagcgaaccaataagcggcccttgccgagcgactcccgcgacaccgggcagattgagcaggactgcgattactggctggccatataccgggagggcacctatgacgagaacgcaaaccagagcgacacagagctcctcctgcgccttaaccggcatggtgagactggggttgtctattgcgagcaacgacacggggcgatttatgactgcgatcaggaggctgccagtcagcgccggcgcgagaaagaggaaaaaccaaccaagcggggtggattttga

SEQ ID NO: 247819 - DNA, 219 bp, Klebsiella pneumoniae; identical to SEQ ID NO: 139604

SEQ ID NO: 247820 - DNA, 993 bp, Klebsiella pneumoniae
gtgaaaaccctgacgcttttcctgagtgccctgatgttgtgggggtacagcctcagtgcggctgctgacccctcctgtgagggccggtttgttaacccgatcaccgatgtgtgctggcgttgcatcttccctctgtcgctcggcagcgtgcaggtcggtaaaggcgatctgcctgataccagcaatccgggtagtcccctgcaactgtgtccggcgccgccaccgctttttgttcgccccggcctggccatcgggtactgggagccgatggccatgacggacgtcagccgttcgccaggctgtatggtcaatctggggggcttcagtatcaatctcggcaagaccggcatggggaccgcgagaaaggatgacaagcaggttaacggcgctttttatcacgttcactggtacaagtacccgctgacctactggctgaacatcatcacctccgcaggctgcctggaaggcggagacatggatatagcctatctgtcagagattgacccgacctgggtggacagcagcctcaccaccattctgaatccggaagccatcctgtttgccaaccccatcgcacagggggcgtgcgcggctgacgctatggccagcgcgtttcatatgccactcgatattctgttctggtgtgccggctctcagggttcgatgtacccgtttagcggctgggtaagcaacgagtccagtccgctgcagtcctcgttacttgtcagcgagcgcatggcgtacaagcttcaccggcagggacaaattatggagagcatcgggaaggacaaggcggtctgctatgagtatccgtccccgatcatccccaaagagcgctggcgctatcagatggtgaacatgtacccggacagcggccaatgccatcccgtggggcgcagcgtgatgcgctgggaggccggtaaaaatccacccaacacccgtaagaactatggctatctgatgtggcgtaaacgcaattgtgtctttctctga

SEQ ID NO: 247821 - DNA, 993 bp, Klebsiella pneumoniae; identical to SEQ ID NO: 213942

SEQ ID NO: 247822 - DNA, 645 bp, Klebsiella pneumoniae
atgttcagatatttcattctgcgccctgagcagcagttattctgttatttatacggctgcgcgctggcactggttcagatggttttattttctcctgtatcccgggcaagcggattttatctggttgcgttatctgtcgcgctgttctgggccggtctggccctgtacacccggcacatcgaccggatgagaaagccagaggtctcaccgctggtcagtattcgcgacggtattcaggtggtggccgaggtgccgcgccatgaaaaggcccggctggaatgggaaatcctccgggatgatgaggtgtttcgccagcaaaggtgtgagcttacaggcctgaccggacgggttatcagccgggggctgttgtatacgccggcggtgatgctggtcggtatcggtattctcgcctggggttccccacaggatgccatccggctgattaatgctcttcgtaatatgcctgctgcggaactggtgcatcagattggttttgtcctgcgccacttcctgcagattagcgtcatatcagttctgattgctgatgttgtagccgggagaggactgccgaatgtatttcgccgcgcgttgctcgacaggctgccggcagagttctgccttatcagaagagggacagaaagatga

SEQ ID NO: 247823 - DNA, 180 bp, Klebsiella pneumoniae
atgacgtcgatccgtgcctggccggcagagaaccgcgtggatatccggggggagctgaaaacgtggattggggattccaaaccctacagtgaaattaaaagctatgtcattcagttcagtcgtgtcgatggtgtcagctggctggcgcgttttggagaaataaataatgaaaaaaattaa

SEQ ID NO: 247824 - DNA, 282 bp, Klebsiella pneumoniae; identical to SEQ ID NO: 61246

SEQ ID NO: 247825 - DNA, 705 bp, Klebsiella pneumoniae; identical to SEQ ID NO: 8686

SEQ ID NO: 247826 - DNA, 399 bp, Klebsiella pneumoniae
atgtcggagttcctttgttccgcttgggggctgggtctgtttatctccgcgtttctggtcgaggagctgagcgccgggctgcacgcagtccccggcgggcagcgtgaagccgccatccgccagggcttcacccccgcgcaatcgctgcgctggatcctgctgccgcaatatcttccttcgttgaccgggatcggcatcaacctggtgaaagacacctcgctggcctttattctcaacgtgccggagctgaccacgctggcaggccaggttaataaccgggtgcaggtctatccggtggcgctgtttgcgtttaccggggtggtctattacctgttgtgcagcgggctggcgtatctgctgcagcggcgtggggtccgcgcactgccgggcagattgtaa

SEQ ID NO: 247827 - DNA, 1404 bp, Klebsiella pneumoniae
atgcctgcatcaagaaatgaatcctcagcgttaggcgacggtttatcgaatcgccaggttacgatgatttccatcgccggtattatcggggccgggttatttatcggctcggcgaatgctatcgccaccaccggtccggccatattattatcttatgcaataaccggggtattagttttattagtcatgcgaatgctgggggaaatggcggtattaaaccccgactcaggctctttttcgacctatgccaccaaggcgctcggcccctgggccggcttcaccataggctggttgtactggtggttctgggtgttactgatcccgatagaggccattgccggtgccaatatcctgcacgcttattttgatgtgatcccttcctgggtctttaccgtcgccattatcgccttcctgaccgtaaccaacctgtttaacgtgaagaacttcggcgaatttgagttctggttctcattgatcaaagtggtggcgattatcggctttattatcgttggtgcgctggcagtgttcggcttctggccactagctaaagtcagcggtgtgagtcacttatacgatctcggcggctttatgccccacggttttggcgcggtgctgaccgggatcctggtcaccatgttttccttcttcggcgcggaagtggtcactatcgccgccgtggagtcgaaaaacccgggcgagaaaatccgccgggcaatcaatatggtggtgtaccgcatagcgctgttctatatcgcttctattttcctggtggtgtcgctggtcggctggaacgatccaggcctgaaagaccaggggacttttcagtatgtgctgaacacgctgaacctgccgggtgccggattgctggtcgatatcgtggtgtttattgccgtctgtagctgtatgaactccgggttgtataccgcctcacggatgctgttctccctcgcccgccgtaacgatgcgccagccgcctgcgcccgggtatctaaaagtggcgtaccgcgcgccgcggtgatcgcctcaacgctggcgggctttgttgccagcgtggtcaactacgcgttccccggcaaagtgtttgatttcctgatttccaccaccggggccatcgcgctgattgtttatctggtgattgccatttcacagctgattatgcgccgccgctcagagcggaacggcaccccgccggatttcaaaatgtggctgttcccgtggctcacctgggcttcgatcttcatgattctttcggtactgggctatatgctgatgctgaacgactatcgcgatcagggtctgatgacgctgggcgtgacgctggccattctggtggtgagcctgtatgtcacccgcgacagaaaccgcctgccgcgcggcgcgttaagccgcaacagcagttggtaa

SEQ ID NO: 247828 - DNA, 936 bp, Klebsiella pneumoniae
atgcgaaaaataattacggctcaggttcatgcacatttacaagttttcgcctgcgcggcgcggcatctttcatttacccgttgtgcagaagagttacacgtcacgcctggcgcaatcagtcagcaaatcaaacagctggaagataagctgggatttatcttatttcaccgcgtcggtcgaggattagcattaaccgcgcagggccagcgactggcgctggtagccaatgaaatacatgaacgggtggtcgatgaactgcggattttaaattcatccggtattagcggcgtatttcgtttgcgctgcattccctcgtttttgaataaatggctgatgccgcgcctgcccgtgctggccagggccttccctaatattgagctgcggattatcgccgaagacagtatcgattcgctgcgtggcgaagagtttgatctggcgattgatttaaatgacggcagctatgctgggctgctgaccacgccactgtttgaggaagaactgttcccggtgtgctcgccggaactgctgcacggaaggccgccgttaaccgatgccagtcaactggtgcactatccgctgctgcatgatatcaccgcctggcgcgggagttatgagtatgcggagtgggagttttacctgaaagagatcggcgtgaaggacattgatgtgcgtcgcggccatacctttaaccgcaactatatgaccattgaggccgccaaaatgggcatgggtgtggcgattgcccgcaagtttctgatccagaaggaactggatgaaggcacgctgatcgttccttttggccagcgcatcagcgccaaaaagcgctatgtgatcgcctggagcgacggcacgctgaacaatccggcgaaacgcgcgatcttcgactggctggttgagcaggcgaaaattagcgagcagcataacaacagccattaa

SEQ ID NO: 247829 - DNA, 1377 bp, Klebsiella pneumoniae
atggcaatcagcgtgtttgatcttttcaaaattggcattggtccttccagttcacataccgtcggcccgatgcgtgcagcggcgttatttataaccaaactgcaggataatagaatattagatcaggttgagcgggtggaagtgcgtctgtatggttcgctatcggccaccggcgtcggccacggtagcgatcgtgcctgcgtgatggggctgatggggctatggcccgaccgggtggatccgcaccaggcctcgcgggatgtcgacgcggcgatcgccagcaatcgtctgctgctggctggcgatcaggaaatcaactttgtctggcagcgcgacatgttgctgctcgatgagagcctgccttatcaccccaacggcatgacgctgctggcgttgttaaagcagcgtgcgtacatcgaacaaacctactactccgtcggcggcggttttgtgctggatgccgaccaggtcgccagcggcgtactggacagtgacaacagcgaactgccgtacgatttctcctcgggccgccaactgctggctctgtgccagcagcatcagcttagcatttccgaactgatgctggccaacgaacgggtctggcgcagcgagcaggagatcgaccacaacatcgctaatatctggcaggctatgagcgactgtattcagcgcgggctgtcgcagccggggatcttgccgggcggcctgaacgtcaagcgccgggcgtttgagctacatcagcaactgctgacggtgtcgaaatcgaacctgatcaccaacactttgtcggcgatgcagtgggtcaatctgtatgcgatggcggtcaacgaagaaaacgccgccggcgggcggatggttaccgcgccgactaacggtgctgcggggatcattccggcagtattgtattactacatgcagttttcatcggatgccacggtgcaggatgtgaagaaatttttcctcgccgcggcagcagtggggatcctgtgcaagaaaaatgcgtcgatctcaggcgcggaagtcggctgccagggcgaagtcggttccgcctgcgcgatggccgctgccgggttgaccgaagtgctgggtggaacaccgttacaggtggagaacgccgccgagattggcctggagcacaacctcggcctgacctgcgacccggtaggcgggctggtgcagatcccctgcattgaacgtaacgccatcgcggcggtgaaagccatcaacgccgcgcagatggcgttaagcggcaacggcgagcattttatctccctcgatcaggtgatccgcaccatgcgcgacaccggcgcggatatgcacgagaaatacaaagaaacctcgcgcggtggtctggccgtgaactatgtggaatgttaa

SEQ ID NO: 247830 - DNA, 1041 bp, Klebsiella pneumoniae
atgatcacacaggaactgcctcacccgttgtcggtgggttttgtgctgctgcaccgctttaccttattgccatttgccgcctttgttgactgcctgcgtctgtcagccgatgagggcgaccgcagccgcccgctgcgctgcaactggacctttatgaccagttccggcgaaagcgcgatgtccagttgcggggccatcatctcgccctgtaaaccgctgcgcggcccgcaggcgtttgattacattgtggtgatcggcggggtacaggaagaacgggaaaaagccgaccagcgggcggtggactatttgcgccaggcagcccagcttaacgtaccgattatcggcctgtgtaccggggtgtttaccctgatccacgccgggctgatgaccgcaaagcgctgctgcgtcagttggtatcaccacggcgatctgacccgccgcttcccggatgtcaccccggttgccgaccggctgtttgttgatgaaggcaacctgattacctgcgcaggcggcgtagcggcggcggatgtcgccgcctatttgattgagcggcatatgggcaaagcctgggcgatgaaaagcctgcacattatgctgatcgacgaagtgcgccgcggcgaacatccgcagccgcagccggtgattttcgatcgggtagaggaccggctggtgcggcgggcgatcgatattatttcgcagcacctgggggaagcgatctccattgaagagctggcgaagcgcatcggcacctcgcggcgtaatatcgaacgcaagttccaggatgagctgggcgtcggtccgcagcgtttttcccgcaacctgcggctgcgctacggcatgtggctgctgcactatactgaccgcagcattaccgcgatcagcgagcgctgtggtttcgccgactcggcccatttttcccgccattttcgcgacactttcggttatgccccctcgtcggtacgcaagtccggcaacacgctggcagaagaccaggtcgatcccttctttttacatatcgataaccacgccacaaagtggtga

SEQ ID NO: 247831 - DNA, 1296 bp, Klebsiella pneumoniae
atgaaagatcaccagttgcaacataccgatccgcagcttcatacggccattgttaatgaaatgaaacgccaggaagcgcacatcgagctgattgcgtcagaaaactacgccagcaaagcggtgatggccgcccaggggagccagctcaccaacaaatatgccgaaggctatccgggtaagcgttactacggcggctgcgaacatgtggatgcggtggaaaggctggcgattgaacgcgcctgcatcctgttcggtgccgattacgccaacgtgcagccgcattccggtgcgcaggccaacactgcggtgttgatggcgctggtgcagccgggcgagaccatcctcggcatgagcctggcccacggcggccacctgacccacggcgcggcaccgaacgtttccggcaagcattacaatgcggtgcaatatggcctgaacccggaaaccggtgaaatcgactatgaagaagtcgtccgcctggcggaagaacaccggccaaagctgattatcgccggcttctcggcctattcccgcgtggtcgactggcagcgtttccgggtgattgccgacagcgtcggcgcgctgctgatggtcgatatggcccacgtcgccgggctggtcgccgctcgctgctatcctaacccgttgccgtacgcgcatgtggtgaccaccaccacccataaaaccctgcgcggaccgcgcggcgggctgatcctctcggcactgggcgatgaagcactgtacaaaaagctcaacgccgcggtgttccccggccagcagggcggaccgctgatgcacgtgatcgccgccaaggccaccgccttccgcgaagcgatggaaaaagacttcctgttctaccaggcacaggtggtcgataacgcccgcacgatggcccgggtatttatcaagcgaaattacgatgtggtctccggcggtaccgataaccacctgttcctggtttcgctgatccgccagggcattaccggtaaagctgccgacgccgcgctggggcgggcacatatcaccgttaataaaaacgccgtaccgaacgatccgcaaagcccgtttatcacctccggcctgcgcattggtaccccggcggtcaccactcgcgggtttggtcaggtcgactgtgaaaatctggcgaactggatctgcgatattctcgatgtgctggcgaaaaatgaagacagccaggcgatcgaagataaagtccgtattgatgtcgccaaactctgtagcacttatccggtgtatggcgatgcggtcactacccccgacgccaccaccgtataa

SEQ ID NO: 247832 - DNA, 1251 bp, Klebsiella pneumoniae
atgcaacgttattcaggattcggcttaattaaaaacggcttaacctaccacgaaaactggcagaagttgtggcacaacccggtgccgaaaaaatcctatgacattattattattggcggaggtgggcatggattaggcaccgcctattatctggcgaaagaatttggcattcgcaatgttgcggtaattgaaaaaggctggctgggtggcggaaataccgcgcgtaataccaccatcgtacgttctaattacctgtgggatgactcggcaaatttatttgagcactcgctgaaactgtgggaaggtttatcccaggatctgaactataacgtgatgttctcccagcgcggggtattgaacctcggccatacgctgcaggatatgcgtgatattcagcgccgcgttaacgctaaccggctgaacggcattgatggcgaagtcttggatgtgcgcggggtgaaagaactggaaccgatgctcgactgctcgacccgtgcccgttacccgattatcggggcttcctggcagccgcgtggcggcgtggcccgtcacgatgccgtagcctggggcttcgcccgcggtgctgatgcgcacggtgtcgatctgctgcagcaaactgaagttaccgggctgatgatccgtgacggacaaatctacggcgtacacaccaaccgtggcgacattgaagcgaaaaccgtcggctgcgtggtggcgggcaactccagcgtgattgccaatatggccggcatccagctgccattggagtcgcacccgctgcaggcgctggtttccgaaccgctgaaaccgatcgtcaatacggtggtgatgtcgaaccacgtgcatggctacgtcagccagtcggacaaaggtgatctggtgatcggcgcggggattgatggtttcgtcggctacggccagcgcggcagctatccggtgattgaacataccattcaggcgatagtcgagatgttcccggcattctcccgcgtgcgcatgaaccgccagtggggcggcattgtagataccacgccggatgccagcccgattatctctaaaactaaagttaacggcctgtatttcaactgcggctggggaaccgggggctttaaagccacaccaggctctgcgcatgtcttcgccgccagcctggccaaacgtgagatgcacccgctggctgccccgttctccatcgaccgtttccataccggtgcgctggttgacgaacacggcgcggcggcggtcgcccactaa

SEQ ID NO: 247833 - DNA, 369 bp, Klebsiella pneumoniae
atgtttcatatttattgtccttgctgcggcgaatatcgcgaagaagaagaattccacccgaaagggcaggcgcatattacccgcccgttagcgccggaacagtgctccgatgaagaatggggcaattatctgttcttccgtaaaaacccgcgcggtattcaccacgaactctgggttcacgccgccggctgccgtaagttttttcatatcacgcggaatacgcaaacttacgaaattcttgaagtgtataaaattggcgaacagccttcggtgcaaagtcattcggatgtcgtaccactgccgcggaaacaggaaaccgtggtgcgtctcgaagagcaggaaaaaaacttggccggaggtaacgtatga

SEQ ID NO: 247834 - DNA, 3039 bp, Klebsiella pneumoniae
atgaaacaggttaatcgcctcgctcaggggggacgtatcgatcgttcccgcccgattaaattcaaatttaataataaagagctggaaggttttgccggcgatacgctggcctctgcgctgctggctaacggcgtcaatattgttaaccgcagttttaaatattcgcgggcgcgcggcattgtcgccgctggagccgaagagccaaatgcagtggtgcagatcggttccgcggaatcggagcaggtgccgaacgtgcgtgccacccagcaggcgctgtacccggggttggatgcccgcagcaccaacggctggccgggagtggagctggacctgatgagcgtggtcggtaaagtcggcgggcgctttatgccaccgggcttctactacaaaacctttatgaaaccggaatcaatgtggatgacttacgaaaagtacatccgcaaaggggccggactgggccgtgcgccgctggagcgcgatgccgatatctacgatcatatgaatcgccactgtgaagtgctggtgattggcggcggtccggccggactggcggcggcgctggccgcaggccaaagcggcgtgcgggtgatcctcgccgatgagcaggaagagccgggcggcagcctgctggacagccgtgaaacgctggatggtaaaaatagtgcgctgtgggtggagcaggcgttacagacgctggctagcctgcccaacgtgctggtgctgccgcgcaccaccgccaacggctatcacgatcataactttgtcaccctggttgaacgccgcaccgaacacctggccgccacttcgccgcgtgagcagggtgcgcctctggccagaacccgcatgcaccgcgtgcgggcaggccgggtgatccttgcgaccggtgcccatgaacggccgctggtttatgccggcaatgatattccgggcaactttgtcgccggggcgatttccaactacatcctgcgctacggcgtggtaccgggcaaacggatggtgctggctaccagcaacgaccacgcttatcgcgccgccctggactggcacgatagcggtgctgaagtggtggccattgtcgatgcgcgcccgtcccccgacggtgcgtgggtgaaggaagcacgcaagaagggcattcgcatcatcaccggcagcggagtgattgaatcgcagggatcaacgcgggtgcgtcgggtgctggtggataccatcaacctgcagcgcttcactaccggcggacagcaaatcttgctggagtgcgacaccgttgccacttccggcggctacagcccggtaatccacctggcctcgcacactggcgcgcgtccggtctggcgggaagagatcttcggttttgttgccggcaaagtgccgggaatgctgatcgttggcagcgcccgtggcagctaccgcctgagcgacgtgctgcgtgaaggggcggaagccggcagcaaggccgcgcaggaaactggcggcaacgcgggccagatcgacctgccgcaggccaggcagcagcaggaaggtgcggcgctggcgctgtatcaggtgccgcacccgaaaccgacgctgcgtgcgccgaaacagtttgtcgatctgcagaacgatgtgaccgccgcgtcaattgaactggctacccgcgaaggctttgagtcgatcgaacatatcaagcgctatacggtaatgggattcggcaccgatcagggcaagcttggcaacatcaacggtatggcgattgcagcacgctgcctgggccgcactatcgagcaaaccggcaccacgaccttccgccccaactataccccggtggcgttcggcgcgattaccggtcgtcactgcggcgagctgttcgatgccgagcgttataccgcgctgcacagctggcacgtccagcagggtgccaaatttgaagatgtcggccagtggaagcgcccgtggtacttcccgcgcacccacaatggccacaccgaaacgatgcatgaagcggtggcgcgtgagtgccgggcggtgcgtaacggcgtcggcattctggatgcctccacgctcggtaagatcgatattcaggggccggacgcccgcgaattcctcgagcgggtttacaccaacaaatggctgaaactgccggttggccgcgtgcgctacggattaatgtgccgcgatgacggcatggtatttgacgatggcaccaccagttgcttgggtaaaaaccacttcctgatgaccaccagcaccggtaacgcggcgcgggtgctggagtggctggagctgtggcagcaaaccgagtggccggatctgaaggtgtactttaactcggtaaccgaccactgggcgaccctgtcgatctctgggccaaaagcccgccggttgctggccgaagtctgcgatatcgacctggatcgcgatgcattcaagtttatggactggaaagagggaaaggtggctggcgtaccggcacgcgtgttccgcatctcgtttaccggcgaactctcttacgagatcaacgtacaggctaactatgccctgcatgtgtggcaaaccctgtttgaccacggggcaaaataccagttaaccccgtacggcacggaaaccatgcacgttctgcgtgcggaaaaaggcttcattattgccggccaggataccgacggctcgatgacaccggaagatctcggcatgcagtggtgcgtcggttacgacaaagcgttctcctggattggacagcgcgcgttaacccgcgaagatacacgcaagaccgcgcggaaacagctggtcgggctgcggccattgaatccgaaagtgatcccgcaggaaggggcacagatcattgccagcaacgaccggaccattccggtgccgatgctcggacatgttacctccagctattacagtccgtcgctggacagcggcatcgcgctggcggtggtgcataacggccatcagcgcatgggggaaactatctggctgaccggttctgatggggaaattcatcaggcggaaattgtcagcaccgtatttatcgacccgaaaggagaacgccagaatgcctga

SEQ ID NO: 247835 - DNA, 645 bp, Klebsiella pneumoniae
atgcctgaagcaacccgagctaaaacgtttgacacgcatccggacaatttcgccctggcggaatcaccgttagcgctctcttacaaccgagtcgggcggcccgaagtccgggatgaagcaggtgtgacgatccatgaaagacctttgcttggtcatcttgtgcttcgcggcggtgctattgatctggatggggctctccggcatgtcctgaacctgtcgctgcccggccagccgctcagcctgacccaggacagcaccggcagctacagtgcacagtggctgtcgccggacgagtggctgctgattgttcccggtggggaagagtttgcaattgaaaatcagctgcgcgaacggctggcggatgagcacttcgccatcacgaatgtcagcggcgggcaaaccctgctggagctgcgcggcaaagaggtgcgcaacctgctgaaaaaatccgtggtttacgatgtggatgaccagagcttcccggcgggcaaaggcgtgatgacggtgtttgccaaaaccacggtgatcctgcgccgcccggcggaggatgtctggcaactggtggtgcggcgcagtttcgctgattacagctaccgctggctgctggatgcggggcatgaatatcacctgacggtgcgggcgtaa

SEQ ID NO: 247836 - DNA, 867 bp, Klebsiella pneumoniae
atgtctgataacaatgatacctggattttaaccgcgcagtgccccagtcagctcggcaccgtggatgtggtcaccggatttttaaaacagcagcgctgttatattaccgagcagcactcatttgatgacaaactggctaggcaattttttatacgtactgagtttcaggcccagaacggcgatttcaatatcgatctgttccgcgaattatttaccgcgcgcgcgcgggaatacggcatgaccttcaacctgtcggaaaaaggctaccgcatgccggtggtgatcatggtgtcgaaaaccgatcactgcctgaacgatctgctgtaccgctaccgggccggcaagctgtcgattgagattaaagcggtgatctccaaccacccggatctggaaccgctggtgcgctggcacgatctgccttattactgcttcccgatcaccaaagacaccaaagcgcagcaggaagcacaggtgctgcaggtgattgaacataccggtgccgagctggtgatcctcgcccgctatatgcaggtgctctccactgaaatggcgcataccctgtcggggcgggcgatcaatattcaccactcgctgctgcccggattcaaaggcgcgaaaccctatcatcaggcctatcagaaaggcgtgaagctggtaggggcgacggcgcactatatcaatgatgacctggatgaaggcccgattattacccagaaagtcgaagccgtgagccatgccaactatcccgacgatctgattgatttaggacgcgacatcgagcggcaaaccctggcacacgcgatcacctgccatgtggagcgccgtatcttcctctacgggcagaaaaccattgtcttctcacgctga

SEQ ID NO: 247837 - DNA, 273 bp, Klebsiella pneumoniae
atggccagcgttactgtccattgtccccgttgtcagtctactcagatttaccgtcatgggcacaaccctaaaggccgtgaccggtttcgctgtcgtgagtgccaccgcgtctttctgctcacctatacttatgaagcccgcaagcccggcgtcaaagaacaaattaccgaaatggcattcaacggtgccggtgtccgggataccgcaaggacgctcaaaatcggcattaacaccgtcattcgcaccttaaaacactcgccccgaagcaaataa

SEQ ID NO: 247838 - DNA, 213 bp, Klebsiella pneumoniae
atgacaacaacgacagagttaatgcagctgattgtgacattgggtgagaaaattcgtcagccttattttaacttggataatcatccggctgacggagaggaagaagatatcgtattttgcgccgcgggagacggtctgattaaatgccaccaggcgtgcgaagagagcggccatacgccattaaatctgcgcaaccgttcccatttcgggtaa

SEQ ID NO: 247839 - DNA, 276 bp, Klebsiella pneumoniae
atgagctttgaaattatcgcgggactggtggtcgtcatcctgggtgctattgctggcgcgttcggcattggtcatgctcgcggggccagtaaggcgaaagccaaagctgatcagcaacgtaccgaagagaacgccgctgctactgtcgccgcggcagaacgccgtgctgaagtcacgaaaggggcaagcgatgtacaggaagacgttaagcgtatgggcgatgacgatgttgatcgcgagctgcgcgaaagatttacccgccccggtagtcgttga

SEQ ID NO: 247840 - DNA, 768 bp, Klebsiella pneumoniae
atgacgggggacggtgtgaatgatgcgccggcactaaaacaagctgaagtgggcattgccgtacagacagcgtctgacgtggcaaaagcggctgctcaggtggtgttgacccaccccggattagacggtgttgccgccgtcgtatcggggggccgccgcgtttttcgccgcatgctgacctggacaataacaaaaatagcccggaccgttgagctggcggccctgctgaccatcggctatatcgcgacaggattcttcgtcacaccactggttctgattgccgtgattgtggttctcaatgatgtggtgacaatcacgctggcgacagaccggtcgtgggtttcttcatcaccggaaagatggaacgttggtgacattgcccggctgggaggtgtcctggccgcaggctggctggttctggcattcatgatcctgtggttcgtccttacccggttgcagcttcccgtcccgcaaatccaggccctgatgttcgcctatctgatgtatacggcccagatgacgatttatctttcacgaacgccgggccgctgctggtcactccgtccgggccggtttgttgtgttggccacggtgggcaatatcatcattgccaccgtactggctgccggtggtttccttatgacgccggtctcactgacactgctggccatcatgtttgctctggttttgctggccaccctgctgctcgatcagatcaaaatatggctctttgccagaagacctgttgaggacttaccgaaaagctga

SEQ ID NO: 247841 - DNA, 909 bp, Klebsiella pneumoniae; identical to SEQ ID NO: 16669

SEQ ID NO: 247842 - DNA, 519 bp, Klebsiella pneumoniae
gtgattcggactctgacagcgattccgactccgacagcgactcggattccgacagcgactctgactcggacagcgattcggattctgacagtgattcggactctgacagcgattccgactccgacagcgactcggattccgacagcgactctgactcggacagcgattcggactccgacagcgattcggactccgacagtgactccgattccgacagcgattcggatgctgacagtgattccgactccgacagcgactcggatgctgacagtgactccgattcggacagcgattccgacagcgattccgacagcgactctgactctgacagtgactcggattcggacagtgattccgactccgacagcgactcggattctgacagtgactcggatgctgacagcgactcggattccgacagcgactcggactccgacagcgactctgactccgattccgattcggataccgaaccgcaggcaaataatgatacccatacggcggctatcgataccgtag

SEQ ID NO: 247843 - DNA, 390 bp, Klebsiella pneumoniae
atgcgccggatattatcggtattactggaaaacgaatcgggtgcattgtcccgcgttatcggcctcttttcccagcgtggctataatatagaaagcctgactgtcgcgccgacggacgatcccactctctccagaatgaccattcagaccgtgggcgatgaaaaagcgattgagcagattgaaaagcaactgcacaagctggtggatgtcctgcgggtcagcgagctggggcagggggctcatgttgaacgcgaaattatgctggtgaaggttcaggccagcggctatggccgtgaagaagtgaagcgcaacaccgaaatcttccgcggacagattatcgacgtgacgccttctaatctataccgtccagctcgccggcaccagcgataa

SEQ ID NO: 247844 - DNA, 285 bp, Klebsiella pneumoniae
atgcttcaaggcaatgaatactttgacggaaaagtgaaatccattggcttcaccagcagcagtaccggtcgcgccagcgttggcgtgatggcggaaggggaatacacctttggtacggcgcagccggaagagatgacggtagtcagcggggcgctgaatgtcctgctgccgggtgaggctgagtggaaagtttacgctgccggcgaagttttcaatgtgccaggcaacagtgaatttcatctacaggtggctgagccaacctcttatctgtgccgctatctgtaa

SEQ ID NO: 247845 - DNA, 303 bp, Klebsiella pneumoniae
atgaatcccgatacctccgccgtcctgaagccccgccgcggccgtccacccaaggtcgatcgccagtttgacgatacgcgtcaggcgctgattcgctcaggccttgaagtgctgaccgaaacgggctatctcgcggcgggtattgatgcggtgatcaagaatatcgccgtgccaaaggggtcgttttatcattgctttaaaagcaaagaggcttttggcctcgccgtgcttgccgcctatggcgacttctttgcgcataaattagataaattcctgctggacgacgccgtgccgccgctgtaa

SEQ ID NO: 247846 - DNA, 771 bp, Klebsiella pneumoniae; identical to SEQ ID NO: 237218

SEQ ID NO: 247847 - DNA, 228 bp, Klebsiella pneumoniae
atggaacgcagaaatgaaaatgaaggtacccgtttggtctggtcagtagtaaccggggaaaagaccggaggcgaggagcctcattttgattatcctaccgccctgcaggcgcttatcctcgaggcgcagagttacttgcaggagatgcagaaaaaccctcaattggagccgcgtccaattggtcttttttgtgaaaaagtaccagatgaggaatttttaggtctttga

SEQ ID NO: 247848 - DNA, 1134 bp, Klebsiella pneumoniae
atgcctgaagaaacattgactgtcgtaggtggtggtaataacagctgtaatgttagctggggtggtggcaatggtaacaacggtggtgctggctattctggtaaatacggtggtactagctatgaaggcgcaactagtatgttgaagttgaatgaccgtgttttaattcagctttatctttgcaatccgcttaacccagattatattggagcaccttggggcagtgataaagatgcagaatcaattatcagagctaacagagataaagcaggaaagttcaaggctaatattcagaactggaaaacaagcggtacaggttctttaggtagccctgtagttgggaaatcttatagctcaggtgatgtagatacttattcggttagcttcggaaaagaaaaatacaatgtcctgtataaccgtaaaaaagactcttttactacagcttatgtcgatggcggcgcaaataaacctgagcatagcatgaaggatcaggctattgccgttgttaaactttaccttctcaacgaaagtcaggcatcggtaatcgatactacatcgggaattattactgactctggaaaaactcttagcgggaaattaggtgataaatacaacactctggcgaaagaagctgctgacaatataaaaaacttccagggtaagaaactccgcagttttaatgatgctatggcatctattaatgaactagctaacaatccaaagatgaagttaagtcaggcggataaaacagtcgtttctaatgccctaaaacaaatggatttgtcagcactagctgaccgattcaaagggttagagaaagcctttacttggggtgatcgacttcttaaagccgagaaaatcagagacggtgttgttactggtgttaccacaggggactggcaaaagctggcgtttgaggttgaagctatgtacctcagtggtgttgctggcgccgtagcgttagggattactactgccatgattagcacagtcgcagtcgctttgtcacttccagctgtagctgtctctgcgcttactgttgtgtccgtcattggcatctctattctcacatcttatatcgatgctgataaggccaaagcactgaataatgcagtgcttggcttatttaaataa

SEQ ID NO: 247849 - DNA, 336 bp, Klebsiella pneumoniae
atgtcgactactgaatttttgaaaacgctggattatgaccagctgcagttctgccgggataagtgcgacgaaatgctgcgcgctatccaggaagaacaaaagaaggtcgcctgggcggtaactgatggttcgttcaactatggctggtaccgaactgaggactacctgaaagcggttgaatgtttggcgcgcgaagcagagaaccgctggaaagaagagacggaagaagacaaaagcaatccgcaaacacgcaattggttgattttttctatcagggggcagcggctgccggcgtctgagtacgaggcgttatttgccgatggccagtgggggtga

SEQ ID NO: 247850 - DNA, 225 bp, Klebsiella pneumoniae
atgctgggcgagatttgcatccagcgtcgcccaggcagaacgccgtattcagaaaatgaagtaatcggcctgttgatccgaaagaactacaaagagcttcagaagagcctggcgaacacatgccagcgatgtggccaggcgctgccggtgtctgaatgcatcttcgacggcgaaaattcatgcttactgacgactgtcagactaaagctggctattaaggcgtga

SEQ ID NO: 247851 - DNA, 492 bp, Klebsiella pneumoniae
atgaattatggactggtgagcaagcaagacgcgcgcctgtatgccgaagccgtttgcgatgtgatcgggcatggcaaggcgaatgcagctgttttgctgtgtgtcgaaacggccgcagccgagacattgctcggcgattacaaagacccgacgccgaccagcgccggaaccggattaacccaggttgatctcggtaccttcgaatggctccgcgataagtacaaaaacagccgttatgccccggtactgctgaatcagtttggcatcgacctgagccgaacagtttatgaggaactgaggacctcgccgctgatggcgatgctgttttgccgcctgcgctatctgacggtttcagagtcgattccggcgactcgcgaggcccgcgcagcgtactggaaaaaatattacaacacctcggcaggcaaaggcacgccgcaggattacatcgataaatgccagcgcgctggcgttgatgcgctattcacgcagtga

SEQ ID NO: 247852 - DNA, 396 bp, Klebsiella pneumoniae; identical to SEQ ID NO: 180578

SEQ ID NO: 247853 - DNA, 1482 bp, Klebsiella pneumoniae; identical to SEQ ID NO: 180663

SEQ ID NO: 247854 - DNA, 1164 bp, Klebsiella pneumoniae; identical to SEQ ID NO: 180665

SEQ ID NO: 247855 - DNA, 978 bp, Klebsiella pneumoniae; identical to SEQ ID NO: 180664

SEQ ID NO: 247856 - DNA, 1482 bp, Klebsiella pneumoniae; identical to SEQ ID NO: 180663

SEQ ID NO: 247857 - DNA, 897 bp, Klebsiella pneumoniae
atgcccaatctggcccaagtcttggaggaaatccaaagcctccaagacgattctcgctttgatattgtccgccgtaaatacataaaagctctaagcgaaagtactgatagaaacgtaatatgttactacacagacttcttacataacggtaatcatcagcacgtcagcatcaatgatgatgacaaaaatggtttcatggctgttgttaacgggatggacagaacaaaaggcttagaccttttcttgcatacccctggtggttctataactgctgctgagtctctcgtttactaccttaaaaaactttttaatggtgatattcgggccattgttccccaaatgagtatgtcagcaggaacaatgattgcgtgcgcctgcaaagaaatcgttatggggcatcattcaagtatcggaccttttgatcctcatatttttggtggtctttcagcttatggcattttggaagagctgaaaaatgctatcgatagcattcaaaaagatccttcaagcctcccgatttggcaaacaataatctctcgctatccaccaactatttttgatacagctagcaaagctattcagcttgccgatgatttggttactgaatggttgaaaaatggaatgcttaaagatttacctgagcccgagcgcagcgagctctccactgcgattgtaaaaagcttaaacaatcgtacggacactaaggaccattctcggcatattcacgctgagagggccgttgaattaggtttgcggataactcagcttgaagagcatccccagcttcaggacgcagttcttactgtgcaccactgttgtacacaaactcttttcaacactcctacagttaagctcattgaaggctctaataaccaatccttcattcgccatatctaa

SEQ ID NO: 247858 - DNA, 606 bp, Klebsiella pneumoniae
atgtcatcgactaatcacagaaaatatatacaggattatattgcagaaactaaagcaataattaatgaatataaagagccatcacagttttataatcaattctctcgtgaccttaaaacgctctctgaggatgaccgtaaatctcttttcaaacagttgtttagagatattcgcagtgagcgtgtagagggaaagaatccaattaacgactcaaacatagcattacattatgcctactttgctttagaggctgctgggtgctctgagtgggcgataagagttacaaaaattatacctataatttccagcatgaatgaaacgggtgaggcatatgcccgtatgcggctcagagaagagaaagccaaagctggaaagggtaaagttagccgtcataaggaaacagccattcagatcgcaatcgccacttggaagaaataccctaatgctagtctcccaggtatgcgtgacgagctatacgcttatttgcgagggaaatggaatgattgccctgcctcctcgaccattcagggatggttacaagaacttgggctaaatccagtaaataacggagttaagaacagagatttttctctggtgatactttga

SEQ ID NO: 247859 - DNA, 1218 bp, Klebsiella pneumoniae
atgacgattgaacaggccagagaatcagcctatagcgcccttaacgagatggcgcagacgcggcgtaatcctaacgaaaggagacgcgaggaaaaacgaagaacggtcacgctatccgatgctctggatgcatatttgaagtcgagagctgaagcggggcgcgtgaaggaaaaaacggcgaaagtttatcgagatacgttgagaaattattctgccgattggatggccttacaactatccgcaataacccgcgagcaggtggaaatgcggcacaggacgataacagagcgtgggatatggtttggaggtccatcaaggctgatagcgcaaggaagcaaaacacaggccgacttatgggcgagagtgttaagggcggtctatcgttatgcatacgacagccatagaaatgagaacggagatcggctgttacctgatccaccaacatcagttttgagcacaaagcggctatggaacgggacgccacgccgcactacccgtatcaggaataccgatttatcacgttggatgcgggctgtagaagttgtcagggagagggcagttgatgtgagggacgatatcaccgctgctgtatgcgatgctgtagatatggcgctgtttacaggcctgcgccgttcagaggtgttggggctagcctgggaacgggttaatatgcccggtcgttacttttggattgacaagacaaagaacggcgatccactggagttaccgatcaccgatactcttcacgccatttttacccgccgacaggaatcaatgtaccttgactctccctacgtgttccctaattcgaaaggcggggttatcacaaacgtagatcggtcaattacgttgatagttcaggaaacatcgcagaacggtacccagccacctataactttctctctgcatgatgcccggcgtacgttcggtagcatagcggagctggtgggcgtcggatcctacatactgaaacgcctgatgaatcaccgcacaatgagaagtgctgatgttacacaggggtatttacacttttccgctgatgagttgcgggagccagccagagcagtagaacgcgctattttggaatatgcaggaataatgacgagagaatccaatttagatgaaatgttgctatcgatggtaggcaaaatgacagaggaagaaaagcggaaagcaattttatctcttttgtacttgaatgaagtaaaggataaataa

SEQ ID NO: 247860 - DNA, 633 bp, Klebsiella pneumoniae
atgacgcggcagtattgcctctcattacgcagtttttcagctgcgcgcgctgcaaatccggtgacagcctgctgcatgtccgtcagggtttctacgcgttggccgaatgagcgcgacacaacaatctgctgcttcgcaggagggttttctcccaggctgaagcaagcctcgccgcgcaactcccgtaccgttctttcaagcacaacgccgaatgttttacggattaggcgcgtatctgccctggctaaatccagcaccgttttgatccccattgtggcgagtgctttctctgtacgatggccgacgccccagacttccgcaaccggcaggatgctcattaatttcttcagtctggcgccatcgtccagagcaaccaccccgccagtagcgggccatgtttttgcagcgtggttacacagcttcgccagcgtcttagtacgggcaataccgaccccgcataccagcgttgtgtgtcacctgacttcctcgcgcagttggcgcccgaaagcgtcaaggctcatggcggccgttatccctttgcagtcaacaaaaagctcgtcgattgaatactgttcgacgtggcttgcaagggactcaactacggccgcgaaccgggccgacatggaggcatag

SEQ ID NO: 247861 - DNA, 204 bp, Klebsiella pneumoniae; identical to SEQ ID NO: 149134

SEQ ID NO: 247862 - DNA, 237 bp, Klebsiella pneumoniae; identical to SEQ ID NO: 149133

SEQ ID NO: 247863 - DNA, 213 bp, Klebsiella pneumoniae; identical to SEQ ID NO: 149130

SEQ ID NO: 247864 - DNA, 261 bp, Klebsiella pneumoniae; identical to SEQ ID NO: 240655

SEQ ID NO: 247865 - DNA, 534 bp, Klebsiella pneumoniae; identical to SEQ ID NO: 240657

SEQ ID NO: 247866 - DNA, 1113 bp, Klebsiella pneumoniae
atgtctgaggttattaggaacgatatctttcattttgcttcaaaaaagaatgtgcccacggggttctatcggttatgcaaacaaaaaccaatgaaccctttattctttttgcccaatttactggtagttgctgaaggcaataatgatgccattcaaccatgctttgatttctctgttattagcactgaattatatgagtcaattgaagatggagatattgggataatcaacaatggcaatatgatacgcgtaattctgtcccgcagagccaatcataatactgtcttagtaacggaacgctgcaataacttgtgtctgttttgttcgcagccaccaaagaaatcaaatgatgactggctacttacccaatcagctcttgctatagcttcatttggtttggatggagttgttggggtcagcggtggagaacctttgctgtatggagatgatttccttcacttcattgattttatcatcgagaattcaccagatactgctttgcatgttttaacaaacggacgcaaatttgctgatatcaactttactcaggaaatggcaaagcgaagcaaaaagatcaaaatcacctttggtatcccgctctactcatcaagaccacttgtgcatgatcatctggtagggagtgatggcgcatttaatgaaacggttaaggggttaatcaatgcaggaaactcagggattaatatcgaacttagagttattccgacactggctaactatacagaattggatgatattgtagagttcgttggccgagtgttctccaacattaatcagatttcccttatggggctggaatctatcggttgggcacgaaagaactggtcaacaatcttcattgagcacagcaattatagtgagaaaataacctccgccatagacgctgcacacaggtcaggcagacctctaacaatttttaattatcctttgtgtcatcttcctgaaagagcttgggagcttgctgctcagtcgatctctgattggaaaaattactatccgaaagaatgtgatgaatgcactcagaagtcttcctgtgctggttatttcagttcctcaacaggccgttttcatcaaccaccgagaccaattttatga

SEQ ID NO: 247867 - DNA, 579 bp, Klebsiella pneumoniae; identical to SEQ ID NO: 245319

SEQ ID NO: 247868 - DNA, 483 bp, Klebsiella pneumoniae
atgtttattgctgattttaaaaaaaggtcagaaaaagaaactaccttaaatttttttcaacgacataaaacattacaacccaatggtatgaaagagatttttagtagtcatcagccaagacatcttttaaacactcttgctcaaagagctatgctctctgatatagaaatagctttttggtcagggaggaaaaatgttgaacaaaataatgtgtatgataaccgaacttgggaggagttgcgacaaaacgaacgaagagtattatttgctgatgaaatgatttctgatttaggtggagggagtaaggatgatattatttgcaaaattaaagaccatttacaaacgcttgaagaaaagaataatttatacagaagccaatataattcacagaaagcgaattatgttgaaaaggaaatccaagaagttagtaaaattataaatcatattgttagttattatcttagaggagaacataatgagtaa

SEQ ID NO: 247869 - DNA, 537 bp, Klebsiella pneumoniae
atgaacatatccttgagggggggcgttcgctcagacctcaatttttgccacatcagccgaattgccctgtgtgtaatgaacataaatgaattggtattcatcgataattttgacaatcatgtagtggtcatgagcgaagtcgttcgactgctcaagtcatatcgccaaatgcaatatgtcagcacagaagctggaggagttctgataggagaacgccggggacctcacatcgttattactcacatttcggaaccagggccgggtgacatcaggacacgtaatcggtttgaaagaaaaggtgaccatcatcagctgaaagtagatgaactgtttgaacagtcaaatggctttcttgtttatttaggcgaatggcatacacatcccgaagattttcctcaaccgtcttatacagacatgaaatcttggctgactggactgatcgcaacagagacaatgctcctgattattgtaggcagaaaatctgagtgggtaggaataaaaaacggaaatgatataaaaagtataagagagaagtaa

SEQ ID NO: 247870 - DNA, 225 bp, Klebsiella pneumoniae
atgagtgatgagtacgaaaagaagattggcatccctgatcaccacaccctcaaacaagtttcaatggaatggaaaggacaaaggaaaggccaagacattgatgtttacatttttgacgaaatagaccctaacggcagtgtaattgcttcttacgaggtaaccgacagcacttcaatctacccgccgtttgaccgtcacatttcttatcaaaaattacgccgataa

SEQ ID NO: 247871 - DNA, 234 bp, Klebsiella pneumoniae
atgcgcctcacagttctcaaagacgaccttggcgagttcattgaacctggtcgcgagcgtattacggtttatctcaataacatcgaggtaaaggctgtcttttctgctgacgatgataaaggcgaggtgattgccgccgtgcttgattgccggggttaccctactaccgagaacggcgaggttaagcggcagacgctgttcggtcaggtgaggatagagcgatgcccgcgctaa

SEQ ID NO: 247872 - DNA, 564 bp, Klebsiella pneumoniae
gtgctgattggctatgcgagggtatcaaccggggatcaaaacctcgatttacagaaaaacgcgctgatccgcgcagaatgtgagctggttttcgaggatatggccagcgggaagaatgcccggcggccaggtttaaagcgagcgctgcgacggctccgcccgggtgatgtgctggtggtctggaaactggatcggcttggccgcagcgtgcgcgatctgattacactcgtgtcggagctgcaggcgcgcggggtgaatttccgcagcctgactgacagcatcgacacctcgacgcctgcgggacgtttcttcttccacgtcatgagcgccctggcggagatggagcgcgagttaatagtggagcgtacccgagccggtttagccgcagcgagggagcaggggagagtaggcggacgccgccgggtaatgaccactgaagttgtggagcgatgccgcaggatgttgggtacgggcgcaacccggcagcaggtggccgatgtgacaggggtgggagtaaagacgatttataaatattttccggctcaatgcagccagtcgaattga

SEQ ID NO: 247873 - DNA, 1335 bp, Klebsiella pneumoniae
atgaaagcccgatataaagccgttgtcgaccgatatgcccaggcgatccgcagcgggcagttgcccgccggcagccgtctgccgacgcaccgtacccttgccgccggggagcgcatctcgctggccaccgccacgcgcgtctaccgtgaactggaagagatggggttggttagcggcgaaaccggccgcggcaccttcgtgcgcgacctctcgctgccgccggggcatggggtcgatcagcaggtggtggccgccgatgtcgtggatctcaatttcaactacccttcgctgccggagcagggcgatgcgctgcgcgaggcgctcaggcagctggcgatggcgggcgatattgactcgcatctgcgctatcagcctcacgccgggcggcttgccgagcgggacattatcgcccgccatttgacctgccagcactttgcgccggacgcggaaaatgtcctgatcgtcaacggcgcacagcacgggctggcggtgaccgtcatggggctgttacgtccgggggatgtggtggcggtggatgcgctgacctattcgggcttcaaggttctggcggcgctgtatcatctggagctggcggcgatcccctgtcggccggagggaccggatcttcaggcgcttcagacgctgtgccagcagcggcgggtgcgggcggtgtataccatgccgacgctgcacaatccgctgggctgggtgctcaacaccggtcagcggcaggcgctggccgatcttgcgcgccagcacgatctgctgattattgaagatgccgcctatgcccggctggtgagccgtccgccgccgccggtggtcagctatgcgccggaaagaacggtgtatgtcaccggattttcaaaaaatatcgccaccggactgcgcgtgggggtggtgatttctccgccgcgctatcgcccggagattgagcgcgccatccgggccacgacgtggaatacgccgacgctgataagttcgctgatctgcgcctggattgaagatggcacggtggcgcgctttgaaacgcagaaacgccaggatgcgcgacagcggcagcaggtggcccgcgaggtgctttgtgggcttcccgtcgtcagtcatcccgattcgtacttcgtctggctgccgctgggtgaagagagccgggccgatcgactggcgaatgcgctgatggaacgccgtatttcggtgtcgaccgccgagccgttctgcgtctccgccacgatcccgcaggcgctgcgcattgcgctcggatcggtgcctttcgacagcctgcgcccggcgctgctcagcgtgcgcgacgccgttgagtatgaacaataccgctaa

SEQ ID NO: 247874 - DNA, 732 bp, Klebsiella pneumoniae; identical to SEQ ID NO: 190023

SEQ ID NO: 247875 - DNA, 753 bp, Klebsiella pneumoniae
atgcgaacaatacatgccgccatgctggcggggtgcctttgctgcaccctgatgccggcttacgcaaaagacgcgggctggcagtggtacaacgagaaactgaagtcccgggaagaagagcaactgccggcaccagcggcctcaccgccgcaaatggatattctggagaaacaggcagctctgcaacatgcaacgaaaaaagcattagcggaagccatcttgtacccctcagtgccggcttttgtgaagttcttccgtctccagaactactggacgcagcaggctggcctgttctcgatgagcgcaaagaaagccatgctggaaaacccggagctcgattacaacctgcagtacagccactacaacggcactgtgaaaaaccagctggctgccgactatgccgaacagcgaaaggctatcgccactctcgcacagcactacggtgtgatgttcttctaccgggggcgtgaggccatcgatggacagctggtccaggtgattcagaactttcgcgagacttacggcctgagcgtgataccggtctctgtggacggcgtggtgaatcccctgctccctgacagccggatggaccagggccagtcacagcagctcggcgtgaagtacttcccggcgatgatgctggtcaacccgaaaagcgggcaggtgaaacccctcagttacggctttatcagtcaggacgacctggcaaaacagtttctctatgtctccagcgactttaaacccaatttttaa

SEQ ID NO: 247876 - DNA, 327 bp, Klebsiella pneumoniae; identical to SEQ ID NO: 101002

SEQ ID NO: 247877 - DNA, 243 bp, Klebsiella pneumoniae; identical to SEQ ID NO: 101001

SEQ ID NO: 247878 - DNA, 612 bp, Klebsiella pneumoniae; identical to SEQ ID NO: 101000

SEQ ID NO: 247879 - DNA, 261 bp, Klebsiella pneumoniae; identical to SEQ ID NO: 100999

SEQ ID NO: 247880 - DNA, 384 bp, Klebsiella pneumoniae; identical to SEQ ID NO: 100997

SEQ ID NO: 247881 - DNA, 648 bp, Klebsiella pneumoniae; identical to SEQ ID NO: 100996

SEQ ID NO: 247882 - DNA, 993 bp, Klebsiella pneumoniae
gtgaaatccctgaccctgtttctgagtgccctgatgatgtggggatacagcctcagtgcggctgcggacccctcctgcgagggacgttttgttaacccgatcaccgatgtctgctggcaatgcatttttccgatgtccatcgggagtgtgtcggttgcggccggaggtggcccggataccgtgaatccggccagtccggttcagtactgtcccgcaccgcccccgatatttgttcgtatcggtctggcgattggctactgggagccgatggccatgacggatgtcagccgttcacctggctgcatggtgaacctcgggggattcagtatcaatctcggcaagaccgggatgggtacggctaagaaggatgacaggcaggtgaacggggccttctatcacgtccactggtacaagtatccgctgacctactggctgaacatcatgacctcagccgggtgcctggaaggaggcgatatggatattgcctatttatccgaaatcgacccgacctgggtggacagcagcctgaccaccattctgaatccggaagcgattttgtttgctaacccgatcgcccagggcgcctgtgcggcagatgcgattgccagtgcattcaacaaaccactcgatattttgttctggtgcgccggctctcagggttcgatgtacccgttttctggctgggccagcaacgagtccagtcccctgcagtcatcgctgttactcagtgagcgaatggcctacaagcttcaccggcagggacaaatcatggagaccgtcggcgcagatgtggcggtctgctacgaatacccgtctccgatcatcccaaaagagcggtggcgctatcagatggtgaatatgtatccggacagcggtcagtgccaccctctcgggcgcagtgtgatgcgctgggaggcgggcagaaatccacccaacacgcggaaaaactacggctacctgatgtggcgtaaacgtaactgtgtctacctctga

SEQ ID NO: 247883 - DNA, 393 bp, Klebsiella pneumoniae; identical to SEQ ID NO: 100994

SEQ ID NO: 247884 - DNA, 384 bp, Klebsiella pneumoniae; identical to SEQ ID NO: 100993

SEQ ID NO: 247885 - DNA, 123 bp, Klebsiella pneumoniae
atggtgcttcgtaataacccgaagccgttaacccttcgctcagcgaataaaatagcctcagagtgtaacgagaggaataagcaacttcaggtattaagtaaaacccgctccgatgaggggtga

SEQ ID NO: 247886 - DNA, 402 bp, Klebsiella pneumoniae; identical to SEQ ID NO: 100991

SEQ ID NO: 247887 - DNA, 189 bp, Klebsiella pneumoniae; identical to SEQ ID NO: 100990

SEQ ID NO: 247888 - DNA, 279 bp, Klebsiella pneumoniae; identical to SEQ ID NO: 100989

SEQ ID NO: 247889 - DNA, 768 bp, Klebsiella pneumoniae; identical to SEQ ID NO: 100968

SEQ ID NO: 247890 - DNA, 336 bp, Klebsiella pneumoniae
atgaatacctggcttgcagggttaagtgtcgaactcgaaggcacagaaatgatagtacatcacctgattacagcgacagacctggaacaggcagaatccgccatcatggaaatggggcgcacctggtggccagcgctgaagcgggaggatgaccggcaccgatgggaatatccgcagggtgtggtctggttcaacagcatcatcctgcttgaggacgtggaaaacagtattttgcgcggcctcaaattcctcgacgcatggacagtaaccggtatgcctgatgctcctttactgtgtgatgagtggggcaatgactggcgggatatcactcgctga

SEQ ID NO: 247891 - DNA, 222 bp, Klebsiella pneumoniae
atgaccgtaaaagctttcatcacacgcctgtcagccttccctgaagagacactctgctgcgggacattctggctggctgatgactttctggcgctcgacagcaccctcactgaagacgatattgatgctgcaatggagtgggcacaggacagccatgatgcgaatgacggatttaactggagccacctgcaggcggcaatcgatgaggtgaagcgcgtatga

SEQ ID NO: 247892 - DNA, 189 bp, Klebsiella pneumoniae
atgctgcttaaccgactaaaaatgaaagaacaggcagaacagccctatgactatgcaaaatttcacgctcaggggcaagccatcctggatatgtggtacgaaattgcgctggcagggaaagtaccatctgaacagatagccgctgaccacgtatactttaaaaatcttctcgaaccttcccgttggtaa

SEQ ID NO: 247893 - DNA, 285 bp, Klebsiella pneumoniae
atgaaattgttgctttatattggtttagctatttgcttatattgtgtattccggaaaatacacactgcaatgcttttacgtaaaatagaacgtgagatcgataagacagtttgtgaaaatgaccgattgcagcatatcaaagataagcgtcacgagcgagaactggcgcatcgagcccatctaaacagtagcatattcgagcttatctggatggttccataccttttctatctagttattcaatcaacgttttcctcattaatgagaaaaataaaaaaacaataa

SEQ ID NO: 247894 - DNA, 1215 bp, Klebsiella pneumoniae
atgaagggtatgcagaagatcaaaaggggtaagaatttctcaggtgtggtccagtatgcatttaagccagattcacatcataaaagtgatccaatcgtcattggcgggaacatgttaggtgattcagcctttgaactgatcgctgaatttgatggcactaaacagcttcgtccagatgttcagaaaccggtatggcacaattcacttcgattaccccaaggagaatctcttaccaacgaacaatggaaacgaattgctgacgattacatgaagcgaatggggttcggtgatacacacctccgttgctatgttcttcatgatgatcaggctggtcagcacatacacattattgcaagtcgcatagatctcaatggcgggaagctctacttgggtaggaacgaaaacctcatcagcacccgcataatcagtgaactcgaattcgctcatggtctgacagtgaccaggacagcctcttcaattgcaccaaagcaaccgaagcggaagagaatctctcgcaacgaacagatgctatcagaacgaactggtgttccctgccccaagaagtcccttcaacagatcatagataaaagtttggcagattcaccggaccttttaacttttttcaggaggctggaagaagctgaagtatcatggaaggccaatattgcctctaccggcaaaatgaacggcttctctttcgaatacacaggaatagctttcaaagcttcgcaattgggtaagagctacagttgggcaaatcttagtaaccgactcaagtacaaccccgaccacttagaaattctgcgaatgggtatacagacgaaggaagctcttcctgctcctgctcctgctcctgctcctgctcctcctcctgctcctgctcctgctcctgctcctgctcctgctcctgctcctgctcctgcaaaagatgttgcaacaacggatattccaagggaaagcataagtgaaaaaattgtcgaactggaactacggctcagagaagacaaacggaatgaaatcgtagaaaagattcttcaaaaaaattccgtcaaaaagcaaaagcatctcaggctcatcggctggattccatttatcagaaggttcatagagcttctgcgaagctatggtaagagcattcttcataagacccctacaaacttctcagaagtctattcaacacatcatctaaaacctgcaagaaaaattcgtttatag

SEQ ID NO: 247895 - DNA, 441 bp, Klebsiella pneumoniae
atggacataaccccatcaatgcctcgcattgtaaaaagcatcaccaccgtaaaaaaacaatcctcaaaccttactaatctgataccagagacactcagaactcactgtgtcagtgttcgtctgaataacgcagaattgagcaagctaaacacattgagaggagattatgcaaaaggcgaatggttacgaatggcttcgttacagaagctgccaacgattgtgcctcctgtaaatattgatacctggaagaccctaggtgagatcaatcagaagctaaaccgtattgctcttcatatcgatagtaagagtaaagatagccagcttacccatactgaactatttgctgttagaagattaattaaagagcttcgccagcacctgataaattctgacatatggagcaaccccgatgaagggtatgcagaagatcaaaaggggtaa

SEQ ID NO: 247896 - DNA, 1074 bp, Klebsiella pneumoniae
atgtgtgaaagttctatgggaaataatgaatccgaacaacaaaatgctttacaagatcaaattgcggaaattcttgtagactatgaactttccccatccgaaggcatgaactcagcacatgtaggtcgttggattgcgcaatttgaggagagagatcaaatttttattcttgagcaaacgctggagttacttcgaaattcatatatcagcaaaaatgattatgtagaaatgattgctctcatccttgggaatcagagaaatagaccgatattttcccaatcagctttccttgatattcaagaagttaatcgtgggactagtcagagagatttgctggagctgttagaaacccaagcagaggagttagaaggggtagatatagttacattatcaagatcctctgccaatcagagagttgcagaattcaatagttttatttatcttgacgatgtttgtttttctggcaccaaagccttgaatgatattacttggtttgtagaaaattttaaccttagtaatgtgactattcgcgtgtgtttcttgggaacacataaatatgcaacctatatgctagagacgactctcgcacgaagatttgaagggcgaaatatcacacttgttatcaaagaaaatggatttatcaaaacacgcgaaaatcgccttaggtattcttcgtgttctgaagttttctggttacgtagaaatggtattgacctaccagattggattcaaaatccggagatctatacatcgcgcgaaggcactgaaaggacccattttagcccaaacaccatcttccgcaacatggctgatcgctatcgttttgaatatgcactgactaaggctggtttttacatactacagcaaagtcaaaatcccgcaccgattctaaaacctctcggcttttcaacattccctggactagggtttggcggaacaatttttacctatcgaaattgtccaaataatactccactagctttttggtggggaagatatgagcgagatgggattccaaacagggcactggattgctggtatccattgatgcgtagaatcgggtataatcagtaa

SEQ ID NO: 247897 - DNA, 420 bp, Klebsiella pneumoniae
gtggataattttagtcgggagtgtgtggcgatccatgccggaaagtcgctgaaaggtgaggatgtggtcggtgtgatggaaaggttgcgggtgccgggcaagcgcctgccggtacgtattcagacagataacggcagcgagtttatctcgaaaagtctggataaatgggcgtatgagcacggtgttacaatggacttctcccgccccggaaaaccaacggataacccgtttattgaatcatttaacggcagtctgcgggatgaatgcctgaacattcactggttcctgtcgctggaagatgcgcaggacaaactcgacaactggcgcagggaatataatcatgagagaacgcattcatcattaaatgacatgactccggctgaattcatccgaagtctccggaaagacgaagctctctga

SEQ ID NO: 247898 - DNA, 393 bp, Klebsiella pneumoniae
atgcacgacggcgaagaaaggaaaaaactttcactgtaccttcacccggagggctatgccgatcgtcttgcactggctgaaatcgaaactgtcccccggaaaaaccggggggagttatatcggcaggctttgataaccggcctgataatgcatcaacttgatgagcgaattcctgccatattaagcgcgttgttcaccagaaagctgaatgcagatgaggtcattagccagattgcaacgataacaggctggaaaccttctgtggctgatttaaaagatgtactggcagcgttgagggaacataaggagacatattctctaaagccctctgaggatgatctggaacaggctcgtctgaaagcggcccgggcgaagatgaaaaacctggtatag

SEQ ID NO: 247899 - DNA, 144 bp, Klebsiella pneumoniae
atgtttatcggaacttataaacagcggcagcagatgcttgttgtagtggctccgtgggaagggaaagtactctggaacttcatgcataccgaagcaaagagcctcaataaacatcggcgcggaattttgctgtatagcagataa

SEQ ID NO: 247900 - DNA, 210 bp, Klebsiella pneumoniae
atgaaatccatcaaaactttcgttgcagttgctgccctctccatgatgtctttcggtgcatttgcccagagcgtcactgcctgtgcatccaccattgacggcgcagaggcccagatcgcagctcaggctaaaaaagccggtgcgtcttacaaaattactgaatccaactttaacaacggcgttcacatgaccgctgagctgaccaaataa

SEQ ID NO: 247901 - DNA, 210 bp, Klebsiella pneumoniae; identical to SEQ ID NO: 100842

SEQ ID NO: 247902 - DNA, 336 bp, Klebsiella pneumoniae
atgaatgatattcagaactctgtgtcagaacaaatgattgccctgctgacacgctgcctgcagctgcagtctgaaaaagacggtatttcacgcccgatgcctgacaaagccccggtaggtctgtctgatacctttgatgactttgcccgccagatccaccaggcctgcctgtacgcgtcgatgaccgacagcctgttagcacttcagaaccgcctggcagatgccggccggcagctggaacagcgtggtcagctccacgtcgaatacggtgatagctatgccgccgccgcgcttgcctggcttgaacgaaccacgggcacggtgaaaagccaatga

SEQ ID NO: 247903 - DNA, 318 bp, Klebsiella pneumoniae
atggatgaagaagaaccggtacctcaaaaatttgacagccttaatgatcttctcaatgaactgaaccgggctggccacccaaatgaccagatatggttttatggtgccaacggcgattacagtgaaccggtcgcatttctggcagtggactcgcgtttaatcgcagaacgccgtgatgatggctcatggtggaccgtcgacggatacggggatgctaatgatccgcgtatgcctgaaccggaggatgcctgggatgttgaatcgtatcgcggtcaactggatatgtggtttgataacggaatccgagaaaatgaatga

SEQ ID NO: 247904 - DNA, 618 bp, Klebsiella pneumoniae
atgttttatctttccaaatctgaaaggactgatactatcattattaatgaatgggagcgtaacaaacattttttcaatgcaacaaacgctaaaagtgcctcagaagaagtatccggtatcttgctcgtagccgcctcatcagataaacatgacggtaaattactctataacatagatgaccaatatacaggatttcttctgccagtttcattagatgagtctttgaacccacaagtcatacctggggcacctcaagcatttaaggatgggcagtttcaatatagtagcaatgttctcaatgaattctcagattggatatatcaaaatcagcatcgatatataaaacctgcacaagcagaagggatctttgattattatttaaaagacaagactggtcgtagtctacttagcttaccgtgtggagagaaaataagcatagttgaagatggaaacgaaacagtatctggttataaagttgtagccgttttaaatatatatagttcagattataatatgctcagaaataaccctcatttattttatgaattctgtagaccacttttgagtatcgttgcaagttgctattggctgttgttaaaaatagaggaacttgaataa

SEQ ID NO: 247905 - DNA, 174 bp, Klebsiella pneumoniae
atgaaagatgactttgcgattgaaaaaaaaatagaagtatttaaagataaagacggtcgtttgaagtttgttgttcgttcaaatcaagtagcaactctggacaaagagcagcgaatatctcatccgacagtaaatacagatgcattagctaatctattgttaagcaagggctaa

SEQ ID NO: 247906 - DNA, 183 bp, Klebsiella pneumoniae
atgactgacaaagacctctacggcggtttgatccgcctgcacatccttcaccatgcagccgaggaacctgtctttgggctggggatcatcgaagagctacgccgacacggctacgagatgagcgctggcaccgtgtacccgatgctggggtcggttccggctgagggcgaaatgacaccctaa

SEQ ID NO: 247907 - DNA, 207 bp, Klebsiella pneumoniae
atggatgactggccgctttatgaatcacgcctgaagggagaactgcacgttatcagcaagcgatatacgcagcgcattgagcggcataacctgaatctgagacaacatctggcaaggctgggacggaagtcactgtcgttctcaaaatcggtggagctgcatgacaaggtcatcgggcattatctgaacataaaacactatcagtaa

SEQ ID NO: 247908 - DNA, 291 bp, Klebsiella pneumoniae
atgccatatactatcaataatactatttatgctactaagaaagatataatcagtcaggcacaaagcattttaaacaaaaccaaagaccatcaagaagtgagcattagtgattataattttttgatcgaattatttaaaaaccacgatgagtgggaagaaaaaagtaagaatgaatgtatcggaatcacagcaggtagatcactacacggcaccagatgtttttatttgaaaacaaaaactggattagaggacatttcttttcattacgctattaaatgcctcaaaaaataa

SEQ ID NO: 247909 - DNA, 5424 bp, Klebsiella pneumoniae
ttgcctgcggttcggtatccgaatcggaatcggagtcagagtccgagtcgctgtcggagtcggaatcgctgtcagagtctgaatcactgtcagaatccgagtcgctgtcagagtccgaatcactgtcagagtccgaatcactgtcagaatccgaatcgctgtcagagtccgagtcgctgtcagaatccgagtcgctgtcggaatccgagtcgctgtcggagtccgaatcgctgtcggagtccgaatcgctgtcggaatccgaatcgctgtcagcatcggaatcactgtcggaatccgaatcgctgtcggaatcagagtcggagtcgctgtcggaatccgaatcgctgtcggaatcagagtcggagtcgctgtcagaatccgagtcactgtccgaatcggaatcgctgtccgagtcgctgtcagagtcagagtcgctgtcagaatccgaatcgctgtcagagtcggagtcggagtccgaatccgaatcactgtcggagtccgaatcgctgtcagagtccgaatcactgtcagcatccgaatcgctgtccgagtcagagtcgctgtcagagtcggaatcactgtcagagtcggagtcactgtcggaatccgagtcactgtccgagtcggaatcactgtcggaatccgaatcgctgtcggagtcagagtcactgtcagagtcggaatcactgtcagagtccgaatcgctgtcagcatccgaatcgctgtcggagtcggagtcactgtcggaatccgaatcgctgtccgagtcagagtcgctgtcagaatcggagtcgctgtcagagtccgagtcgctgtcggagtccgaatcgctgtcagagtccgagtcgctgtcggagtccgaatcgctgtcagaatccgaatcgctgtcggagtcagagtcgctgtcagcatccgaatcactgtcggagtcggaatcgctgtccgagtcagaatcgctgtcggagtcggaatccgagtcactgtcagagtcggaatcactgtcagagtccgaatcgctgtcggagtcggagtcactgtcggaatccgaatcgctgtccgagtcagagtcgctgtcagaatcggagtcgctgtccgaatccgagtcggagtcggagtcggagtcggagtcggagtcgctgtccgaatccgaatcactgtcggagtccgaatcgctgtcagagtccgaatcgctgtcagagtcagagtcgctgtccgaatcggagtcactgtcagagtccgaatcgctgtcagagtccgagtcgctgtcggagtcagagtcgctgtcggagtcggagtcgctgtcagagtcggagtcgctgtcggagtctgagtcgctgtcagaatccgaatcactgtcgctgtcggagtcggagtcactgtcggaatccgaatcgctgtcggaatcagagtcggagtcagaatcggagtcactgtccgaatcggagtcgctgtccgaatcggagtcgctgtcagagtccgaatcgctgtcggaatccgaatcgctgtcggagtcggaatcactgtccgagtcagagtcgctgtcggaatcgctgtccgaatcggagtcactgtcggagtcgctgtcagagtccgagtcgctgtcggagtccgaatcgctgtcggaatcagagtcggagtcagaatccgagtcgctgtcggagtccgagtcgctgtcggaatcgctgtcagagtcagagtcgctgtcagaatccgaatcgctgtcggagtcagaatcgctgtcagaatcgctgtcagaatcggagtcgctgtcagaatccgaatcactgtcgctgtcagagtccgagtcactgtcagagtcggaatcactgtcagaatccgagtcactgtcagagtcggagtcggagtcgctgtcggaatcgctgtccgaatcggagtcactgtcagaatccgagtcgctgtcggagtcggaatcactgtccgaatcggagtcgctgtcagcatccgagtcactgtccgaatcggaatcgctgtcagaatccgagtcgctgtcagagtccgaatcactgtcagaatcggagtcgctgtcagagtccgaatcgctgtcagaatccgaatcgctgtcagaatccgaatcgctgtccgaatcgctgtccgaatcgctgtcggagtcggagtcactgtcagagtcggaatcgctgtcggagtccgagtcgctgtcagagtccgaatcgctgtccgaatcggagtcactgtcggagtcggaatcgctgtcagagtcagagtcgctgtccgaatcggagtcactgtcagagtccgaatcgctgtcagcatccgagtcgctgtcagaatccgagtcactgtcggaatcggagtcgctgtcagagtccgagtcgctgtcggagtcggagtcgctgtccgaatcggagtcactgtcagcatccgagtcgctgtcagagtccgagtcgctgtcggagtccgaatcgctgtcagaatccgaatcgctgtcagaatccgaatcgctgtccgaatcggagtcagagtcagagtcgctgtccgagtccgaatcgctgtcagagtccgaatcgctgtcggaatccgaatcgctgtccgaatcggagtcagagtcagagtcgctgtcggaatctgagtcgctgtccgaatccgagtcactgtcggagtccgagtcgctgtcagagtccgagtcactgtcagagtccgagtcgctgtcagaatccgagtcgctgtcagaatcggagtcactgtcggagtcggaatcgctgtcagagtccgaatcactgtcagcatccgaatcgctgtcggagtcagagtcgctgtccgaatcggagtcgctgtcagagtcggagtcactgtccgagtcagagtcgctgtcggaatcggagtcgctgtccgaatccgagtcggagtcggagtcgctgtcggagtccgagtcgctgtcggaatcgctgtccgaatcggagtcagagtcgctgtcggagtccgagtcgctgtcagagtcagagtcgctgtcggagtccgagtcgctgtccgaatcggagtcactgtcagaatccgagtcgctgtccgagtcagagtcgctgtcggaatccgaatcgctgtcagaatccgaatcgctgtccgagtcagaatcgctgtcggaatcggagtcgctgtcagaatccgaatcgctgtcagagtcggagtcgctgtcggagtccgaatcgctgtcggaatcggaatcggagtcgctgtcagaatccgagtcactgtcagaatccgaatcgctgtcagaatccgagtcactgtcagagtccgaatcactgtcagaatccgaatcgctgtccgagtcagagtcgctgtcagagtcagaatcgctgtccgagtcggagtcgctgtcagaatccgaatcactgtcgctgtcggagtcagagtcgctgtcggagtccgaatcgctgtcggagtccgaatcgctgtcggagtcggaatcgctgtccgagtcagagtcgctgtcggaatccgagtcgctgtcagagtcagagtcggagtcgctgtcagcatccgagtcgctgtccgaatcggagtcactatcagagtccgaatcgctgtccgaatcggagtcgctgtcggagtcggaatcgctgtccgagtcagagtcgctgtcggagtctgagtcgctgtcagaatccgaatcactgtcgctgtcggagtcggagtcactgtcggaatccgaatcgctgtcggaatcagagtcggagtcactgtcggagtcggaatcgctgtccgaatcggagtcgctgtcagagtcggagtcactgtccgagtcagagtcgctgtccgaatcggagtcgctgtcggagtcggaatcgctgtcagaatccgaatcgctgtcagaatccgagtcgctgtcagagtcggagtcggagtccgaatcactgtcggagtccgaatcgctgtcagagtcggaatcactgtccgaatcggagtcgctgtcagagtcggagtcactgtccgaatcggagtcgctgtcggaatccgaatcgctgtcggagtcggagtcactgtcagaatcgctgtccgagtccgagtcgctgtcggaatccgaatcgctgtcggaatcggaatcactgtcagaatccgaatcgctgtcggaatcggagtcgctgtcggagtcagagtcgctgtcggaatcagagtcgctgtcggagtccgagtcgctgtccgagtctgagtcgctgtcagaatccgaatcgctgtcagagtcggagtcgctgtcagaatccgaatcactgtcggagtcagagtcgctgtcggagtcggagtcactgtcggaatccgaatcgctgtcagagtcggagtccgaatccgaatcactgtcggagtccgaatcgctgtcagagtccgaatcactgtcggaatcggaatcgctgtcggagtccgaatcactgtcggagtcagagtcgctgtccgagtcagaatcgctgtcagaatccgagtcactgtcagagtcggaatcactgtcagagtccgaatcgctgtcggaatccgaatcgctgtctgaatcagagtcggagtcagaatcggagtcgctgtcagagtcggaatcgctgtcagagtccgagtcgctgtcggagtcggaatcactgtcagaatcggagtcgctgtccgaatccgagtcggagtcggagtcgctgtcggaatcggagtcgctgtccgaatccgagtcggagtcggagtcgctgtcggagtcagagtcactgtccgaatcggagtcactgtcagaatccgaatcgctgtcagcatccgagtcactgtcagcatccgagtcgctgtcagaatccgagtcactgtcagaatccgagtcgctgtcagagtcggaatcactgtcagagtccgagtcgctgtccgagtccgaatcgctgtcagagtcggagtcgctgtcggagtcggaatcgctgtcagaatccgagtcgctgtcggagtccgaatcactgtcggagtccgaatcgctgtcagagtcagagtcggaatcgctgtccgagtccgaatcactgtcagagtcggaatcactgtcagagtcggaatcactgtcagagtcggaatcactgtcagagtcggagtcgctgtcggagtcggagtcgctgtcggagtccgagtcgctgtcggagtccgagtcgctgtcagagtcggaatcgctgtcagaatccgagtcgctgtccgagtctgtatcagaatcggcatcggcatcactttcgctgccgccagggtcggtatcgctgtctgagtcagaatccgaatcactgtccgcatcagaatcagtatcatcgttcggagaatgcgacgaatgatctttatcggaagatcctgcaatcatcgcccctataccaagcaaagccgccccggccattacccatggagcaatgctgccaccagaactgcctgcagctaataatcctgagatatcactga

SEQ ID NO: 247910 - DNA, 1152 bp, Klebsiella pneumoniae; identical to SEQ ID NO: 247812

SEQ ID NO: 247911 - DNA, 159 bp, Klebsiella pneumoniae; identical to SEQ ID NO: 247813

SEQ ID NO: 247912 - DNA, 1488 bp, Klebsiella pneumoniae; identical to SEQ ID NO: 214992

SEQ ID NO: 247913 - DNA, 1149 bp, Klebsiella pneumoniae
atgaccctgccggatattaacgccggctgcggcggcatcgatgcgtacctggggtcgttctcatttatcaacagcgagcagctgcagcgcttcggcaaacaaattatgtccaacgccgcgggttacttctttgaccttgccctgcagaccacggttccggagatcaaaaccgcgaaggatttccttcagaagatggccagcgacattaacagcatgaacctcagctcctgccaggccgcacagggcattgtgggcggtctgtttccacggacccaggtggcgcagcaaaaggtctgccaggacatcgccggcgagagcaacatttttgcggactgggcggcttcccgtcagggctgttcggtgggggggcagatggacaaagtgcaggataaagccagcgataaggacaaagagcgtgtgatgaagaacattaacatcatgtggaatgccttatcgaagaaccggctctttgatggcaataaggagctgaaagagtttgtgatgaccctgaccggtacgctgatttttggtgagaacagtgagatcaccccgttgccggcacgcaccactgaccaggatctgattaaagccatgatggagggcggcacagctaaaatctaccactgcaatgactcggataaatgtctcaaggtcgttgctgatgcgaccgtaaccatcaccgccaataaggcgctcaaaaatcagattcgcgctttgttgagcagtatccagaataaagcggtggctgatgaaaaactgacggagcaggagaaagggtttatctccagcaccaccatcccggtgttcaaatacctggtcgatccgcagatgctcggggtgtctaactcacttatttaccagctgacggactatatcggctacgacatcctgctgcagtacattcaggaacttatccagcaggcccgggcgatgatctcaaccggtaattatccccagtcgacaatggatatgatcatggaaaacctcaaccaggcgagtgtgcagattgccgctttccagtcccgtgttcaggtccagcaggacgccttgctcgtggtggacagacaaatgagttacatgcgccagcaggtttctgcccgcatgatgacccgctaccagaataactatcattttggggggaatcagtaa

SEQ ID NO: 247914 - DNA, 1149 bp, Klebsiella pneumoniae
atgaccctgccggatattaacgccggctgcggcggcatcgatgcgtacctggggtcgttctcatttatcaacagcgagcagctgcagcgcttcggcaaacaaattatgtccaacgccgcgggttacttctttgaccttgccctgcagaccacggttccggagatcaaaaccgcgaaggatttccttcagaagatggccagcgacattaacagcatgaacctcagctcctgccaggccgcacagggcattgtgggcggtctgtttccacggacccaggtggcgcagcaaaaggtctgccaggacatcgccggcgagagcaacatttttgcggactgggcggcttcccgtcagggctgttcggtgggggggcagatggacaaagtgcaggataaagccagcgataaggacaaagagcgtgtgatgaagaacattaacatcatgtggaatgccttatcgaagaaccggctctttgatggcaataaggagctgaaagagtttgtgatgaccctgaccggtacgctgatttttggtgagaacagtgagatcaccccgttgccggcacgcaccactgaccaggatctgattaaagccatgatggagggcggcacagctaaaatctaccactgcaatgactcggataaatgtctcaaggtcgttgctgatgcgaccgtaaccatcaccgccaataaggcgctcaaaaatcagattcgcgctttgttgagcagtatccagaataaagcggtggctgatgaaaaactgacggagcaggagaaagggtttatctccagcaccaccatcccggtgttcaaatacctggtcgatccgcagatgctcggggtgtctaactcacttatttaccagctgacggactatatcggctacgacatcctgctgcagtacattcaggaacttatccagcaggcccgggcgatgatctcaaccggtaattatccccagtcgacaatggatatgatcatggaaaacctcaaccaggcgagtgtgcagattgccgctttccagtcccgtgttcaggtccagcaggacgccttgctcgtggtggacagacaaatgagttacatgcgccagcaggtttctgcccgcatgatgacccgctaccagaataactatcattttggggggaatctgtaa

SEQ ID NO: 247915 - DNA, 480 bp, Klebsiella pneumoniae; identical to SEQ ID NO: 104057

SEQ ID NO: 247916 - DNA, 249 bp, Klebsiella pneumoniae
atgaatcttctggtcaatgccggtatcccggttcgcacagtgtcgcagtacaaaatcatgcacgataaagtcattattgctgacggccgtaatgttgaagtggggtcttttaactacactcgagccgctgatcggttcaattcagagaatgtgctagtcgtgtgggatgaaccagtcgttgctcaacgctatctgcagcactggcaaactcgttgggagatgggaaaagactggagttcctcgtattaa

SEQ ID NO: 247917 - DNA, 645 bp, Klebsiella pneumoniae; identical to SEQ ID NO: 247822

SEQ ID NO: 247918 - DNA, 273 bp, Klebsiella pneumoniae
gtgacgcgtgtcgaaattgtagccgataccgtagtcgatattacgctggggcgtgaaacgaccggcgatgtttatctatggtacgccagccagaccggaagtaacggtaacggaaatctgtttgacagcgacacaacggtcgctgttgcgaattacgaatttcatgaagggacagggcaatatccggaatcaaatattccagagctggtaaaccgtccatacccactgaataacccctgtgtggcatttcgtcgccaggcaatcgctatttaa

SEQ ID NO: 247919 - DNA, 240 bp, Klebsiella pneumoniae
atggtgatgcaggacgggcgaacccataaacaaatttgctcacttttcaaacgcgccaacaaagattcgttctggtgcaaaaacgtgcttagcccgtcgaaacttcgggaaaaatgggatgagctgtcgttaaaactttctgctccactcaatagctcccgccaggaggcgtcgatttcgcgagccagcttcgaaggagttgattactcattgcctgaaaactcggggttccgctcatga

SEQ ID NO: 247920 - DNA, 240 bp, Klebsiella pneumoniae
atggtgatgcaggacgggagaacccataaacaaatttgctcacttttcaagcgcgccaacaaagattcgttctggtgtaaaaacgtgctcagcccgtcgaagcttcgggaaaaatgggatgagctgtcgttaaaactatctgctccactcaatagctcccgccaggagtcgtccatttcgcgagccagcttcgatggggttgattactcattgccagaaaactcggggttccgcacatga

SEQ ID NO: 247921 - DNA, 186 bp, Klebsiella pneumoniae; identical to SEQ ID NO: 150912

SEQ ID NO: 247922 - DNA, 1752 bp, Klebsiella pneumoniae; identical to SEQ ID NO: 244121

SEQ ID NO: 247923 - DNA, 198 bp, Klebsiella pneumoniae; identical to SEQ ID NO: 14615

SEQ ID NO: 247924 - DNA, 2394 bp, Klebsiella pneumoniae
  misc_feature (1045)..(1054): n is a, c, g, or t
atgttgagaatgatcatagatgatgatggacaacaacgtatcttaaaagaagttccttattttcattttattcaacatgacctaacaaatttaacccaacaagagcaacaagagagcctaacacagataagggaagccctttcttatcgggtattaccgactgagtcatggccattatttgaagttgaaatttcttggctaaataacgattgttacagattacatatcaatctagatttactgcagtttgataccatgagctttaaaattctgtttgatgatctatttaacgcctattcaggacaagaattaataccacaaacatttaccttccgcgactactgcttaaaaaatcaaacaaatcgtaacagtgatgagtggaaaatggcatggtgttactggcaggatctattatctgatttaccttctgccccatatttaccgataaagaattcatccattactgaacaacctcgttttacgactttccaacatcatgtttctatagcgcaatgggacaaattaaaacagaggtggaaaaagcatggtattacaccatcagcagggcttttaacactttttgctttagttttaggtcgctggacaaaatacccagcctttacactaaacttaactttctttaatcgtcaaccatggcacccagatgttacacaacttattggtgattttacctctgtactccctatagatatttatctagataacgactgtacattaaatgagtcaatggcaaaaatacagcgcagactttggcaacatttaagtaagtcccaagtaaatggtgtagagattttacgtgaatggggacgctataaaggggatagtagccaatctctgttacctattgtatttactagcatgttaggtatgacactagatggtgacaatattgatgaagcattaaatcagcttttcggccaacccgtatatagcttcgcgcaaacacctcaagtttggttagatcaccaagtaatggaaggaaaagaggggctaacattaaattggttctgcatggatgacatcnnnnnnnnnnacatctttgctgacggtttattaacaatgatgttctctgattatcaaagcttgatcactcaattatgccaagatgaagataataatcaatcagttgataagattattgcgcaacttccttcatatcaacatttagcaatagataatcacctccaatcacgctatcaacaactcgagcaaacattggaaaatcatccgcaaatcaaacgtgctcatgctatggtaatggtaaaagacgatacgaaagtagagcctcctctacaattactgtttgaagcctcttctgatattccactatccgttattaaacagcccaattggttacctaatttactttcgccatcagcttcactcagtgacattattgaaaagagttggcaacgatttgaggaacgagcacggtatggcatatgtcacacactgtatcgaaatgctctttttaccgagctaaacacaccaatcaccctagctgaaatagtggctcgtttaaaagcaaagcctcagtatgagaggctacttagtcagtggctagatttattatgcctgcatcacttattaaccaaagagggtgatcagttttatgccacaacacagtttattaacttatgtttatctgccccagtatttcaacaacctgttaatgattgggaatatgtactttgggattaccttgaacaatcactaacccaacatgaattactctttagtggtaaggtttctcctctttcactactttttaattcagatgaaattaccacagcactatacgccaaacaccctgcactaaattatttaaatcaatgtgcaaaagatattgttagtgcaatggttggtgcaacatcttcactcaatattttagaaataggggcaggtacaggagctaccactcaaggtatagtcgcagtacttaagaatacgcattactcatacacctttactgatatatcacattacttccttgataaagcgcgaaaaaaattcactgctgtaggagaaatgcgctatcaactctttgatattaatgcaccaatacaattttctcatcatccagataatggctatgatctgatcattgcatctaatgtattacatgatgcatcacatatcggccacgcactaaaacggattagaagcctgttaaaacctcaaggctatttattatttatcgaagcaaccgagtgtcaaagtgctatgcaaatggcgactgttggctttattgagggattaagtgcatatcaagataagcgtatattgacgaataaagcgatgcttgatagtgaaagttggcatgatattttaatcaatactggttttgaaactatttggtggagtatgaaatga

SEQ ID NO: 247925 - DNA, 579 bp, Klebsiella pneumoniae
atggcttgtgaaagtttacgctctggtgaatgcagtatggctattgctggtggaattggtatcacatttccacaaaccggtggttatctatatcagaaaggcatgatcttctcaccagatggtatttgtcgtccttttgatgcagaggcaaacggtacttttgctggtaatggatttggtattgtagtgttacgtcgtcttgaagatgccttagtggatggaaacacaattattgctgtattacgtggtagtgccattaataatgatggtcatcaaaaagcgggattcacagctccctccgtagcaggccaagtttcagttattagagaagcaatacaactggccgatattaaaaatgaagatattgaacttattgaagcacacgcaacagctacaccattaggtgatccaattgagtttagtgcattatgtcaggttttcgctgatcgctctcttactgctaatatcgttttaattaggccagtgatacctgctgctgtatccagatgtccgatattgcctttaactgagccaatagcgcatttagaagcagtaagagagcgatcagcgaaaacctga

SEQ ID NO: 247926 - DNA, 549 bp, Klebsiella pneumoniae
atgagtaatagcaacttgtttatagataatgaggtgcatatctggattggtaatctacaaacgataccatgtttaagtaaagctaaatccagaatgcacatcttaaataacgatgaaatttcatcgttattcgactacccttttataaaacaacgaaatatttttttgctatcaagagtcatgttacgcgatattttatcattttatttaaaaatttcaccagaagatgtaagattttcaaaaaatgagtacgggaaaccatttattttaaacgaatcaaaggaaagcatttacttcaatttatcacattcaaataattgtgttgctctcgctatttcaaatacatcatccgttggtattgatattgaatatttcaaccgtgatatagaaataaatagcattatagattattatttctcaaaaaaagaaaaaaaatacctatcttattttgacgagactcaaaaaaaacataatttctataagatgtggacattaaaagaagcctatattaaatcaagaggcattggactgtctcttatacacatctga

SEQ ID NO: 247927 - DNA, 744 bp, Klebsiella pneumoniae
atgattaatgaaatcattgcattatggtctgagttattaggtcgtgaggtcaatagtacaaatgatttcttccgttctggaggagatagtttgattgcaaccaaaatgatcagccaattacatcaacggggatatccagcaacattacaacagatttttacctatccatgcttagccgatttttgtgctcatttagagcaggaaaagcaatctcaacgagagtactcctctttgatacctctaagcgctgtatctgctccaaaaccttaccactactttatggtacatgcttctgatggtgatcccggtgtttacctacctcttgctgagtcgttaaataatacagtgtggggattaacagttacagatgcttcaaaactaactgatttggatacattgttatcattacatttatctagcataaaaacagcacaacagactggcccttatattcttattggttggtcatatggtgcttttattgccagttaccttgcagaacaactctcgcaacaaaatcattccgtattattagtattaatagatcccgtctatcgacatgattttattaaattttgtcatgatgactcagatagttcatcagatgaaaataagcagcttgcatgcactaaaagacttatgtcattcctacctgaaagtgacctaccattatctgatgatatcgcctgtttatggctggaagccaccaaccacccaacagaatggacatcacctgaaaaatag

SEQ ID NO: 247928 - DNA, 489 bp, Klebsiella pneumoniae
atgcagttcggaaaagtgctccatcgtgcaattgatcgtcgccagaactggcgtccactgcaacccctgtcagtcacgcttagcggaacattcctgcgtgcggatttcctggtgtggagcccgccgcttcagtttcgagcgtgctacgtgggttcatctccgacgacgtatgccgcaaaaggattcagagtcactgacgatgccggggacgttccggtgacgcgtgtcgaaattgtagccgataccgtagtcgatattacgctggggcgtgaaacgaccggcgatgtttatctatggtacgccagccagaccggaagtaacggtaacggaaatctgtttgacagcgacacaacggtcgctgttgcgaattacgaatttcatgaagggacagggcaatatccggaatcaaatattccagagctggtaaaccgtccatacccactgaataacccctgtgtggcatttcgtcgccaggcaatcgctatttaa

SEQ ID NO: 247929 - DNA, 228 bp, Klebsiella pneumoniae
atgctgcaggtggaagcgaactgctcctggcaccgcctgttcgttgacccgctcagccgggcgatgtactcctccaaaggcccggattttgagtacatgcaagcgcgccggcaggagggggtcgatatccacgatgcggtatacggactggcgtgccgcaactttaaagacgaaatggcagagcttgaatcccgaataccggtgaatgacatggaggataaacagtga

SEQ ID NO: 247930 - DNA, 1095 bp, Klebsiella pneumoniae
atggaaatggttgagccaaataattataaattcaaatacaattacgtttattacttctttatcgccaaatatttttcggatcatctgagagaggcagacgttgttaaagagattaaaaacgcggcctcaagcttgcatctgaaacaaagcatgaatattttaatgttcctgacacatcattccaaggatcagttcatcttagatctgataactgaccaagcaaagttattatttagcaaatttgaacctgcgaccatagatttagatactgattttatcaatagtattgtagataatcttcctgaggtttgttttattcaaaaagacaggcttgaatttagaagagaagtcgaagattcaaaagatttcagaagtgaagaaattgactcagagaacaatgatgatgagcccgacgaaagcgaacaaagagatagtaacgcagtatacgatggaattgatctgaatctcgagttaaatttaactattaaatccttggaattactggggcaattatcaaggaattattatggctcattaaaaattggccaaaaagaattactcttagatgaggcaataaatgcaccactaagatcattaaactttttacttagttcagctcgtgacgaacctgaaaaaacaattgaaacccttgagcaaaaaataaatgaagttttggcaggtaaaaagagcactacttcttctgaagttcgtgctttagctcgtaaaattctattcagaatgctgtttactattacatattcaattgtatctaagatcgcatcttcaattggcagcactcacttacaaccggttattgacaaagtgtgtgataataaaaacagcgatgccggtaaacttatcaagcttgcaagtattttagaagtaggtcaaaccatatctatagaagagctaaaaaaattaaatgggagcttaagtaaaaacagcctttcaaatttattagtgaaagcattagtagtaaattacttatatatgtttgaacgcccaaataagcaagttcaacagatctgtgcagctgtagacattaaatacgatgcaatatcgaaagaaattggatttcaaaaaataaacaaataa

SEQ ID NO: 247931 - DNA, 1275 bp, Klebsiella pneumoniae
ttgcaggccatggcgggcgtgtgcgtccctggaaactcggttaacccggtcactgggggcatttatgcccggattgttgcgtctgcagcgtcaatattcgcgggtgccagcgtgatgaagcttagtgaggactccccgggcaactggggaatcaccgaaccgggcagcgacgataccttgacacgtctaaccctggcgttagatgtcatggggggcgatttcggcccatccgtgacggtgcctgcagcactgcaggcactgaactctaattcgcaactcacacttcttttagtcggcgatcccgacgccatcacgccattactcgccaaagctgacttcgaacaacgttcgcgtctgcagattattcctgcgcagtcagttattgccagtgatgcgcgacccgcgcaggctatccgcagcagtcgcggaagctcaatgcgcgtggcgctggagcttgtgaaagaagggcgggcgcaagcctgcgtcagcgctggcaacaccggcgcgctgatgggtctggcgaaactgctgctcaaaccgatcgaaggtattgagcggccggcgctggtgacggttttaccgcaccagcagaagggcaaaaccgtggtgctggatctcggcgccaacgtcgattgcgacagcacgatgctggtgcagttcgcggtaatgggcgcggtgctggcggaagaagtggtcggcattgccaacccccgcgtcgctttgttgaacatcggcgaagaagagatgaaaggcctcggcagcatccgcgatgctgccgcagtgctcaaaacgctgccttccctcaactacatcggctatcttgaagccaatgaactgttgaccggaaaaaccgatgtgctggtttgtgatggattcacgggcaacgtcacattaaaaaccatggaaggtgttgtcagaatgttcctttcactgctgaaatctcagggagagggcaaaaaacggtcgtggtggctgctgttactaaaacgttggttacaaaaaagcctggcgaggcgattcagtcacctcaaccccgaccagtataatggcgcctgtctgttaggattgcgcggttccgtgatcaagagtcatggtgctgccaatcaacgcgcctttagcgtcgcgatagagcaggcagtgcaggcggtgcagcggcagatccctcagcggatcgccgcgcgcctggaatctttatacccagctggtttcgagctgccggaaagcgacagtgacgtgaacgcccgacagcaaagcgggacgaatggccacgattga

SEQ ID NO: 247932 - DNA, 630 bp, Klebsiella pneumoniae
atgaatcaaatagacttccagaaggcggctggtattagcgccgggttagctgcgcgctggtttccgcatattacagccgcgatgaaagagtttggcatcacttccgccatcgaccaggcaatgttcattgctcagtgcggccatgaaagcctcgggtttaacagggtagtggagaatttcaactacagcatcgccgggcttgctgattttgttcgttacggcaggttaacgcaggatcaggccaattccctcgggcgcagccagtcggaaacagtgttacctctggatcgccagcgggctatcgccaacctggtgtacagcaaacgcatggggaataacggggcaacagacggctggttttaccgagggcgtgggctcatccagatcaccggcctgaacaattaccgcgactgcgggaatgctctgaagattgatctggttaaacagcctgaattgctggcgaaggatgagtatgcggcgcgcagtgctgcctggttctatacctcacgtggctgtttacgttatcccggtgaccttgctcgcgtcactcagattatcaacggcggacagaacggtattgatgaccggcgcgcccgcttcctgaaagcaaaatcggtactggtggtgtga

SEQ ID NO: 247933 - DNA, 786 bp, Klebsiella pneumoniae
gtggctgcgcgtcttcaacagcgaacaacggcaataatgcgctttgcggtacagaacggcttaattgattacaatcctgcacaagagatcgctggtgcgatcgcaacagctaaacgaaagcatcgcgctgcgctagatctcaaccgcattcctgagttactccatcgtattgataactacaccggcagaccattaacgcggttagctgtggatttgacgttactggttttcatccgttcgagcgagctacgttttgctcgctggacagaagtggattttgaaacggctatgtggacgattcccggagagcgtgaaccgctggaaggtgttaaacattctcagcgtggttcaaagatgcggacacctcatcttgttcccttatcgcgtcaggccttagctattctggaaaagatcaaaagcatgaatgggaaccgagagctgatcttcgttggcgatcacgatcctcgtaagccgatgagtgagaatacggttaacaaggctttgcgagtgatggggtatgacacgaaaaaggaagtgtgtgggcatggtttcaggacaatggcctgtagctcattgattgaatcgggtctatggtcgagggatgccgtagagcggcagatgagccatcaggagcgtagctctgtgcgagcagcttacatccacaaggcagagcatctgggagagcgcaggttaatgctgcagtggtgggctgattatctggatgcgaatcgggagaaaggggttagcccgtttgattttgggaataatggtaatgtgttgaaatga

SEQ ID NO: 247934 - DNA, 345 bp, Klebsiella pneumoniae
atgaccaccagccccggagccttcggcgcgcgggaacaggtgcggggccgtctctttcagagattcagcccactcaaccggggtgagcggagtttttccgtctttaccgaacagaacatcgccatttgcatcaactgctacggcctcgccttcgtcgttgagctggaatgtgcctttagcacgaagaatcagatcgtcggatgcttctggcagcgcgccagccttaagcgctgcgctgcggatagcatcacccaggacacgatcacggaatttgctggagaacgcttccgccttttcagcgcgttcattagcggctttgatttgcttatcaacatcagcacgtag

SEQ ID NO: 247935 - DNA, 474 bp, Klebsiella pneumoniae
atgccgctcggcgcgcgcggctttctcacgctccaggcgcgcctgtcgggcctcgaatcgggctttggcttccgcagcgtgctgctcttcctgacgaatcgccgcgatctcggccttttcctgacggaagtactgcaccagcggaatattacttggacatacccacgcgcaggcgccgcactcgatgcagtccgccagattatgggcagtggctttatcgtgctgctgacctttgctgaaccagtacagctgctgcggcagcagatcggccgggcaggcgtcagcgcaggcgctgcagcgaatgcagcctttctcttcctgcggttcgcccatctcactggcggaaggcgccagcaaacagttggtgatcttcaccaccgggacgtcgagccacggcagggtaaagcccatcagcgggccgcccatgatcaccattggctcggcgctggggcagaagccggcatcgttcaatag

SEQ ID NO: 247936 - DNA, 792 bp, Klebsiella pneumoniae; identical to SEQ ID NO: 180612

SEQ ID NO: 247937 - DNA, 168 bp, Klebsiella pneumoniae; identical to SEQ ID NO: 180609

SEQ ID NO: 247938 - DNA, 330 bp, Klebsiella pneumoniae; identical to SEQ ID NO: 244778

SEQ ID NO: 247939 - DNA, 249 bp, Klebsiella pneumoniae; identical to SEQ ID NO: 206975

SEQ ID NO: 247940 - DNA, 609 bp, Klebsiella pneumoniae
atgattgatcgtatgaaaacacgaggcgaacgactgaaagcacgccgtttagaattgaagatgacactgaagcaagtcgcgcaaagtgtcggtatctctcttcctggcgtccaaaacttagaacgtggcgacgttatgccgtcgctggagatcgggcttgccctggcgaaatgcctgcgcaaacctgtgcaatggatactttttggtactgaatctgatcctgaccgcgttcctgttattggcacaacagagagtggtccggatagcgactggcagctaggagaacctgccaacacagaacgattcctgccatttgttagccaacgggaaaccgtttatgcgctcactgtcgggaaccaggttcagcacagctatcagccgggtgacgtcgtcctggttgactcagctctcacgccagttccgggtgaggatgtgttagtttgtgataaagacgggaaaatctcgatacagcggttagcgcgcttcgacgatgagcgctactacttagatggcgttaactctcaacgagttatccatgagaaaagtgatcttcaatttgtgcaccaaatagtcggtacgatcaaatcgttcatgatagagggtagatga

SEQ ID NO: 247941 - DNA, 228 bp, Klebsiella pneumoniae; identical to SEQ ID NO: 200097

SEQ ID NO: 247942 - DNA, 231 bp, Klebsiella pneumoniae; identical to SEQ ID NO: 236285

SEQ ID NO: 247943 - DNA, 477 bp, Klebsiella pneumoniae; identical to SEQ ID NO: 229136

SEQ ID NO: 247944 - DNA, 648 bp, Klebsiella pneumoniae; identical to SEQ ID NO: 247786

SEQ ID NO: 247945 - DNA, 309 bp, Klebsiella pneumoniae
atggcttttggctataacgcatgggatgccaatggtgtcccaaataactatggaatcaagcctgtatctgttacaggctttgtttttattgacgtaaatcagaaatcaggacaatgggagttttccattccgcagggaagaaatatgtcgtttttctttgttgggaatggggaccagccaggatcatcacgtcggcgcattactcaatcgggaaacgtgatcaccatttctgatgccagtgatgaggatttctccgcaggaacctacccggcgactcgcgggtttatcattgttcaggtagtgaggtag

SEQ ID NO: 247946 - DNA, 336 bp, Klebsiella pneumoniae; identical to SEQ ID NO: 139380

SEQ ID NO: 247947 - DNA, 1173 bp, Klebsiella pneumoniae; identical to SEQ ID NO: 139381

SEQ ID NO: 247948 - DNA, 435 bp, Klebsiella pneumoniae
atgctcatcgggtacccgtggtataccgggaatattctgtttgcctttgccgtcaccggccaggtcctgcggtgggtcagccagccgtcctggtcttacaccctcccggcggctggactgctggtcgcctggatacccctgtcgaccgccagctacggcatggccggagtgggtatgctcaccgccagctggctgctttgccgcgcacagcatgcaccggaacggctgggatacggggtgctgtgggccctcatggtgttgctgatgaatatgcataacgtgagtgaatcggcggccgggctggcgattgcgctgctgacgctgatcgtgtgttcatctgccggagaacatgtgaaacgcttctggccgcggcatttctttgtgatgttctatgcagtgcacctggcggtactgggtattgtcatctcgatgtaa

SEQ ID NO: 247949 - DNA, 435 bp, Klebsiella pneumoniae
atgttcatcgggtacccgtggtataccgggaatattctgtttgcctttgccgttacgggccaggtcctgcggtgggtcagccagccgtcctggtattacaccctcccggcggctggattgctggtcacctggatacccctgtcaaccggcagctacggcatggctggagtgggcatgctcaccgccagctggctgctttgtcgcgcacagcatgcaccggaacggctgggatacggggtgttgtgggccctcatggtgttgctgatgaatatgcatgacgtgagtgaatcagtggccgggctggcgattgcgctgctgacgctgatggtgtgctcatctgccggagaacgtgtgaaacgcttctggccgcggcagttcttcgtgatgttctatgccgtgcacctggcggtactgggtattgtcgtctcaatgtga

SEQ ID NO: 247950 - DNA, 273 bp, Klebsiella pneumoniae; identical to SEQ ID NO: 223481

SEQ ID NO: 247951 - DNA, 351 bp, Klebsiella pneumoniae; identical to SEQ ID NO: 223480

SEQ ID NO: 247952 - DNA, 381 bp, Klebsiella pneumoniae
atgaacacacagaacgtcaacgtcaaaaccgccaccaaagaatctaccgaaagatgggttgaaaaccttctggccaacgcgattagcgagcaaaagagcctccttatgtatctggcggagcttaaaaacaagcgccttagagaaagcgaaagaagtgaactggtatggggcacgttgatgcgtatggctgataacgtcctgggggcgggagtggttgactggcacgctgacgttctgcaggtgcatttcggcgttgcacaaccgtggcttcagtcccggaaactcgttgagcttctttatggtgatatcggtgaggaagcgtggaatgacgcacgcaaatacattgctgactcaatgcgcgctgaacgccatatgccatga

SEQ ID NO: 247953 - DNA, 585 bp, Klebsiella pneumoniae
ttgagttcatttttaaatgataataggatgactaactcatcttatttattttgggtaaatccaattagatatagaattactcagtcttggactggttatgattcttcactggaaggccattctagattgcctgatatcaaatcagttattgctattgctgagatattttcaaagcgggatgaaacattatcttcaagagatatatttactacatctgtgcttgctttacttatgtgcgcaccgagtaggatatcagaaattttagctttgccagcggattgtgaaattacagaatgtgatggaaagggcattcaaagatacggtttgagatttttttcagcaaaagggtatgaaggtaatataaaatggattccaactttaatgatacctgtagctaaaaaggctattagcagattaaaagaattatcaagtcaagcgaggttattagctgctggaattaaaaaggattactctaattcaacgatggaaacccttaaagaaaatatacctccagatttcccttggtatgatagagagactgtctcttatacacatctgacgctgccgacgatctactctgtgtag

SEQ ID NO: 247954 - DNA, 480 bp, Klebsiella pneumoniae; identical to SEQ ID NO: 104057

SEQ ID NO: 247955 - DNA, 174 bp, Klebsiella pneumoniae
atggaaaacctcaaccaggcgagtgtgcagattgccgctttccagtcccgcgttcaggttcagcaggacgccttgctcgtggtggacaggcaaatgagttacatgcgccagcaggtctctgcccgcatgatgacccgctaccagaataactatcattttggggggaatcagtaa

SEQ ID NO: 247956 - DNA, 186 bp, Klebsiella pneumoniae; identical to SEQ ID NO: 150912

SEQ ID NO: 247957 - DNA, 255 bp, Klebsiella pneumoniae
gtggccggggaggcgcgtaaagccggcgagccggcggaccgggtgaaagaggttatcggggacgtcattcgcggactggagcgtgaccggccgggtacggagaaaacgacgctaccggatgatcctcagttccggcgccaggaggaggcgattcagcaggtggcctcagaacgtctgcagcgtgagcgtctgcaggctgtggagcgggacatggttcgtgaccttaaccgcgagaaaaccctcgggggcgactga

SEQ ID NO: 247958 - DNA, 255 bp, Klebsiella pneumoniae
gtggccggggaggcgcgtaaagccggcgagccggtggaccgggtgaaagaggttatcggggacgtcatccgtggactcgagcgtgaccggccgggcccggagaaaacgacgctaccggatgatcctcagttccggcgccaggaggcggcgattcagcaggtggcctcagaaagtctgcagcgtgagcgtctgcaggctgtggagcgggacatggttcgtgacctgaaccgcgagaaaaccctcgggggcgactga

SEQ ID NO: 247959 - DNA, 441 bp, Klebsiella pneumoniae
atgaaaactaccctgataaagtctgttctgtttgcctccatgatggccgcatctggctcacttttcgccgccgataatggcctgatcgcgatcattaccccttcacatgataatccattctttaaagcggaggctgacggcgcagcggcgaaagcgaaagagctgggttacagcaccctggtcgcctcccacgacgacgacgtcaacaaacaaaaccatcgtggtgataagtttgccaaccccgccctctggctggtcgaacacagccaccgtgtcaccagatcgcagtggccggctgatatcgtaatcgtcaggcagcgctcggccattcagtttcacgataacatcgcggtgcagctgcagggaatccagcaggctcaccagtgtggtgccagcatctaccgttccccgctgcagcggggcgccaggcagcctctgtaa

SEQ ID NO: 247960 - DNA, 1152 bp, Klebsiella pneumoniae; identical to SEQ ID NO: 247812

SEQ ID NO: 247961 - DNA, 159 bp, Klebsiella pneumoniae; identical to SEQ ID NO: 247813

SEQ ID NO: 247962 - DNA, 2640 bp, Klebsiella pneumoniae
atgctggttgtcattcgcacccctgtgcagatcatcgattacagtaacgtggcgcaggtctatgaagtcgataatgtacctattggtctggccattcctgcgtcgctgacaacgcgggtgggaaacgcgcttatccagagttatgagatggtcttcgcgctgccggacagcgtcacgtacagtaaaacggggatgttatttggcagtaatctggtcgcgaaaagtacggattttttatcacaaaatcctcagattacgacgctgttttccgattacgtacaaaactgcgtgatgggcgatattttcctcaatcataagtactcttttgaggaattactgaattcacctgatccgtatacactgatttttgcaaacccaagcccactgcgtggcgtgtttgataaaaacaaccagttccagacatgcgaggaggcctcacgggatctgaaatcggctcttgcgctggatactcagacagggggtaaaacctggaactactatgttcgtcagctgtttggtggcaaacctaatcccgatctgcttttcagccagatgattggcgacagctacaattacttctacagctcgggacagagcgccgggcagattatccgccagaacgtcacgatgaacgccctgcgcagtgggatccagagttatgcggcccgcagcggggacaccgccagtctggtcaatatggctaacacatcatcccttgaaaagcagcggctggcgcaggccacaatggggcaccaggcgcttcgcacacttccgctgatgcagaccgttatcatggggataatgattgggatgttcccgatcatggtgatggctgccatgtttaacatgatgacgatgcaggtgcttaaggggtatgtgtttgcgcttatctggctgcagacgtggccattactgttcgccatcctgaacagcgcgatggcctactatgcgaagcaaaatggcgtgccggttgttctctctgagttgtcgcaggttcagctcaaaaactcggatattgcgaccaccgcgggttatattgccgtgatgataccgcccttgtcgtgggggatcgtgaagagcatgggggccgctttctccagtgcctacagccatttttcttcttcggggctcagtgcaacatcgcaggcggcctccggcgtggtggacgggaattactctttcgccaacatgcagatggagaacgtcagcggctacagctggggtaccaacagtacaaccagtttcggacagatgtcgcggcagctggcgaatgggggtatgagcacgcagacgcgggatggatcgatggtctgggacagtggtggtgcaatgtcaaaactgccggtggatatcaacgtcggtcgtcagatagccagtgcgcagcaacagatggcccgtgaggctgatgtccaggccgaaagcgcgctgcatggctataacagcagcgtgacaagtgcctggaatagtctgcagcaatttggcaccaataaagggaacagcgcctcaacaacgaccggagctgatactaccgagtcttcacaggatttgatggccagaagcaagatgtggaatgcggttgttgctaatgcgaaagccaacaacatcagtaatgaggagtctttccagcagttgatggatgagtcaagaaaaagaacaatatcgggtgagttgtatggcggtgctaaaattgactcttctgatgcagctcttggtaaattaggaagctgggttaccggaggcagtatatatggaggtattaaggtggcagctagtggagccgccactacggggtcaacggataatgttgggcgatcaggtaggcattcagaagacaatcgccatgatatcagtagtcaggcggcgaaagactttaaagaagcttcggattactttaccagtcgcaaaaccaccacatcgggtaattttaccgataataatgccagctcgcgtgttgaccagtttgccgcgtcactctccagtgccaaaaacagctatgaccagtatacaaccagccggacacgcagccatgagtacagtgagatggcgtcacgcacagagagcatgactggccagatgagcgagaatctcactcagcagtttgctaactttgttcagcgtcgcgctccacaggatgccgaggccattctgaccaataccagttctcctgaaattgcggcgcagcgtgaagccctggcgcgtgaattcgtcaaagagcaggtagaacccagggttgatgctgcatatcaacaggggcgtgaaagcatcggacagaatatgacaggggtgtcaggaggtggagacaatggttcggtaatggccgactacggacataattccgcccgtatcgatgcgatgacgcaacgggcagatattaaggataatgtgggtcagaaagtggatgggatgattacagagaataaacaacagcatcagaaaacccgtgaaaacatacaacagcaaggtgttgaggtgaaaaaagagaatgctgacctggaaaaagaccacaaaacaaaacaaaatgatttcaaaaattcttataatgataagaacgaacatcaaaccagactgcctggcgcggattcaactaaagagctactggataaagcaaccaaattagaaaacgagaaatcaaagagatag

SEQ ID NO: 247963 - DNA, 393 bp, Klebsiella pneumoniae
atgatgctgttttttagaaagtatggttttttgtttatccctccagtctactggctcatctatctgggagccagactgacttacaatggactggcaggagagttttctgctgatttctttcagggtattcgacatgaaggcgtctatattatctgtagtttgtgtgtattttattttttctgcttagaggtggaagttggtgatggggagttctcagcgaacattctgttcctgattgttttctttcatgtggttttattatttatcactctgcttatttgtttgtggcaaggggaggtgttgttggattcgatctttatgggtcagattattgcctccatgtgtttattgttttttattccagtgctttccattataagaaggagtttctag

SEQ ID NO: 247964 - DNA, 288 bp, Klebsiella pneumoniae
atggaaaaacaggcggaacagactgcccgggaagtggccggggaggcgcgtaaagccggcgagccggcggaccgggtgaaagaggttatcggggacgtcattcgcggactggagcgtgaccggccgggtacggagaaaacgacgctaccggatgatcctcagttccggcgccaggaggaggcgattcagcaggtggcctcagaacgtctgcagcgtgagcgtctgcaggctgtggagcgggacatggttcgtgaccttaaccgcgagaaaaccctcgggggcgactga

SEQ ID NO: 247965 - DNA, 249 bp, Klebsiella pneumoniae; identical to SEQ ID NO: 138141

SEQ ID NO: 247966 - DNA, 285 bp, Klebsiella pneumoniae; identical to SEQ ID NO: 15281

SEQ ID NO: 247967 - DNA, 204 bp, Klebsiella pneumoniae
atgatgcttacccttgagcgctgtgagccctgcgaaggggccggggtggcctgttattccggatcagccgtcacccatgtggggatcgttgtcagtatcggtggcctgctgcatgtggcggaatgcaatccgggaacgaacgtcacctttctgccgttgccgcggtttaagcgccgatttgtcaaagtggagttctggcaatga

SEQ ID NO: 247968 - DNA, 921 bp, Klebsiella pneumoniae
atgtcacgtaagtccgtcagcaagatggagcgcgacattgaggatcggtattacgcgataaaggtggcgctgaaatccctgttcgaccagcggctgaccgggcgcgagcgagaggttaacagccataactggcacttcctgtgccacgttaacggtgccgagccaacgctataccaggtcaacgctggcaagttcatctacgatatgtcgccgcaggagttggcggacctactggatatcgtgcagaccattctggacgatcacctgctggaaggcggcgagcaaaacctgtgggcgatggattacgtcgccacagaggcgcagcgcggcacgctggaggccttcaacaacctgtcgcagcagtctcaggtgtacgccagtcagacgacgctacagcagcttttaagcagccctgcataccagaaccagatcgccagcgcctacatcagcacgtatagcgactggaagctggaagctgaccgggcgcgcggtgacctggcgaacatcatcgcggatgccgttgggcgcggtgtgaatccgcgcgaaacggcgcaggtgataagcaagcgccttgatgtctctatgggccgcgccaagaccatcgctcagactgagcaggtcggcgcgctgcgccaggcgcaatggaacgaaacggactgggcagcggatcggcttgggttgaataccggcctactgtggctgtcggcgctcaaacctacgacgcgtagctggcacgccagccgtcacggaaaggtttataccaccgagcaggtgagagacttctacgctgaaaacggcaaccggtacaactgctactgtagtcagattccggcactgctcaatgacgacggcagcatatttaacaaagggctggctgagaagctggcgaaagaacgtgaacagtggcccaaagcggcctga

SEQ ID NO: 247969 - DNA, 243 bp, Klebsiella pneumoniae
atgccatctccgctgcgtatggcgtttctaggtaatacgtcaaaaactgtttggatggtcgttggcacgtatggtatctgtcgagggctatgggttaagtatgtgttttcttggtttctctatttcttaactagtttcaaaatgttaaatccatcacaaaaatgcggtagtagaaactatgagcatatgatttgccattttttgagggttgaatgtaaacaagcctgttggcaaaattgttga

SEQ ID NO: 247970 - DNA, 528 bp, Klebsiella pneumoniae
atgatctctaaatatgaatggctcgattatgcgggatacttacaaaccgccccaggcctcgcggccagcctgcaactggcgcgggtgatgggtctgcgtggtcaggaagcggtacagtgctgccagtcgctgaaaacctgggataaacagctggaaaaaggggctgaacgtctgtcggtgatctttggcaccaaaggcggacgaccgcgcataacgcaggtgattgaccgggaagccgttcgccaggctgtgaaagaggcactgaacattgccgggaagcgtgacgggcatctgatcgacaaaccggatctgaaatccgcgatggactactggcacaaccatctccgcgatgccgggctgacgggcgaatactctccccactctctgcgctatgcctgggcgcaggacgcgatccagcattaccaagagcagggtctgagccacaaagaggcgctggcggtaacctcaacggatctaggacatggagatggtagaggtaaatatattgagcaagtatataatcgttaa

SEQ ID NO: 247971 - DNA, 423 bp, Klebsiella pneumoniae
atggcagcaaaaggtttttatctggtacagggagacagaacgacctgcggcggaagaatcactacaggcgcagaagatcacactctgtttgataaacctgttgcccgggagcaggacagcgtcacttgcggaaagcacgcagggctatacaagattgccggtggcatcgacaacgataccattcatggccggcgaatggccggaaccctcgacagctttagtacttgcccctgtaaggcgaggtttattccatcaatgatgaatgatacttatgagaaaggaggtgaatgcataactactttattttcactcaatgggcttatggcatctttacaggaaccctataagaatcttcatccagaaaataagactgaacgacagtgtactcacacagatgggcgattaaagttgcagaatatataa

SEQ ID NO: 247972 - DNA, 294 bp, Klebsiella pneumoniae; identical to SEQ ID NO: 142982

SEQ ID NO: 247973 - DNA, 246 bp, Klebsiella pneumoniae; identical to SEQ ID NO: 199455

SEQ ID NO: 247974 - DNA, 1281 bp, Klebsiella pneumoniae
atgagccaggatgacactcccgaccttgccgcgccgcaggcggacaaggtggcgccggaggcagtggcgctgcgcgcccagccgcgtccagtcacacgcctgaaccggcgctcgctggccatccttgccggcgtcctagcggtcgccgtgctcggcgcgctgatgtggtcgctgcaacctcatcgacgcagcacaggcgagcagaccgagctttacaacgtcgatcgcgtgtcaaagtcggaaggactggatgcgctgccgacggactattccaagctgccgccggcgttgctgcctgccgttcccgaactagggccaccgctgccgggcgatcttggcccggctatcgtgaagtcgcagcaaccggcgacggctgcctacgcggcccccggtcacgacccgaacgatgccctgcgaaaagaagccgaggcggccgcggcctcgtccgtgttcttccgctcgggtgggcagaatgcggcgccggtagcgcagacacaggtggccgctgcgccgggcttcgccgccaatgcggcgtttgacccgctggcggccgggccggcctccacggcggcccaacctgctgacccgacagcggtgcaaaaccggcaagaccagaaagaggctttcatgaaagctggccccactgaaacccgtaattccggcaatctgactctgccaatttcgccgtatcaggttatggccggaacagtggtcgcaggtgccttggtgacgggcatcaagtcggacttgcccggcgacgtgatcgccacggtgacggagccggtctatgacacagccaccgggcgcttcctgctgattccgcagggttcgcgcatcctgggcaaatacaacagccaggtcagctacgggcagagccgcgttcaagtcgtctggaaccggatcatcctgccggacacgtcttcgctcacgctcgacaacctggccggcaccgacccagccggctatgccgggctggaggacgatgtggactaccactggggccgcatctttgccggtgcggcactcaccacgctgctgggcgtcggtgccgagctggccgcgccggagaaccggcaggatggtgatcgcgtcatcatcgctgggcgcgacagcgcgcaggacagcatcaatcaggtcggccaggagatgacccggcgcaacctcaacatccagccgaccttaacgcaacggccgggcctgccggttcgcatcatcgtcaaccgggatctggtgctgcggccgtaccagccgctgttcttcaaccgggggacttcacgatga

SEQ ID NO: 247975 - DNA, 993 bp, Klebsiella pneumoniae
atgaaacttcgtttccgcctttacgttgttcctttgacgctgctggccctcgcgggctgcgcctcgcaggggaagccgccgccatccatctcgctcgacgagacggtgctggcccagccgttgcccgaaccgcccaagcccgtcgaagtcgtcgccgtccctgaaccgctggcgctgccggcgcagttgaagcccctgccggaactcgatgaggcccccgttgcgccggagccggccgacgaaaaggtgcgcgtttcccgtgccaatgcagaagcgcgtatcgcgcctacccgtgagggctacgtcaacgcgattcaggtgtggccgttcaccgatggcgcgctttatcaggtctatgcgtcgccggggcgcgtgacggtggtttcgcttcaaccgggcgaggaactggtaacggtcgccgccggcgataccgtgcgctggatcgtgggcgacacgtccagcggcggcggggccgatctgcgcgtcaatgtgctggtcaagcctatccgctccggtctgaaaaccaatctcgtcatcaccaccagtcggcgcacctacctgctggagctgacctcgaccgagagggcatggatggcgtcggtgtcctgggactatccgaaagaccgaatgctcgcgttgcagcgccaggcgcaggcagcgcaggcaacaacgcctgtcgatacgggcctgtcgctggacaagatccgcttccgctacgcggtatcgggcagcaacccgccgtggaagcctctgcgcgccttcgatgatggagagaaggtctatatccagttcccgccgggcatcgcccagggcgagctgccgccgctgtttgtcatcggcgcgcagggcgacgggcaactggtgaactaccgttttcgctcgccgtactacgtcgtggatcgcctgttcggcgcggccgaactgcggctgggcggcgatggcggcgacgtggtgcggatcgagcgcaccgatggtgttgcacggaggaactga

SEQ ID NO: 247976 - DNA, 705 bp, Klebsiella pneumoniae; identical to SEQ ID NO: 199452

SEQ ID NO: 247977 - DNA, 1266 bp, Klebsiella pneumoniae
atgaacgacgtgaccatcatcgaccgtttcctcgatacgttctcgcgctacatcgactcgggcttcggcttattgcagggcgaagtggcatttctcaccgccacgctcatcgtcatcgacatgacgatcgctggcctgtattgggccatgagccacgccaccggccagggcgacgacgtgatcgccaagctgctgcgcaaggtgctctgtgtcggcgcgttcgcctacatcatcggcaacttcaactggctggcgagcatcgtgttccgctcgttcgccggcttgggaattaccgctaccggctcggccatcacgatggagaacttccttcagccgggccggctggcgaagaccggcatcgacgcagccgcgccgattctggaacagatcggggacatggctgggttccccgaggtgttcgtgaacatcgaccctatcgtggttctgttcatcgcctggctggtggtgatcctctgcttcttcgtgctggccgtacagcttttcatcacgctgatcgagttcaaactgactacgctcgccggcttcgtcttgatcccgtttgcactctggaacaagacctcgttcctcgcggaaaaggtgctaggcaacgtggtgtcgtcaggcatcaaggtcttggtgctggccgtcatcgtcggcatcggttcaggcctgttcgccgagttccaggtgcatcccgacgaaccatccatcgaccacgcgctggtcgtgatgctggcctcgctcgcgctgctggcgctgggcattttcggccccggtatcgccaccggcctggtgtccggtgcgccacagcttggtgcgggcgcgatggctggtgctgcggtcggggctgtcggcaccggcgttgccatcggcgccgccgtaacgggcgtgggcggcgccgtcatggccggggcacgaatggccccggcggccgcaaagctggccggtgccggtgcgcgtgccgcgacttcggcggccggcagtgcccgatcggcgttccaggccggttccgctgttgggcagaaggtggccgactccttccgcgctggctggaacggcacagaagccggcagcgacggtgctggccccggccagaccgcagacggcaccgcaggctcgcagaagcaacagcaaccggcctgggccaagcggatgcaccgccgccagcaggctacccatgccgcgaccactgccgcccacacgctgcgcggcggcgacggcggcggctccgggcaaggcccgagcctgcgggattccgatacctaa

SEQ ID NO: 247978 - DNA, 327 bp, Klebsiella pneumoniae; identical to SEQ ID NO: 199450

SEQ ID NO: 247979 - DNA, 744 bp, Klebsiella pneumoniae; identical to SEQ ID NO: 199449

SEQ ID NO: 247980 - DNA, 2451 bp, Klebsiella pneumoniae; identical to SEQ ID NO: 199448

SEQ ID NO: 247981 - DNA, 270 bp, Klebsiella pneumoniae; identical to SEQ ID NO: 117517

SEQ ID NO: 247982 - DNA, 387 bp, Klebsiella pneumoniae
atgacgcacgttgatgctttccgtctttccgtaaatcctatttctcgcctgtccagcatggcgcggctgcgccacctggcccgtcccgcagggcaagggctgctgctggccgcgctgatgctgttgctggcgggcacggcgcaggccgccggttcctcgatgccgtgggaagggccgctgacctccatcctcgaatccatccaagggccagtcgcccggctcgtggcggtgatcatcatcatctcgacggggcttgcgctggcgttcggtgataccagcggcggctttcgcaagctgatccagatcgtgttcggcctgtccatcgcgttcgccgcgtcctcgttcttcctgtcgttcttcagcttctccggaggggccgtcgtatga

SEQ ID NO: 247983 - DNA, 1071 bp, Klebsiella pneumoniae; identical to SEQ ID NO: 199445

SEQ ID NO: 247984 - DNA, 477 bp, Klebsiella pneumoniae; identical to SEQ ID NO: 199444

SEQ ID NO: 247985 - DNA, 1998 bp, Klebsiella pneumoniae; identical to SEQ ID NO: 199443

SEQ ID NO: 247986 - DNA, 906 bp, Klebsiella pneumoniae; identical to SEQ ID NO: 199442

SEQ ID NO: 247987 - DNA, 531 bp, Klebsiella pneumoniae; identical to SEQ ID NO: 199441

SEQ ID NO: 247988 - DNA, 237 bp, Klebsiella pneumoniae; identical to SEQ ID NO: 149275

SEQ ID NO: 247989 - DNA, 318 bp, Klebsiella pneumoniae; identical to SEQ ID NO: 199439

SEQ ID NO: 247990 - DNA, 921 bp, Klebsiella pneumoniae; identical to SEQ ID NO: 199438

SEQ ID NO: 247991 - DNA, 1404 bp, Klebsiella pneumoniae; identical to SEQ ID NO: 199437

SEQ ID NO: 247992 - DNA, 642 bp, Klebsiella pneumoniae
atgccgccccgcgcgaaaacaaagttgccccccccgtccactgcccatagcagcgccgatgcgcagcccggcctccagcaaggagcccagcgaactcgcgaccgcatcctgcaggccgcccgcgaactggtgctggaggaaggtgccagtcgcttgacactggacgccgtcgttgtgcgggccgggttgagcaaaggggcgtttctctatcacttcaagaccaaacgcgatttgttcgtgacactgatcgacgagatgatccgggcgttcgacgcggtacaagccaatcacgagcgcaggtttgccggagatccggacccctggctgtcgagccaggtggaagcgatgcccgacgacgagatgcagaagatgggcgcagcgctgctcgcggcagctgcggaagatccaacacttctcgacccactgcgcgagtggtaccgcgtgcagtacgaacgcgtgcgtcgatccccgcgtggcaccgagaccgcggcactcatcatgctggcattggatggcgccctgttcgccgatcttctgggtttgccaatactcgcacccgcagagcggcggcatttctttcgggcgctccaggatctcgcctcgggccatctcgaacttgtcccggcaaaaggacgcacatga

SEQ ID NO: 247993 - DNA, 1167 bp, Klebsiella pneumoniae
atgagtcgcgtccgtagcggtgtcatgaccgcgtgcgcaccgcgctccttggcggttgcttgcacactatccatttcgactctgctctcagggtgcggaaactcgcaatccaccgtatccgagcctccgcgcgcagtgaagctcgccgccgcgcagtcggatctcccgcatagctctcgcatcgaattgactggctcggcgcgagcaaccgagcgcagcatcctaggatttgaaacaggaggacggatcgccaagttgaacgtcgacgtgggtgaacggttctcccgcggccaagtcctggcagaacttgatgcgcaacctgaccggcttcgcgtgacacaagcgcaagcatccctggcggccgccgaagccggcctgatggatcgacgtgtacagacagatcaacagcgccggttgctcgaaagcgaagtcatctcccctgctgcgttcgagagcgcgaaggcgcagctagcggtcgcagagggtcaagcgcgcactgccaaggcggcgcttggcctggccgaacgagcacaacgtggcacgatgatcgtcgctcctttcgatggtgtcgtggcggaaaagctggctttggcgttcaccgacattgctgctggtgcgccggtatttcaggtcgacggcgtgcgcagtggcactgagatcatcgcgaacgcgtctactacacaggcacctcacatagatgtcggccaacgcgcagaactgagctggagcggagccgaacaaccaatccgagcggtggtacgtcgtgtcggtctgcgcgccgaaaatggctcgctcctacccgtggtgctagtgcctgaagataacgcgcaagcgcgcgcacttcggccaggtattcccgtacaggtcgtgctcgacgcacctgcggcaacctccaagacctctcggcccgagactgtatccataccttatgcctcgctggtgctcggcacgaagccgggcgaggcttccgtcttcgtctacacccctgaagataagaaggtgcaccgtcgcgcggtgcgcttcacgccggtacaggaaggagacagcgcgcgcgtcctcgctggactcaagcccggcgagacggtggttgccgccggaggaggatggctcaccgatggacagccagtgacaccactggaagccaccactcaattgaccaagcgctaa

SEQ ID NO: 247994 - DNA, 3105 bp, Klebsiella pneumoniae
atgaagatcaccgagatggcgctgcgcgccagtcgacttacctactttgtagcgctcatcattttcgtcgccggcatcgcgaccttcctgaattttccttctcaggaggagccgactgtcacggtccgcgatgcgatggtcacggcgttgaacccggggctgcccgccgaacgcgttgagcaactcattgcccggccgatcgaggagcgcttgcgcgaactggcagaggtcaagcgcgtgacgagcaccgtgcgcgcaggcagcgccatgatccaggtcacgatctgggaccgctacaccgacttggcaccgatctggcagcgcgtccgggccaaggtcgccgattcgaaggatgccttaccacagagcacgatggggcctttcgtcgacgaagacttcggccgcgtcgcggttgcctcgattgcggtcactgcaccaggttactccatgagcgagatgcgcgtcgcgctcaagcagatgcgcgaccgcctgtacaccgtgcctggtattgagcgcatcactttctacggcctgcaggaagagcgcgtctatctcgaattcgatcggcctaggctcgcgcgattggagctgacaccacagggggtgatcgaccaactcgtcaaacagaacgtcgtcgcttcgggtggacaaattgttgtcggcggcatcaatgcaaccttggcggtcagtggcgaagtgcgtgacgctccctccctgcgagcaatgccgatcgcgctgccacgaccgcaaagtagtacggcgcccgtgccgacgatcgcattgggtgaactggcgcaggtgagtgtgcggccagccgatccgccggaatctgctgccatctacaaaggccagcccgctgtcgtcatggcggtttcgatggcctccggtcagaacgtggagcagttcggaaaagcgctcaaagcacgggttgcagaccaggagaagctgctgccggcgggtttcgatctgtcatacgtcactttccaggccgatgtcgtcaagcacgagatgggcaaaatgaaccacgtcatgatggagacgatcatcgtcgtcctcggtgtcgtcgtgctatttctcggttggcgcaccgggatcatcgtgggcatgatcgtgccgttgacgatcctcagtgcactcatcgtcatgcgcgcgatgaacatcgagcttcagaacgtctcgatgggcgccatcatcattgcgctcggcttgttggtggacaacggcattgtgattgccgaagacatcgaacgccgcctggccggtggcgaagatcgtaagcatgcctgcctcgaggcgggccgcacgctcgccattccgctgctcacgtcctcgctcgtgatcgtgatcgtgttctcgccgttcttttttggccagaacgccacgagcgagtatctgcacaatctcgtggtcgtgctggcactgacgttgttcgcttcgtggctgctgtgcctgactgtcacgcccctattgtgctaccacttcgccaaaccccatcacaagcaggagcagggcgacgcctatgacacccgcttctaccgtggctaccggcgcgtactggagtgggtgctccaccataaggcggtctatgtagcgtcgatgatcgcggcgcttgccattgcgctgtatggcttcaccaccctgccgtacgatttcatgcccaagtccgaccggcttcagttccagattccggtgcagctcgcccccggtaccgactcgcgcgaaacgctcgcccgcgtgaagcagatcagtggttggctgggcgacacgaacatcaatccagaagtctccgatcacatcggctacgtcgccgatggtggcccgcgcttcatccttagcctgaatccaccactgccggcatcgaacatcgcgtacttcgttgtcacattgaagccgaagagcgacatcgacgccgtcctcgcccgcacccgcagctactttgcgcaagcacatggcgacgtgcgcgccgagcccaagcgtttctcgctcggtgcgaccgagtcagggactgccatttatcgcgtcagcggtccggatgaggaggtattgttgggggccgcgtccaaaatcgaagcagcgctgcgcaagctgcccggcaccatcaacgtcaagaacgattgggatacgcgcgttggccgcatcgacgtacgggtcgaccaggaccgcgcgcgtcgggcgggcgtgacgactgaagacatcgctggcgggctggatgtccgctacagcggcagatcgatctcggttattcgcgacggtgacacctccgtcccgatcgtcctgcgcagtatcgtaagcgagcgtcgcagcacggcagacgtaggcgcgacgctcatctatcccaccaacggcggtccagcggtgacgctggctcaggtcgcagacgtatcgctcgcgagcgagccctcggtcatccaacggcgcaatctcatccgcacgatcaccgtgcaaggacagaacacctcttacaccgcccaggagatcatcaaccgcctggcgcctagcgtcgctgccctggacctgcccgcgggctactcggttgaacttggcggcgagatcgaggaagccgccgaatcgaacgccgcgctgtcgacctacatgcccctcgcatttctggcgatgctgatgctgttcgtatggcagttcaattctttccgcaagctcggtgtgatcctcgcgacgatccctttcacgcttatcggcgtggtattggctctgaagctgaccggcacacctttcagcttcatggcgaccttcggcgtactggccctgttcgggatcattgtcaacaacgccgtgctcttgctggaacgcatcgaccaggggctagcggaaggcctgccacgccatgaagccttggttggggccgcgatacaacggcttcgtccaatcgtgatgaccaaggtcacctgcatttcgggactggtgccactcatgctcttctccggaccattatggaaagggatggcgatcgcgatgatcggtgggctggcactcggaacgctggtgacgttgggcttgattccgctgctttacgaagtcctgtttggaatcaagcgaattgggccgtggaacctgagtgtcgccaccgcgcatggagatcgctcatga

SEQ ID NO: 247995 - DNA, 432 bp, Klebsiella pneumoniae
atgagtctcttgcgagccgccgcgtgctgcgcattctcagaattcgtatgcacccacgcttcatgcgtatgtctcgctaggcttatgcgattcagcacccatccgctgatctggaaatcctggtcgattgtcattgccgcaggggttctaggagcgggctatccactgggcctgcgggccatcacggcgggcggtccgatgcgctgggtcggcctctgtgtggcagtgacgtgcatggcggccagcggcgcacttttgtggttcgcgctcaagcggattccgatcagcgcggcctctgcagcctgggcaggaatcgggctacttggaaacttgggcgtcggcgccctcctactaggcgatgtcgcatcggtaacgcgctggtctggcaccgccctcatcgcagcaggcattgcctgtcttagtttcgtttga

SEQ ID NO: 247996 - DNA, 621 bp, Klebsiella pneumoniae; identical to SEQ ID NO: 199435

SEQ ID NO: 247997 - DNA, 1158 bp, Klebsiella pneumoniae; identical to SEQ ID NO: 199434

SEQ ID NO: 247998 - DNA, 822 bp, Klebsiella pneumoniae; identical to SEQ ID NO: 199433

SEQ ID NO: 247999 - DNA, 930 bp, Klebsiella pneumoniae; identical to SEQ ID NO: 199432

SEQ ID NO: 248000 - DNA, 696 bp, Klebsiella pneumoniae; identical to SEQ ID NO: 199431

SEQ ID NO: 248001 - DNA, 2004 bp, Klebsiella pneumoniae; identical to SEQ ID NO: 199430

SEQ ID NO: 248002 - DNA, 588 bp, Klebsiella pneumoniae; identical to SEQ ID NO: 199429

SEQ ID NO: 248003 - DNA, 558 bp, Klebsiella pneumoniae; identical to SEQ ID NO: 199428

SEQ ID NO: 248004 - DNA, 264 bp, Klebsiella pneumoniae
atgactgggaagccaccaccacgcagcaagcgcgtcggcatcggtgcgcgtcccccagcgaatccgcacgccgaagcgtggattcgccagggcgacgcagatgccgtgcagaaaggcgacctctacaccgctcgactgacgctcgacatcacgcccgccatgcgggcgcgcatcaaggtgtcggccttcacgcgaggcgtgaccgtagccgaactgctgcgcgacctgctggagcgggagtttcccccggagggcacgccgtga

SEQ ID NO: 248005 - DNA, 639 bp, Klebsiella pneumoniae
atgatcttcgcgtttctcaaccagaaaggcggcgtcggcaagaccacgctcgccacgcacatcgccggcgaactggcgatgcgcggcctgcatgtcatcctgctggatgccgacccgcaggggtcatcgctcgactggacgcagcggcgtagccagcagggcctgccccgtctgttcagcgccgtgggccttgcccgcgaaacgctgcatcaggaagcgccagaactcgccaggcgggccgatcacatcatcatcgacggcccgccgcgcatcgccgccctcgcgcgttccgcgctgctggcggccgagcgcgtgctgatccccgtgcagcccagcccctacgacgtatgggcttctgccgagatggtcgcactgatccgcgaagcacaggtgttccggccagcgctgcgcgcggccttcgtcatcaaccggcgcgtcagcaccaccatcatcggcagggaggcacggcaatcgctggccgaacagccgctgcccgcgctgcgctcggagatccaccagcgcatcgtctttgccgacagcgtagccgctggccggctcgcccgcgaaaccgcgcccgacagcgccgctgcccgcgagatcgccgcgctcaccgacgaactgctgcggtggccgacatga

SEQ ID NO: 248006 - DNA, 822 bp, Klebsiella pneumoniae
ttgccgcagcgcgaacagctcgatctgttccgcgcgctgccgggcgacatggcgccacgcgattcccaggacttgatggcctttccgttcttctcgcttgccaagtcgcggcgcacggcgccgatcgacttccgcagcgggaacgtcaccattcgcgtggaaggcacgcaggagcacggcatcgcaacgatatgggatgccgacgtgctgatatgggccgcctcgcagatcgtggaggcgcgcgacgcgggcctgcgcccgtcgcgctggatacgcgccacgccttacgagattttgcgcttcatcgggcgcggcacgtccctcaacgactaccagcgcctgaaggccgccctcgaccggctgcaatcgaccacggtggccacgtccatccgcgaaaccacgggaaggcgcttgcatcgcttctcgtggatcaacgagtggaaggaactcgccgacgccagcggcaccccgctgggcatcgagctgatcttgccggactggttctatgccggcgtgctcgacgccgccctggtgctgaccatcgacccggcctatttccgcttgaagggcggtatcgaacgctggctgtaccgcctggtgcgcaagcatggcgggcggcaggagcacggctggcaattcgacttccgacacctgtaccgcaaatccggcagcgcggcccgcttctcggacttcgcctacgacgtgcgcgccctggtggcgcggcagtcgttgcccggctacgtcctcggcatcgagcggatgccggacgacaacaccgagctgctgaccttccggcccgtgccgcacgcggcacggggataa

SEQ ID NO: 248007 - DNA, 285 bp, Klebsiella pneumoniae; identical to SEQ ID NO: 117491

SEQ ID NO: 248008 - DNA, 771 bp, Klebsiella pneumoniae; identical to SEQ ID NO: 117490

SEQ ID NO: 248009 - DNA, 318 bp, Klebsiella pneumoniae; identical to SEQ ID NO: 117489

SEQ ID NO: 248010 - DNA, 294 bp, Klebsiella pneumoniae; identical to SEQ ID NO: 117488

SEQ ID NO: 248011 - DNA, 315 bp, Klebsiella pneumoniae; identical to SEQ ID NO: 117487

SEQ ID NO: 248012 - DNA, 210 bp, Klebsiella pneumoniae; identical to SEQ ID NO: 199648

SEQ ID NO: 248013 - DNA, 2070 bp, Klebsiella pneumoniae
atgaacgccgttacccaaaccgaagcccgcgccatcaacaccgccgccgctatcccgctggaagccgctgatccgaccaagaacctgattctggttccgctgtcgcggctggtgtcgcgtcccactggccgcaacgtgcgcaagaccccgcgcatgtccattcccgaactcgccgccagcatccagcgtgtcggcctgctgcaaaacctcatcgtgattgccgccgccgatggcgagcattacgaggtcgtggccggtgaccgtcgcctcgcagcgttgaagctgctggcgaaaaagcaccgcattagcaaggaatgggaggtgccttgcctgctggtggccgatggcaccgcccgcacggccagcctcaccgagaacgtgcagcgcgaagccatgcaccccgccgaccagttcgaggcgttcgccgcgctcgtggccgaaggccgcagcatcgaggacattgcagcggatttcagcgtcacgccgctggtggtgcagcgccgtctgaaactcgccaacgtgtcgccgcgcctgctggccgactaccgggccgaggccgtgagccttgaccagttgatggccctcgccatcaccgacgaccatgctgcgcaggaagccgcgttctacgatgcgcccacatggcagcgcggcccgcacaacctgcgcgaccgcctgaccgaacgcgaaatcgacgcctaccggcatccgctggtgcgctttgtcgggctggacggctacgagcaggaaggcggtggcatccgccgcgacctgttcgcggagggcgacaaaggcgtgtatctgaccgatgccgcactgctggaacggctggcgcaggacaagctggcaggtatcgccgccaaggtgcaggccgagggctgggcgtgggtggatgccacgccgggcatgacccatgccgatctgcaagccttccagcgtgcgccaagggaacgccgcagtccgaacaagcgcgacgcgcagcgcatcgagaagctgcaaaccaagctgcacgaactggccgaggcggtggatgccgcgctggacgacgaggacgaggaaaaggccgatgccttgcaggaagaaggcgaacgcctgggcgagcagttgcaggcgctggaagatggcttgctggactatgcggccaacgtgaaggccgcagccggtgccattgtcaccatcgaccgcgacgggcaggccgcgattcatcgcgggctgctgcgcgaagcggaggccaaggcactgcgcacgctggagcggctgcggcagggtttcggcagcgaaggcgaagccgcgaacgaggacgcaggcgaggacgacgagcagcccaagaccgccgccatgtctgaccgactggcgcagcggttgagcgcgcaccgtaccgctgcgctgcaaatcgaagttgcacggcatccgcaagcagcgctggccgccgtggtgcatggcatggtgcagaccgtcttgcaggaaaggcactacgggcacgacctgccgctgggtgtgcgcctcacggtgcaagaccggctggaaggcatggccccggactggccggaatcacccgccgccgtggcgctgcgcgaactgcaacaggtggcaggcgaaaccttgccggaggacagcgccgaactgttcgccgcgctgctggcgaaatcacaggatgaactggtgcggctgttggccgtgtgcttagcttccacggtggacgtggtgacgcctcgcgccacgccgcaccagcccggcgcggaactggcgcaggccgtggggctggatatggccgcgtggtggcagcccaccaatgagggttacttccggcatgtgccgaaggccgcgattctggaagccgttggcgggttcgcgccctcgcacgtcacccgactggcgaagttgaagaagggcgacattgccagcgaagccgaacggctggccgctggcaccggctggatgcccgccatcttccgctccgaaggcccgcagcagaccgggcaggacgcgccggcggatggcgaagccgaagcacaggaagaagtggccgccgtggcggatgaccagccgcaggccgaggctttggccgcgtga

SEQ ID NO: 248014 - DNA, 828 bp, Klebsiella pneumoniae; identical to SEQ ID NO: 117483

SEQ ID NO: 248015 - DNA, 2304 bp, Klebsiella pneumoniae; identical to SEQ ID NO: 117482

SEQ ID NO: 248016 - DNA, 510 bp, Klebsiella pneumoniae; identical to SEQ ID NO: 117481

SEQ ID NO: 248017 - DNA, 1065 bp, Klebsiella pneumoniae
atgaacgggcgccggccatcagcagcatcgctcgcagcgcccgcggcgctgctgggcgacattcgggcactgatcgaggcggcgcgcttgcgcgccgcctcgacggtgaatagcgagcttacgatgctctactggcgcatcggccaacgcatccacacgcaggtcttggacaggcgccggggcgcctacggcaaggaagttctgcccaccttggctgcgcagttggtggaggagtacggcagcagctttgcagagcagaacttgcgccgcatggtgcagttcgccgccaccttccccgacgagcgaattctcgtatcactgatacgagaattgagctggacgcacttcatcgccctgatgccgctgaaagacccgctccagcgggactactacgcacagatggccagcacccaacgctggagcgtgcggacgctgcgcgagcgtatcgactcgatgctgtacgagcgcacggcgctttcccaaaagccggaagaaaccatagcgcaggagttggcgaccctgcgcgatgcgcagcgcatgtcgccggccctggtcatgcgcgacccgtacatcctcgacttcctgggcctgcgggacacttggcaggaaggcgacttggaagcggcgatcatccgtgaaatggagtccttcctgctggagctgggcgcgggcttctcattcgtcgcccggcagaagcgcattccgatcgacgacgaggatttccaccttgaccttctgttctacaaccgcaagctgcggcggctggttgcggtggagttgaaggtaggtgacttcaaggcggcctacaaagggcagatggagctttaccttcggtggctagacaagcacgaacgggagccggaggaagcctcgccgctcgggatcatcctttgcaccggcaagaagcgcgagcagatcgaattgctggagctggacaagtccggcatccacgtttccgagtatctgaccgccttgccgccgaggggcgtgctggtggagcggctgcaacaggcaacgcaacgggcgcagttgcaaatcgagcagcgcaagacggacaacgagtag

SEQ ID NO: 248018 - DNA, 1200 bp, Klebsiella pneumoniae; identical to SEQ ID NO: 117479

SEQ ID NO: 248019 - DNA, 204 bp, Klebsiella pneumoniae; identical to SEQ ID NO: 142983

SEQ ID NO: 248020 - DNA, 240 bp, Klebsiella pneumoniae
atgacaggcgatacctgccgtttaccctttgactccgttaagaatggcatcacggcaggcttcccagataacctgggcattagcatcacactccacgaacccaccgcactgatcgtatatcacctggtatacctctgggggaatctccccaggcgcaaccggagtagagcgattgcctttatgaatctcatctgcggtatcacagacagcgtcgagatgccgcgacatccactcagataa

SEQ ID NO: 248021 - DNA, 618 bp, Klebsiella pneumoniae; identical to SEQ ID NO: 142953

SEQ ID NO: 248022 - DNA, 357 bp, Klebsiella pneumoniae; identical to SEQ ID NO: 142954

SEQ ID NO: 248023 - DNA, 3336 bp, Klebsiella pneumoniae
atgggtgacctggtcagcaaaaatagcattgaccgtttagagcgatttcattctttgctggcgggtcagtactggacgtccactgacagcatccctgaagagggtattgtggcaggggatacactgctcattacgtctttgcgttacgttgaagataagctgcacacagtaattctacgcgcccatccccgcgtttacggtcagactgttgctattgtcactgaagacagcagcggcaaccgtagggaacgtggcaaagaaatgcgagagcatcgcttcctggttaaggattttctgtccagttttgtatttgaacccgaccataaggtaatccgggatgctgaactcagacaagctcaggaggaagtgaatagcctacaggcatcgcttacagccctcgtgagcgatgctcaggggctccgtgaccttgcgattgaacaattaggtacagatgaccgtgaaaaccctgtgacgggccttagcgttgcgttagtgccccctcaagagcagcaggcggtaacctccctggcaattgggtcagttcagaatgctctgtcctctggtatttcagatacccgcattgaacaaatcagagaagcggccttaaaagaaggacagatcagcacagccatcagcaaaatcatcacacaacgaacgcaggcaatcgctaatgccagcaaaagaatgctgccctatttcgaggaagttgcagcggcaagtctggccactacagaagaagccatggaatatgtaaagaaaatccacgatggcgttggcagtctggaactgtataccggcaaagacgttgaggtagtgaatatcgtgaagggtgaatccgctccatcacacctcccgctccaggtcgttcaggcaaagctgatggtggatgaagagctggccgtatggtgcgatctcgatagctggttcgacttctctgatatggaaaaatttcatgaaactttacgaaccagccccgggctggtggagcagatttttccgtccgaacgttccatcgtatgtatggccacaacacgacgttatatcgattaccgcgatccctgggaaaatcatgtccgcaatgacaggaaccgggttgtattccttctgatccgggacggtcaaaatattcatcaggtttactcttcggtagaaagccatcttggggcttcgcagctattcccttccgccagcgaacaagaagcacatttccaggggattgatggcagcaccataaagtttgaggacgtcagttataccgaccgactgaagcagcatgatcttatggcacttcactaccgtcgtttcctgatccttatctgcggcctcgatcaccggctcaaactatttggtgatttctatgataccaataccccttacagttttctgagccttgagttccaggaacggtacttccagtttctgcacgacaaagacggttctggccttttgggtatggctgagacacggccgtcccttcaaagttatctcgaacaggcaaactcatgccttcagtccggatcccgggtaatgtgcaactgggattcgctgatgaacccaacgactgcacctggtgctcttcaggaagaccgtaactactccggatacaaacggcttgggcggacatataaaaactacgaaccagttattgcgttccgacagggtgaggatgtatgtgtcaacgtaaccgtcaaacgatactcaacggatcgagacttcaattgtaaggtgaatttatctctgtttcggcagtccacccggaatgatgctgagctgggtttcctgtgcatggataccattaaagcggaggagctcgaatggtacattcacagacgtaaattcaggtctaatcacctattttacattcgcttcttcaagatggctttaaattatattcgtgccgatcgtgaggcagaagaaccgtaccggcagatgctgagccaggctctggccgatggaaatattggccagcctaatctgagatcagagttgatagatcgatgcattgtagcctggcgagctgataacaggggggcgacgctggaagctgccatgagtacagagaagggctccaaagagctcctgaaccagctctatatgctcgctgatgaggggctcaaacatcttcccggggttcgtaattttatcagcagcaaaggctatgagctggtcaggttatcggtaaatgcttcagggaaacttgttgcatatgccgcaccagcaaattttgaatgcgacaaccgtatggaagggcatgcctgggtttatcgaatggtacttgctacatcccgaaatggtttaaacgtcactcatcaacgttttgcgaaaatgaaacacttcttaccagctgaaaacaccctgttcgaagatgaacagctggtggccacatggtcgggcaaaaagactgctttcaaaagcttcgaagagaagcagcgttattttgatacatgctcccgtggcgctcaggctcttaagcagtttttaaagctgaacgatccggtgatttacaccaatctgcttggccagtggattgaggcctatgaaagtatcaatgaaaccagtgagtacgtacagcaagtaaacctaatggctcctgttgcggtcaagagcgaaaaaggtaaagccagcctcatctatattggcactaaagacctggccgactggttttatcagaaagcgccgacacccgagttgcaggcgctgttccttgaggaatacctctcaaaatttgaaaataaagaggtcaataaagaaaagctactttcacgcagaaataccgctccgtctctcagtttttacaccacggacaacggggaagtaccagatgaaatcctcgtcaccaaatcagttgataatgccagacggtggtattcaggaatgttcacaagcatgccaacgatgttaaatgaccagtggtcctgccatgttgcgcatttttcccgtaacggaaaactctatttgacgcctgatctggtcactgatgaaggggaacctggctttgatgaaatactcgggtatccgcgcccggaggggctggtaccggtaaccgtgtgtgagtttgaaattgaccactttaaccgacgtggcactgatgcgaatggtgataaggtgaatattacacagtgggtcgatatttatcagggtgagcgtgaggttacggaactgctggggcctatttctgaagaaggggtgaacatcaaaacctacaggatggactctcttgagcaggcgatgaataacatctcccggggctcgacgcgcctcagaccgtcaacggagaatagcgagtggcaacaaccatctgagggtgtgatccgctatgtacttcgtgcatggtaa

SEQ ID NO: 248024 - DNA, 378 bp, Klebsiella pneumoniae; identical to SEQ ID NO: 142955

SEQ ID NO: 248025 - DNA, 516 bp, Klebsiella pneumoniae
atgatagaagcacgctatcaaggtaagcctataaacagtattcctgaagtagcgtttgctgaagggttatcgcgatccggtttaagccctgttctgctactggcatccccgaccacagtacccgttactacggatgagcgctggtggctcgcaaaggaaaacgtgtcaggacattacggcaggattttttatgctgcggtgcgggagctggtcataaggtcggaaattctgtcagcagtgggaagtatttcggatgagaacttcacgtccgaacacatgggttacttcgagcgacttacatctgatgaaaaagaagtcgtgtttagcgattatctgcgcactctcgctgaatgcagtcttacctgcactgcgaataatcttgtcaaactgacgcaggatttatacccgattgatgcaactcctgacaacattagaaagctatccacggacagggatgcactgaacgaactacacatcgatggtatggtactttttattaccggccctgcgctttga

SEQ ID NO: 248026 - DNA, 492 bp, Klebsiella pneumoniae
atgatagtaaataaaaacaggtttatgcataaaaacggtaaaaggtttaagtccatcgggaggtatttaagattttggcaagcagtagcgtcctctggtttacccatgaacatggtaatacgggaaaaaccataccaacttctggtcgctttgattgctttatatacggccatccctgttgttacaatagtaattttaactggtcagcaatcgcttaagttggaactaattgctgtgcatttcattacatttatcacgatggtgtttgttttgcgtcgtaagatggggaaacgttggctggatttatttgaagaaaaattagccatttataaacctaatgataaactcgcgcttagcgaattacacgaaagcatacgtgagaaaaatgggctagacttgcaggatctacaagattggtactggaaagagaagatgacatatgcgtatcacaaagaacataaaacaaccataagctatcaaaaattcaagtag

SEQ ID NO: 248027 - DNA, 528 bp, Klebsiella pneumoniae
atgaacattaccgacaaagaacttagctcaaatatagtgagtcagtatggatggaacttaggagagttcaatcactcaacgccttttacagctcattttatttatatcaccgactatcataaagataatacatggatgatttcactttcgcaggaggattttaatacgaccaaaatttctacatcgttaagtctagatgcctgtgtgtccatgctcggaaagatactaaaaaaaatgtctaacaaaatcggtatctcacaaacggaagaatgtgaattcgcatttcttttaacaaactatattaaacaaactttgacttttagagaatggcaacgcaatgctgaaggaaatcaacgactgcactttcttattaatatctacggtgcaaaagaagacggtggcgaagtggttttaagaccatttattgtaaatcctgatgaattaatgcttactccagcggatgtcgttgaatttaattcgcaggttatcaaagttgatcggcagcgtcatcctgagtggttccgttaa

SEQ ID NO: 248028 - DNA, 648 bp, Klebsiella pneumoniae; identical to SEQ ID NO: 142957

SEQ ID NO: 248029 - DNA, 171 bp, Klebsiella pneumoniae; identical to SEQ ID NO: 142958

SEQ ID NO: 248030 - DNA, 351 bp, Klebsiella pneumoniae; identical to SEQ ID NO: 142959

SEQ ID NO: 248031 - DNA, 297 bp, Klebsiella pneumoniae
atggcaaaaaccacaaaggaagcacacttcagttctgagatgatgcgctgtcgcgggatcgaatttgcgaagcttggaatgatggccgaagtcgatggggagattggcaccatcgagggcatgaatggcagcgcaaatctggatgttcgcttcacaaatcagctcaagcatggaagccaagttcataactgccaccctacctggaaagttaaatacttcgacgaggccggtactgtgatcgcacattttgatgaatgtcggtgtgtgttccgccctgaactggcgactgtggaataa

SEQ ID NO: 248032 - DNA, 279 bp, Klebsiella pneumoniae; identical to SEQ ID NO: 142961

SEQ ID NO: 248033 - DNA, 267 bp, Klebsiella pneumoniae; identical to SEQ ID NO: 142962

SEQ ID NO: 248034 - DNA, 288 bp, Klebsiella pneumoniae; identical to SEQ ID NO: 142963

SEQ ID NO: 248035 - DNA, 477 bp, Klebsiella pneumoniae; identical to SEQ ID NO: 142964

SEQ ID NO: 248036 - DNA, 993 bp, Klebsiella pneumoniae
atggtatacagaaacaataatggatcaagcgtacttttagaaccttttaattctctgattttgtttacgaatggaataatgcgccacgcgtacgaatggcgtaaaaaaacaactagcgatgaaacaaaaaaccttatggacaaaatctataacgatatgcaaggtttgttagttgagtttgataaatacactaagaactttcgccttcatggtgaattgaatcaattttatatcgactttatttttaagaaactttatggtttgtcgttcaaagtaaataacatgtcttttgaaagccatgtaaataaaattgcattagcttcaaaaatagatcgtttgtctgagtactttgttaaaatgaataataggcttaatcatctcggactttttgaaaaatctgttacggatggaattcgtaacatctcagaaaatagcaacctttactgtgtaacgaaagaagagctcttcaatgaaaataatttaactgcggctctgttgacctggttaaaagctaggctatcctacttaaatttctccttccttcaggaagaaccaattgcaaacgggcgtacggacatatccatcttccaggacggtcaccggataagtgtaattgaatctaagctcataaaagatcgtacgaatgtttcggatatccgcaataaaatcaacaatggaatctatcaactttactcgaagtattcagattctatacctataaattataatacgcccccagaaatgtatttcattttattttgttataaccctgactataaaactatacgagagcatatagcagttgctcttgacaatttaagttcagagcatagccgtcttactttaatacatttaggaaattttcgttatcgccttaaagaatctggtggtgactacccagacaaagtggttcatataaccctaatcattgctccgcttcgtacaaaagataataatgatgaaaaacacgggaaatatctaaaaagaaaatga

SEQ ID NO: 248037 - DNA, 588 bp, Klebsiella pneumoniae; identical to SEQ ID NO: 142966

SEQ ID NO: 248038 - DNA, 279 bp, Klebsiella pneumoniae; identical to SEQ ID NO: 142967

SEQ ID NO: 248039 - DNA, 921 bp, Klebsiella pneumoniae; identical to SEQ ID NO: 142978

SEQ ID NO: 248040 - DNA, 516 bp, Klebsiella pneumoniae
atgggttatctaaaaaagttacttttgccaatcatgatcgttgtattccctgcggcgtcctgggggaactcaacaacatttgaggcaaaggtggttaagattgttgacggtgacaccataactgcgctggatgctcaaaatacaaccatcaaaatacggatgtatggtatagacgctcctgaatccaaacaagcttttgggcaaaaagcaaagcaggccttaaccacagctattgcaaccaaaatcattaccgtgaacgaccatggtgtagatatctatggccgaatgttagggaccatttggttagatggttatgacattaacgcttctatggtggacagcggatatgcgtgggtatatcggttcgaagataacgccattgtcccgagctacctcaagtatgaatccgcagcacgcaaggatgcaaaggggttatgggcagaccccaaccctgtccctccatggcaatggagacagttaaacgaaaagcccagaaaggtgaaagagaagaaatga

SEQ ID NO: 248041 - DNA, 648 bp, Klebsiella pneumoniae
atgcttgaaaactacgtttgcaaaatctatgtgagtgataattcaaaccctagttcatttcgcgaagcaacggcatttggcttcgatgacggtacgagtgcacaccttctcaccgcagcccatgttgtgacggatgttcttggcaagaaataccccagcagcaacaaccaaaagctttacgtaatattccacaatcatctcggaccagtaaacaccatcccagtacctgttgaattcattcttaaggactgtaatgaccaaagcaactttcaaggcaatatgccgtttgtagatagtgcgaaaatgattttgccatctggaatgaaacagcctgtatcacattattttaaacgccgtccccccgtcggcaacatgcaaacatttggggtcggatatccattgggccagactgcactttcaacggtccttgggaaaattcaaagtgtcacttcctgctactgcgctaaacactctaaccagcattgcacatctcgttttgaaatttcgcattacaacaagcaaggatgctcaggggggccctatatcatatctgatgaaggtgagtattatgttataggtagtctcattggtgaaattcatccaggtccacctccaaccctgtcagttcagtcatcgaccgatttttag

SEQ ID NO: 248042 - DNA, 282 bp, Klebsiella pneumoniae
atgagccagcactggtatgaggtgaaaagcaatcagggaattgttcaggtgatgttaggctgggatccacctttgcagtggtttcatatgtgcattgattatgacattaatgcagcagaagacccactctatactaatctggctgaacctgatccatactacgttactccagaatatctgcaatttgtacttgaacgcttcgaaataacggatattgtaataaagcccgatacctctgggctatacgaagaattattaatggatcagcttttagaccgatag

SEQ ID NO: 248043 - DNA, 207 bp, Klebsiella pneumoniae
atgttcgcagaaatcaaagataattattcgttaggtggatacagaaaggttgcaattaccagctttcgacgagtcgaaaataaaaaccttatttatagtgatagggaatatgagctgacgcttgccaatggaacaataattaaaaatgtacttaaaaaagaagagtgggaactgttagaaagcaattcaattaaggttatattataa

SEQ ID NO: 248044 - DNA, 132 bp, Klebsiella pneumoniae
atggaccgcatcaagtacctgaaatggatagctgaagaattaccaactgatgatgaaatcgacaactacgatagtatcattagtcggggcgcagaaagggccgagaaggttcagttgtctttaaaacattaa

SEQ ID NO: 248045 - DNA, 1305 bp, Klebsiella pneumoniae
atgtcgcaaaatgctttacttgaagagaagattatccgcttagttctgtctgagctgggccaccctgttgaaggtgagcggcttttacttctatcgcaggacccatcccttaccgaagaaattatgcggcttaaagagcggattgagagccttgcacagggtttatctgcgcgggttagcgaaggtgataacgacgcagagattgccgcctcgtcagcatccagtctttccgatcagcaacaaacggtcgtaagtgttgctgataacccgggcattgacgctaccgatacatcagcactgcaacccctgccagaaaatgagcctcatcctccgttctggaagctgatgccttattacgaatttgataaaccagcacagagggaagacgaaaacctgtcttccctggtattaaaacccgggcagataccgacaggccagcagcgggccagcttagctgtgccacctgccgttcccccgagagctaaaataacgatccccaacgcccgcgcaggcgaacgtttctcttcgccggttgctatcgttctgagtgagggccagcaggctactgtcagggacgttgtctttccccggaacattggcctgtcttttgacaaagaacaggagttgctgacaggtactcccaccgaaagcggcgatatagagctttcagtaatctggtcatgcacgtcgcacgacgaatgtgaaacaaaacagctatttataatcaatcccgatccgagaagcctgtggaaggtggtagagccaccagcagacgctccctaccctaagtcccatctggacgctgctggcctggtcaggggtgacatacgtattgctgccgccagtcgccggggacgctctcatgagcatgccggaagcttcagagatgacgacttctacatcaaccactgccaggaaacaggatggtctgtcatgctggtcgcagacggagccggtagtgcggtaaattcccgggaaggctcccggattgcagtcaaaacggctggcgattaccttttaaatcagctcagtggtgtgaaaggcgtccatttaaagcagcacatcacggcgtgggaagggagcgatcagcaggcaacaataaacgccatgcttcatcattttaaacaggcagctacgctcgcggtcaacagtatccagaacgaagccatttgtgcagaacaacctgtgaaatcctattcaacaacccttctggcaactgtagcgctacgaactgataacgagctgtttgcggcggcactgttgcaaatagtcggtggtgataaacttatcatccccttttgctga

SEQ ID NO: 248046 - DNA, 129 bp, Klebsiella pneumoniae
atgccgacaggcgcttttaccagccctgttaataaactggactgtgatggcatcatcattaatgtgcctggggggcagtattattcctatatccatcagtgggaattatataaagctaactcaaaatga

SEQ ID NO: 248047 - DNA, 237 bp, Klebsiella pneumoniae; identical to SEQ ID NO: 142986

SEQ ID NO: 248048 - DNA, 252 bp, Klebsiella pneumoniae; identical to SEQ ID NO: 142987

SEQ ID NO: 248049 - DNA, 429 bp, Klebsiella pneumoniae; identical to SEQ ID NO: 142995

SEQ ID NO: 248050 - DNA, 162 bp, Klebsiella pneumoniae
atgaagtcagggaagaacgaaacttcagataaagaacttaataatccccgtccagcgttccagagcgctgaagaagagcttgaatacctgcgggcggagaatgcctacttaaaaaagcttcaggccttgattcgggaaaagcagaagacaaagcaaaaataa

SEQ ID NO: 248051 - DNA, 606 bp, Klebsiella pneumoniae
atgcgtaagatggggctggcctcatgcctgagaagcaaaaagtatcagtcatacaaaggcacctacggtaaagtcgcgccaaatacccttgcacgtgattttaaggccagcagtccaaaccagaaatgggtcacggatgtgacagagttcaatgtaaaagggacaaagctgtacctgtcacctgtgcttgatctgtataacagcgagataatagcctggaatatgacgacacatccgggaatgaatctggtcgaaaacatgttcagcaaagccatcaagaggctgaaaccgggtgacaggccggtactgcactctgatcagggctggcagtatcagatggcacggtaccaggagaaactaaaagctaagggcatagagcaaagcatgtcgcgcaaagggaactgtctggacaatgccgtgatagaaaacttttttggtctgctgaaaacagaatgttggcaccacgaagagtttgaaaatacagaccatttacgaaaaacggtggaagagtatatccactactacaacaacgaacgaatcaagctaaaactaaacggcctgagtccagtacaatacagaactcaggccatgtcagccgccagttaa

SEQ ID NO: 248052 - DNA, 1404 bp, Klebsiella pneumoniae
atgacggctctcgcagcggagtttttcactttggatgaagttaaccgactcaagattattcaggaagtcatcgaccggcgtctgacaacacaggtggcagctcagcggcttgggatatccgaccgtcagtgccgccgtcttcttgctcgttatcgtgaagatggtccacttggaatgaccagccgtcgccgtggtaaagcaagcaaccatcagttgcctcagggactggctgcttacgcgctcaatattattcgagaacgctataacgatttcggcccgacgctggcctgtgaaaagctgtctgagattcatggcgtacatctttccaaagaaactgtgcgtaagctgatgactcaggccagtctgtgggtcccacgtaagcaacgtgcgccaaaaattcagcagcctcgttaccgtcgtgcctgtgccggtgaactcatacaaatcgacggctgtgatcatcactggtttgaaaaccggggacctaagtgtacggcactggtttacgtagacgatgcaaccagtcgcttaatgcagcttcgtttcgtgaaatctgagtctactttcacctactttgaagcgacacgtggttatatcgaaaaacatggtaaaccgctggcactgtacagcgacaaagccagtgtattcaggatcaacaataaaaatgcaaccggcggcgacggcgatacccagtttggccgtgcgatgcacgaactgaacattcagaccatctgtgcagaaaccagcgcagcaaaaggtcgtgttgagcgggcgcatcagacccttcaggacagactggtcaaggaactcaggcttcaggacatcagcaccatggaagctgcaaacgcatttgccgaagagttcatgaacgattacaaccgacgtttctcaaaagcgcctcgccaggagttcgatgttcaccgggaactggatgtcgatgatgatcttgatatggtgtttacttggcgtgaagcccgccgcgtgtcgaaatcactcacggtgcagtacgacaaagtgctttatctcattgaagacagcgaattcagtcgtcgggcaattggtaaatatattgatgtttggcattaccctgacggacataaagagctccggcttaatggcatatcacttccctactctacctatgacaaactatctgaaatcgatcagggtgccattgtggacaataaacgtcttggccgtgcgctggaaatggcgcaactggtgcaggccgaacgggataataaccggtcacaatcagtgccatccggtgacggcccttcacgcaggcgcaaagcccccacgacgaaaaaatcccagcgttctttggatcaggacgatatgttcaatgcgcttgtaaaacttcagtcacgatctgaagaaatatttggtaagaaacagatatga

SEQ ID NO: 248053 - DNA, 696 bp, Klebsiella pneumoniae; identical to SEQ ID NO: 142973

SEQ ID NO: 248054 - DNA, 1314 bp, Klebsiella pneumoniae; identical to SEQ ID NO: 142974

SEQ ID NO: 248055 - DNA, 147 bp, Klebsiella pneumoniae; identical to SEQ ID NO: 142975

SEQ ID NO: 248056 - DNA, 831 bp, Klebsiella pneumoniae
atgacagaagatatgcagccacgatctattgagacaaaattcagaaaacttttagggacagtaaacccacatttaattctgattgatgtagcagtaaaggaactcctttgcaaagatgaatctggccgcattaacattaatcgaattgaagacgtaactaaaaagcataaaaatgcaaaactaaaagttgcacatttagagatttacaaaacatctctctacgtaacacaaagtcacattgcatttatatatagctgcctagaatcatttttgaaagactacatttccttgtcaaaaaaaatatatagtgatgaacggtcattcaatattgataatgtagacatactacgtagagcaattcaccatgctcatgtgaacaaaataaatggtaagattacgcatcctaaattaaaccataatgagttgtcaatttacatagatgaacttgatttaaaattattggattactttagacttgttcgtaatattaacgcacatagccgagaaaacactaatctttgggaagaaatgttttcagaatctgacttaattaaaatgcgtaaaaaatacaagcatgaagttaataaagaagctgaattaacaatacgtgatgtaattctgtattctcaggtatgccaacaggtcgcccaccatatctgccaaaaaatgttggacattgaaaaaatcgcaaaatcactttgcataaaatataaacaccttactggtcctcgtaaagacaatgcaatcacaaagacattaatcaacaattacttgcaagataaagatgaggttgatagaatccggaatgcatttaatggctggttagcttag

SEQ ID NO: 248057 - DNA, 639 bp, Klebsiella pneumoniae
ttgactgagctaactactaagcgccctgatactgaactagctcatctcgcctggtgcatcatcgtagcggtaaagcttgcacggaaagagggaagatctctcacgtctcttcaaacacacatgttcataatgcagtggctttcaacagctcagaaacgcaaggtttttcctaaatctctggcgcctgacataatctggttacaggaacaagggaaactgaaagggccatcagcacggctttacagcaaggtggagtatatctggctggcaagctctggtgagttagccaatcagagcacgctgtttagattcacctgcatgattgacacgctacgttcaatgggctggcaggatcacctattatccgataccgagtggcaggatggttggaaatgcggtacagatgtatcggctgtgtatacacagaaatctcaactccatagctcatttacagaatcaggaaatcttatattgccacttgaggtgcgtgtaactggcgttccagacgggatatttccattattggagcagtgcgggctcaaaactgagaaattgcctgtgagtatgggttatactgtcctgattttacagccagagattgatttaagttccgtgaagcaagatatcgttgaatattaa

SEQ ID NO: 248058 - DNA, 1347 bp, Klebsiella pneumoniae; identical to SEQ ID NO: 142976

SEQ ID NO: 248059 - DNA, 498 bp, Klebsiella pneumoniae; identical to SEQ ID NO: 142977

SEQ ID NO: 248060 - DNA, 936 bp, Klebsiella pneumoniae; identical to SEQ ID NO: 142994

SEQ ID NO: 248061 - DNA, 288 bp, Klebsiella pneumoniae
atgacacattcatctgatgataaaaactatgtccgagcagttctgagttatcttggcatagattttgatgaggcggatatagtattaagtgtttgccattgtcaaagtgacgagctttcttttacctgtaatatcaaagctattgaactcaagaatgctgttgatttatatgtcgatagtatctctgagaatgaaatagaagctttaaacagagaatctttaaaatcgcgactctgttactttcttgaggtgtttgacgcagtctctggtcagtaccggctttgttga

SEQ ID NO: 248062 - DNA, 1065 bp, Klebsiella pneumoniae
atgcgatcttttaatgtaaataaaaaatatttaccaatacttcctggacttgcgttatgtgcagttttaagtaatacaaatgcaagcactgagtatcaacatgatgctgacctaatcgctcagcaagcaaaagggcttggggcacaggctaaaggtgcacagcagccagatggggctcttagccttgatgctacgctaaaatcaccagatgtgcagaagtacatagcgcaagctgaagcactcaaaaaaaaccaggacctgagcaagcaaataaaccgtggttacgtccccggtatgaatgcggatagtgttcaagcagttatagaccatacccaggctatcagggcccaaagtaataactctgaagctgtcaacgatataattagaagacgtgatgaaattcaggaaaacgccagccttaatgaagcggctctgaaagctgtggaaaataagccggaagtcatgcgaggacaatctaaaaatatcgaaaaattgtttggttcctcgggcatcacagctgctgacttcgaaagaaaaatggatagcacacgtgaagaagcactatcaactgaaaatggtataacgatctttgcttcatttagcttgccggattatgtactggaagaccttctacgtacggcctcagagcataaagctcgtgtagttttcaatggtctaaagaaaggaactactcggctaccagagacacaggcagcaataaaccaaatgattgtcaaaggaaaatttgaatctcctttgattacaattgatcctgatagcttcagtcagtatcaagtaactcaagtaccgacaattatttctagggagcaagctcgttttgcaaaaatggtaggctccttcaacgttgagttttttcagcgagaacttgctaaaaaacccgaccaggcacttatcccgttgaagaaaagagcatcattaaagaactggaagaacgtgcacaaaaatatgactgggaaggtgccaaaaaaagggccgttgctgacacctggaaaaatcaatggatggtcgacctccctcctgcccaggaacacaaagaatttttaa

SEQ ID NO: 248063 - DNA, 243 bp, Klebsiella pneumoniae
gtggcttctgtttatatcagctgtccctcctgttcagctactgacggggtggtgcgtaacggtaaaagtactgccggacatcagcgctatctctgctctcactgccgtaaaacatggcaactgcagttcacttacaccgcttctcaacccggtacgcaccagaaaatcattgatatggccatgaatggcgttggcctcaacacgattttacgtcacttaaaaaactcaggccgcagtcggtaa

SEQ ID NO: 248064 - DNA, 1797 bp, Klebsiella pneumoniae
  misc_feature (1782)..(1791): n is a, c, g, or t
atgagaaaatcaggtttaggtttagccctgttcttttctttaattgctccgattaacgcggtctatgccgaagcgattatgatttcaggaaagctacaggctgatttgccagccgtatcctttgacccggggccgggcgactttgttgcatacgttaattctaacactatcactgcctcaggtgctggcacagcctgtaatgtaacggttgatgatcgagcgacttcctctgttgataacctcgtttgtttttttgagtggttacccaataccttgggatttacttctaacggcttcactctttcaggcgttcccaacaccaccggtgatttaaaactaccttacaagatttcttacttctctggttctgaacggaaaaaagttgaaatagtaaaaggtgaatattcaatcaaaagtgtggcaccggtaaaaccaactatcaccggtcttaaatcatccctgaacggattagtctatgacggcttttctttcaaatcgtatttaaaggatgaagcgatcaaagatatcgctgtttctgttgaaccccgcaattatattcaatacatctcaataggttcaggctccgcctgtgaggtacctattggcggaacttcctgtaccattgaagttggaagcattaaggccagtgatacagatgaacttttgggttcacgtgatatcacaattacagcaaactctaagaataattatttcgcacctcctgaatccaaaaagcttgttgttaactgggattatcggcctcctgtagtagaccatacactttggaattttaccgatgaggctaaaacaatcaaagtaggtggccaggacatctataccggagccaaaaccgttgctgtggccgttaaggtaccccagcaagaaacagaaggtgaatggtggctcccaacagctatgtcgctcactatgactccggatggcgtgtttaaaccgacgactaaagtgactttagatgatggcactgagattgatttcaaacagtcctgggcaacccctttacgtagaactttacagccggtaagtggacctcaaaaagtcggtgatgagtacctctatatcttcgacttaacggatcttataaacgggtcctacgcagcgacttttacagtagaaaatacgagcaaaaactcttctacgtacactgagcctgaaagcaaactgatgctgtctgataacccaacgctcatggttctcaaagatgggcaggtattaactaaacgagcacccgtatacttcctgaacgagattatcgttgcagctttccaggggcaggctggggttgctgatataaaatcagtaacaatagacaacaaagtagtttcgttaacacctacaaattataaaggtatttactacctgccggttggagacgatttagcagttaattcggatcacgagattactgtggtggctgaaaacctttatggaaaaaacgtaaatttcagtaccgtgttcacttatcaacctactggattcactcttaagaatctggaaaaaaacgtaactctttactcgcgtgtacgtcagtatacggacctgcttagtcaaacagctggtgataaatgcactctgtttaccacagaggaaaatgcgaatgcttacctcgcctggtacggggaaaaatcagatgttacagcatgctaccctcagtggaacaatgtccctgatgggttggagttctattttaaaggacgtaccccgggtctaactggattctttaataaaacaggtgagaatctgctcgactatcaggtctatatnnnnnnnnnnatatga

SEQ ID NO: 248065 - DNA, 432 bp, Klebsiella pneumoniae
atgaaaatacccgcgcatttgaagcataaaccaattattcaagtcgaaaattacgaccgcattgacggcccacatgccgatgacactgatgctatggggctatctgtaggtattgctcaatggaacactcctggatggactgagctttcggcaaaggtttggcgaaacacaggagaaaaatggtcaagacaatcagaagagctgcctcttcaccgggtaatcgaccttgcaactctgatctgtatcaccatggactacagtaaaaatgggcgactttcatccagtgatgattttcccgtgactcgctcaactgataaccctgagctagcacatcacactgagtttatgaaaaaagagttaaaacaaaataaaagcaatcttgatgtaagcctcaaacgcctctcgactgaattgaagagacttggctattaa

SEQ ID NO: 248066 - DNA, 531 bp, Klebsiella pneumoniae
gtgctcccaccccagcggcgacagatattgcaacaatgtgtcgtccagcgccgtgccgttgccacgcaaagcactggtggcacgctccagatataccgtgttccacaacacgatggccgccgtcaccagattgaggccgctggcccggtagcgctgctgctcaaaactgcggtcgcggatttcacccaatcggttgaagaacacggcgcgggccagcgcgttgcgcgcctcgcccttattcagccccgcatggacgcggcggcgcagctccacgctttgcagccaatccaaaatgaacagcgtgcgctcgatgcgccccagctcgcgcaacgccacggccaagccgttctggcgcgggtagctgccgagtttgcgcagcatcagcgaagccgttaccgtgccttgcttgatggaggtggccagccgcagaatttcatcccaatgggcgcgtatttgcttgatgttcagcctgtcgctgctaatcatcggcttgagcgcgtcataggcggcatcgcccttggggatgaatag

SEQ ID NO: 248067 - DNA, 378 bp, Klebsiella pneumoniae; identical to SEQ ID NO: 234431

SEQ ID NO: 248068 - DNA, 453 bp, Klebsiella pneumoniae
atgaaccttgcatcggtagtgcttgccttctcagactctcgtagtggtcggttcacagtaacgcatctggtgcagaaggctatgattgatccaaaaagcgatactgttgagctggttggggatccttctatgtgggaactgtatcgttacgaccataagacattgttaagccttcaggttctatacattttggctaaaaaagaagctgcgcaatctctctatatttattttgaagcaatgccagctggtacgttgttcgttaatatgaaacggttgagggaaaggttgcttcttacaacccctattcgtacgcaaaaccagataattcgcaaagcaatgcgggaacttgaatctatcggatatctcgattatcaagaagttaagaaaggtcgcgacatacaatttcagatcttcaaaagaagccctaagctggcccttgccaaacaaggttga

SEQ ID NO: 248069 - DNA, 129 bp, Klebsiella pneumoniae
atgctggctttcctggtaagactagttggaactcagaagtcgattgtactgtctctcacctatcttgccaaagttgccagtcgcttgtttgccttagctttagattttatgcttatggaggcggtttga

SEQ ID NO: 248070 - DNA, 426 bp, Klebsiella pneumoniae
atgtttgaaaataatactggcgtctacaattacaaaaataaaaacattgatttaaaatccaataacgctaatttatatagagataaactaaggcaacactgtgttagtgttagacttaataaagaggaattacaatttttaaatgaaaaacgaggaaacataagaaaaggtgaatggcttcgaaagagctttctgaacacaacccccaccctcattcctccaatcaatctcgatgcctggaaagaattagggaagatatcgcaaaacctaaataagctcaatatccatcttgataacaagagtgatggaagctgtttgacaaatacagaactttttgccgttagacgtcaaatctctgagcttcgtttgcatctcataaatattgatctttggaggatatctgatgaagggaatgcagaagattaa

SEQ ID NO: 248071 - DNA, 294 bp, Klebsiella pneumoniae
gtggcgcacgtcttcggtgaacgcactctggccacactggagcgtcttctgagcctgctgtcggcctttgaggtcgtggtatggatgacggatggctggccgctgtatgaatcacgcctgaagggaaagctgcacgttaacagcaagcgttacactcagcgaattgagcgacataacctgaatctgagacaacatctggcaaggctgggacggaagtcactgtcgttctcaaaatcggtggagctgcatgacaaggtcatcgggcattatctgaacataaaacactatcagtaa

SEQ ID NO: 248072 - DNA, 3078 bp, Klebsiella pneumoniae
atgacgataaagttttacccgtcccggctaccgggtgaaccccttgaaacgcacgagcatggtgtgctgacgctgcatgagtggatgagcagaaatgtcccgagctattcacaggataaaactcatcctgtcgtgatcgagctgaacggcctggcagtccccccggcggaatggccgttatgtttgttgcggccagacagtgacgtgcggatatatcccattccgtatggcacgggtcttgaaattgccgcgtgggtttcggtggccgtatccattgcgtctacggcctatgcattattctttgccccaaaaccagagctgggcggtttttcatccagtaacgcttcatcgctggatctgtctccggctaaagccaatacagcgaagcttggcgatcccgttagggaggcttttgggcgaaaccggatttacccggattacctggtgcagccggtaacgcgattcgaccccgctgatcccaccagaatgacggtagaaatgtttgtctgccttggatatgggcgtttctcctataccggtggagattttcgggtaggagaaactccggcgctgaccttaggcgagggcttttcatataccagctatgggcccggcgataatgtggccggggatcgtcgcagcgagatatggttcaactcaacggaagttgggggaacgtcgagcggaagcggcctcgatatggctcagactgcccctgaagccagtgatatcgttgctgatgccatgaccgtcagcggtgcctctgtctcgttttctggcctcgatgtcgatgatgataatgatgaagacgaggatgagaacaaacttccccctggctgggtcgccggtgcaattgtcaccctgaaagcgccagtgaattatcaggtatccatcgagggcggttttaacgtgctgacaggcggcgtcgtgtcagagattgcgccattcagcggaatgcctgtcaccctaacgtttaacggtactgactatgatctccagatcgccacgtataccccgcaccaggacgccattccgggagccggtggagcgactgcggtattacgcgccagtgcgtcgccgtcaacgtatgactttacgacaaccagccagacctttgctctgacctggcagggtatcacctataccatatctctggtcgccaactacggcacaatgtttggcttgctcgcagcgattaatggcgggttgaatggttcggggctcattgctcaggatgatggcggcgtgatacgtatcgtcgagatctccagcccctggcgtggcggttccattacgtcatctttcctgcctgcgtcagtatttggtgacagcccggtatttactgctggtgcagcctccagcggcggaagcccagcggtaacagccagcgtcacgctggcatacgattctggcactgccttttccggattgccggaaggcacccagcggatttccctggcgcaccgtggcaacgaataccagatagcgtctactgatggcccctctgcgaccgtacaacgtgtggttaacggtgtcgttgacagcacctggtcaggctttatgacccgtaccgtcgtggattttgccgcgtctggtattaacgataatgaaacctggctaggcccttttctggcctgcccgcaaaatgaagttgtggacgccttcgaggtcaactttgctttcccaaacggaatttgcgggttccagaacaacgggaataagcgggtccgccatgtcgagtatgaaatccagtatcgcgtttatggttccggatcagggtggacgagtaagccaggggtttacgcgcttaaaaacattaatggcctcggttttacagagcgttttgatctgtcctctcctgggctggtggaggttcgatgccgccgccgtaacgagcaggggagcaacaacgcgagagacagcatgttctggcaggcgctcagaggtcgtttgctttcccgtccggcctcctacgcagggatatcaacaatagggatcacggttgaaaccggcggccagctggcggcgcagtcagacaagcgtgtgagtgttgtcgccacgcgaaattatgatggcggtggtgacaggacaatcagcggtgcgttcctgcatcttgcccgcagtctgggatatcgcgacgaccagatcgacattgcggcactcagtacgctggaggagaactactggacgccaaggggcgaatattttgatcaccaggcaagcagtgacagcacgtcagcaaaggatattttcgacaaaattgcagaggctggcatggggtattttctgctgtctgacgggttgctttctgtcgggagagagggcgtcaaaagctggacagggatcattactcctcaggataccgtcgaggaaatgcagacgtcattcagggtcccgtcggaggatgattttgatggcgtggatgtgaaatatatcaaccctgtgacctgggcggaggaaaccgtacagtgccggacgccggaaaatccttttccgcgcaaaacggaggcatacaccattgatgttgccatgactgcagatcgcgcctggcgtatcgggatgcgtcggttaatgaaatatctccaccaacgccgaacgtatacggttacgacttcaatgctgggatggtgtcatgacttcggtgatcacatcattttgtccgacgacattccaaccgggaaaacccaaagttgcctgattgacgcgatgatttacgacttccaggaaatcacgctgcacgtcacggagccactggactggagctacgcgaatcctcgctgctggatacagtttcaggacggtcgcccatcatcgcgaatgctcacgccgcaacgggtagatgatttcacgctgacggtaccgtacaacgacgacctgcatcccggcgactggattatggacgacccagatattgatctgccgaagttattgttctgcgacagtgaaaagggtgcgcggcatgggatagtccaggaggttgccccatcaggtgacagcaactgtcagattactgcacctgaatataaagaaattttctaccagtacgacgacgccacataccccggcgacgtcgcctaa

SEQ ID NO: 248073 - DNA, 1035 bp, Klebsiella pneumoniae
atgttgactttaggcatgattgtttacctattaggtagaaataaaaataaaaggcaggaagtgatcatatatgatgatgaatttaatgcttctactaaaagattgtataggaaccaattcgttggcatttctataatttcattaattattttagcctcaaattttggggcggtaatttcaatgatagccggagatattactaaacaaaacttattcagagatgaacttgggctgttgtttttatttacattcctgccttattcagcagcgcttgcgataagtgctacggaaaaacttaggaatagaatattaataattcttgtaagttccgcacttatgatttttacggactctaggggcggcgttatatacatgtttttattattattctatgcatataatgaaaaaaacaaaaagataaatcttatttcttatttcattgcactaccacttgtaggatatttactgacagttttacgatatgtatttcgcgaatcttggcgatactcatcaatgagtgattttgtcgatgataaaggggggtattttcagctattttttaactctgtagagatatcaatggcagaagtgatatctacagcaataaagttttcaaactatattagcagatttcctttggaaagtatttgggcaggggttgttttccctataccgagatcaatatatgagtcgaaaccagtaggaggttctagcgcttttactagtattatgtcacctgacaaatggttttatactaagagcgagatagttgttactgggtatggtgatttatatttaaatcttggttttctttttagtggtattctgctttttattgttggtgtcttttggacttatttaattattaagagtgtaaataaaggagtccagaataatatctacattataccagtgctcatgtggttgatgtatacattcttgcgagctgatatttttaatatgatgcgttggttatgggcgtttgtaattttcaatttaataatttacattcttaataaaataaaaatacgatag

SEQ ID NO: 248074 - DNA, 567 bp, Klebsiella pneumoniae
atgtatttaggtaaagctacagctggtttatttgcgattgcgaagacatttttgaatattttttcacagttattaatgtttctaaggcgcgtagaaaacgagaaaataatcaaagtcacagagtctagtaattcaagctgttcggatataaaacctcaaaatatcgaacttttattacttaaaatgtcttggcggacatcgaagtttattctggccacatcatttgtaagcatcggcgctttgtactgtattgcattgttgatgcctgttgtttcacaaaaaatagtcttaatttggtggtttatttctataagcctatcgacgttagtaatttggaattattcaagtattttaggtcaatcgctaattatatcagggaaaacaactgagtatgcattaatactttttgtaagcttacttgtgaatattgcgataaatatatttttgttttcttcatttggcttatggtccattattatcgcagaactgataatgtatataatccaaatcttaatatttatatttaagatacgttatcaacgtagagataaaaaatatgttctttga

SEQ ID NO: 248075 - DNA, 771 bp, Klebsiella pneumoniae; identical to SEQ ID NO: 237218

SEQ ID NO: 248076 - DNA, 228 bp, Klebsiella pneumoniae; identical to SEQ ID NO: 247847

SEQ ID NO: 248077 - DNA, 336 bp, Klebsiella pneumoniae; identical to SEQ ID NO: 247849

SEQ ID NO: 248078 - DNA, 207 bp, Klebsiella pneumoniae
atggctaacttggtgctgttactcatcgtcgccctgtgtctactgcagcagtgggttgcctatcgaacctggcgcgctttccgggaaagcaggttggtacgccgcgtcctgtttaagggagaggctttcgctcaccgctaccgtatgtggcagcgggtatatcgggaaatactgatgaccggagggaggaaagatgtcgactactga

SEQ ID NO: 248079 - DNA, 1062 bp, Klebsiella pneumoniae
atgaaaaacactgtgaaaataaacagtgctgaacttgtgcatgcagattcacttgagtacatcaaaaccctgccggacaacagcttagacgccatcatcaccgacccaccgtattaccgcgtaaaggcaaatgcctgggataaccaatggcccagcgtaacggattatttggcctggctggatgagtttttcgccgagttctggcgagtgcttaagccagcagggtcgttatatgtgttctgcgggccgaaattatcatcggacaccgagctgttgttacgtgaccgtttcaacgtgctgaaccatatcgtttgggccaaacccagcgggcgctggaatggcgcgcgtaaagaaggtttccgctcttattttccggccagtgagcatattttcttcgcagagcattatggcgcggaaggctttgctaaaggccaggctgggtatgcgacaaagtgccaggagttgaaaggccaggtcttcgaaccgcttatcgcttatttccgcgatgctcgccagcgacttggtatttccgctgccgaaatcaacgcggcaaccggcacgaaaatgtgtagccactggtttagcgccagccaatggcaattacccaatgaacggcagtacctggcgctgcaggcgctgtttaaccgtaaggccgcagagcagggaataacgggattgtcagagccgcatgcggcgctgcaggaggaatacggctctttaacggcgctatattccgaactggttatgcagtattccgaactgcgacagcagtatgagaatttgcggcgccctttccatgtgacaaaagatgttccacacaccaacgtgtggacgtatccaccggttccgtactatccgggcaaacacccatgcgaaaaaccgctgcagatgatgctcgacatcatttcggcttgtacgcgccctggcgatgtgatcgccgacttttttatggggtcgggtgcaacgataaaagccgcgctgcagttaggacgcggagccatcggcgtagagctggaagaggagcgatttttacagacggtctccgagatagaaaaacaataa

SEQ ID NO: 248080 - DNA, 909 bp, Klebsiella pneumoniae
atgcctgatcgctcaagtaatccgcccaatgcatatcaacaactcaataatcctggcgcagcaatcactcagctgaccagagacattgctgagaacaatgcaaacacgacccagaagagtatttccagcattggtaccctggcctcaggacccgtattagagctatctgatagtgctcaggatgtgctgtatgctctttttttccgaggcgcactcgtatctggtgatattccttcaaaagccggcgcctccgcactgcgttctctgggatttgccgagaccggccatacagccacgccatacaaaggggaagactatttcacctggctgactcctgcggggtatgcgttcgctattgggtatctggttaacactcgcttcggcaaacatcctgcaaatgcagtagcttccgggcagccatcggttcatccggaaggattaagcattaacaaagccatgattaaaggggagatcagtagcgaagcccatgtttgcggcaataccatcgagcaggaaacgctttcatcagtgttagcgcattacctgcccaacacccctctggataaagccagagaccacgctgtgatgctggcctctgcggtcaaagcttcttttgcagaattgaaccactccaccggtggtttcgtaatttcccgcgatggcgccgctcaggttattggcgaaaaaaattctgaaacaataatccctgcgtcggcccttaaaccgagcacagatggaaaggaaaagcggggggcaacctttacgataaatattgaggtggatgccagcaaagccactcaagcgctcgatgagttcagccatgcattcgataagcgcatagcctccgcgttagaaaaaggacttatgccaggcggttcattatggtttgcgattaagagtcaacgttaa

SEQ ID NO: 248081 - DNA, 639 bp, Klebsiella pneumoniae
atgacaactgatatcaccgaactggcgcagagcctgaaagcggcagcagagaaagcgactccgggcccgtgggaagtggcgcgcgatggcaaaacgctggtatctaaccaatcgcatccaatcgcgactgtatcagatgccatgcatcggatgctgactgacggtagcaccggaaaagacgcagagtttatcgccatggctaaccctgccaacattcgcgcgctggtagaggcgctggagaaggcgcggcagcggattactcagatggagtcccgcaccgtcaccgactggatagaacatgacgggaaatggcgaccggaatcgctgggtctggatgaacttgtatacctgaaaaccagaaaacaggagctgaaaataccgtacccggcgggaaaggttaaagggtggatgaataccggcggagacatggatgttatggcgtacaagctggcgtcgccacaagccagcaccgtcaccgtgaagctgccactaccgcgccgaaaaacagctgatgactatgtcgatgacacgttcgagccgtgcgatctggctgcggtatacaacgcatgtcgccttgaatgtgaagtgaagttcaagaacgcactgactgccgctggcatcaaggtggaggctgagtga

SEQ ID NO: 248082 - DNA, 942 bp, Klebsiella pneumoniae
atgacaagtttagcaattgcagatcgtgcaatcaacgttcctttttacggcgactctctgtttgtggttgagcacaacggcgagccgtacaccccgatgaagcctatcatcgatggcatggggatggattgggcttcgcagttcactaagttaaaacaacgctttaagacctccattgtgaaaatcacaatgcagctaccaggagacaaccagcgccgagatattatttgcttggcactccgcaagcttgcgggttggctacagaccatcagcgccaacaaggttcgccctgaaatccgcgaaaaggtaattcagtaccaggaagaatgtgacgacgttctttacgagtactggacgaaaggcgaggttaagaacccgcgcaaaaagaccacggtagatgaaagaacgccacttcgggatgccgttaacatgctggtaagtaaaaagcacctcatgtacccggaagcctacgcgatgattcatcagcgctttaacgtggagagtattgaggatttagaggcgactcagattcctgatgccattgagtatgttcaccgcgttgcgctcgaaggtgagttcctcggcaagcaggaagcactacccgctccgaagctggatattcactacccagcagactggtgggatcagttcccgctccttcagcgtgaaagaaaaattcagaaatccacagcggctggaggttatcagttccccgtaatgctgctttatggatttgaggatgaatcaccttcggcgatcagtagcctcataagcaaactggcgatgcagggatacgacgtgagtgcggtcaagatggaatacttggctcatcgtcattacgcagagcggatgtatcagaaactatccagaattgctgaaatcagtggctcggtattaggcagtagcattaccttgaatattcagacacctatgcgctcttag

SEQ ID NO: 248083 - DNA, 156 bp, Klebsiella pneumoniae
atgagcgtccggctcaacctgccgccgatcgcattaatgatcgagatagaggtagtgcatctagctggtcatccgcagcagcactttacgcatcaccgagacgtgggtgaaatggtcggagtagagcgccacctgtgcgtagataccatcgggtaa

SEQ ID NO: 248084 - DNA, 864 bp, Klebsiella pneumoniae
atgatccgcagtatgaccgcctatgcccgccgtgaaatcaagggtgactggggtagcgccgcatgggagctgcgctcggtaaaccagcgctatctggaaacgtacttccgcctgccggagcagttccgtagtctggagcccgtggtacgcgagcgcattcgcgcccgcttgactcgcggtaaagtcgaatgcaccttgcgttttgaacaagatcccagcgctcagggtgaactcatcctcaacgaaaagctggctaaacagctggtaaacgctgccaactgggtgaaaatgcagagcgatgaaggggaaatcaacccggttgatatcctgcgctggccgggcgtgatggccgccaaagagcaggatctcgacgccatcgccgccgacattctggccgctcttgacggcgcgctggacgacttcatcgtcgcccgcgaaacggaaggccaggccctgaaagcgcttatcgagcagcggcttgaaggcgtgagcggcgaagtggcgaaagttcgcgctcatatgccggaaattctccagtggcagcgcgagcgcctggtcgccaagctggaagatgcggaagtacagctggaaaataaccgccttgagcaagagctggtgctgatggcgcagcgtatcgacgttgccgaagaactggaccgtctcgaagcgcacgttaaagagacctataacattctgaagaagaaagaagctgtgggtcgccgtctcgactttatgatgcaggagttcaaccgtgaatcgaacaccctggcgtcaaaatcgattaacgccgaggtgaccaactccgcgattgagctgaaggtactcatcgagcaaatgcgcgagcaaatccagaatatcgagtaa

SEQ ID NO: 248085 - DNA, 837 bp, Klebsiella pneumoniae
gtgatactgcttaaatcagccgtccaaaaagaagcctttaatctggctggcctgttagcaaacgttagtcctaagaacctaacaaaacctaacattcatcgccgcgccgttgcgacaaattacgacattttagaggcgttttctgggctgagaattgggctgcgaatcctaataaatcctaagtttttttcgcatttcgtgaccagtacgcgcgagaaagttttttctgacaacaccacgccagtggaaaattattccgctgtcttgagttttcggagcattacgcgcccgtcgggggagttttcggactgcataaaaaagggcagcgcctacaggtcagaccaccagcgggggaatcagtgttatagtcctaacgttgctgcaaaatcagcaaccgggcgtgagaacccgaacacactcagggcgacacagacgccgaaagcgtctttttttgtgtccgatcactacgcacacctaatcagcggcctagcccgtactaaatcaatggtggcgttagtggggctacgttcgcgtaggccggtttcctttgtgtccggtattctcacccccgctaacgtcaccgccattttagagcgtgagaactcaggcggtgactccttaaacacaaaggaggctgccgctatgctggctactacccctacccaaaatccgcaatttatctggttaatcgcagccgttcgccgcgatatgccgacaattaccgccaaaattcaccatatcgccgcagagactgagcaggaagcccgccgtactctggcgcgggatcacgtttgctttttcgccggacgcattcgcacagggggtgaacatgcttaa

SEQ ID NO: 248086 - DNA, 318 bp, Klebsiella pneumoniae
atgagcctgtataacgatttagttcgctgcgaatttgacaaaggagccgccgttgatgagctgaaaggcattcagagccgcacggatgaggctgtgagtgatttgttattaggcattagtgccattggcaatctcatgttctgggcggctgatagcgataaccacccggaggaaagcgctaaagctgatatgtacagattaggcgcaatgctgggtacggttagcgaggtggcgcgggcgctgaatgataacgctacaaacgccgcattcttgctctcaatcagtgaaaaagaagccaaagtgagggcgggcaaatga

SEQ ID NO: 248087 - DNA, 402 bp, Klebsiella pneumoniae
atgagcctgcaaaaaacctggggaaacattcacctgaccgcgctcggcgcgatgatgctctcctttctgctcgtcggctgcgacgacagcgtcgcgcaaaacgctgcgcctcccgccccgacggtcagcgccgctaaggtgctggtgaagtcgatcagtcagtgggatagttttaacggtcgcattgaagcggtggagagcgttcagcttcgccctcgcgtctcgggatacattgataaagtgaattacactgacggccaggaggtgaaaaagggccaggtgctgttcacgatagatgacagaacctatcgcgccgcgctggagcaggcgcaggcggcgttggcaagagccaaaagcaggccagcctggcgcaaagcgaggcgaaccgcaccgataaattag

SEQ ID NO: 248088 - DNA, 1539 bp, Klebsiella pneumoniae; identical to SEQ ID NO: 218274

SEQ ID NO: 248089 - DNA, 540 bp, Klebsiella pneumoniae
atgctaaccaccctgatttaccgcagccaggttcatcctgaccgcccgcccgtcgatctcgacactttagtccatcgcgccagcagtaaaaatttgccccttggcatcaccggcattctgctgtttaacggcctgcagtttttccaggtcctggaagggactgaggaggcacttgagtcgctgttcagcgaaatccaaagcgacccgcgtcatcgcgacgtagtggagctgatgcgcgattactcagcctaccgacgttttcacggcaccggaatgcgcatactggatctccggctgtttgaaaccgatggcgcgctggaggaaattctgcgctttagcacgtttggggtcaccgaaccggtcaacgaccggatgttccggctgcttagcgccttcattgccgacggcgggctattgcctgcccgagccgctgcagccctctcgctggatgatgatgcccgcgtcaggtacggccgcgccgcagcacctgcccggtcaaccttgccagtttgctctgcaggctattgtcgagccggctaa

SEQ ID NO: 248090 - DNA, 138 bp, Klebsiella pneumoniae
atgcagagcaaaaatattctgattatcgaggatgacgccgatgcggcagaggtgctggaagcctatctgcgtcgggaaagttacaccgttcgcgtcatggcggacggtctctcagggcttgagcaggctcaacgctag

SEQ ID NO: 248091 - DNA, 219 bp, Klebsiella pneumoniae; identical to SEQ ID NO: 98222

SEQ ID NO: 248092 - DNA, 333 bp, Klebsiella pneumoniae
gtggtgctgttggtacgccgctaccttgatgatgcgctggacgtgtttggcgttcacggcgttggcgggataacaggttcgattctggtgggtgtctttgcctcagccacatggaacgcgaatgggcctgacggtctgctggaaggcaatgggatgcaaatcattaaacagattaccgccgtggtatttaccagcgtctggtcgtttattttcacactggctattctgtggctcattaataaattcaccgtagttaaagtcgaccagaataaagttggcggcgaactcgataacactttattcggcgaagatgcctatagcgagaaaaattaa

SEQ ID NO: 248093 - DNA, 789 bp, Klebsiella pneumoniae
atgaaatggggaacaattaatagccagttttgtctagataatttgagagacactttatcacctttgattggggctgaagtacattatttagccttacctagagatgtaataaaaaacttcgagccatcacaaataggaacaatagtaggaacattgactgatgctgtattaccttatatagcactagagaaaaaagtaggcttacacaaaggggtgggaatattgggggaccgtgaagggtatcctgacttcaaccattctgatggatatagaatagaactcaaagggttattcattgacaaccctgaaattgaattgaaattacccccaacaagaagagaaccatcagcaagactcactcaaaaagtcaccgttaacaatgtaaacagtgaaactgatgcattaatggtgttaagctacaagcttgaaacatatacaagacaaccaagcttagtaacccccgtaattactgacatagggctattccctgtaatagaatgtataaaggctcgagatcacagattaatagagtccggagggatttggtttggcgactatcaaacaccagcgatattaagtaatgccggaaagagaaagattgcattcaatcaagaaacgtcaaaagaaagctatggaagaaaagaaagcgaaggtaaagactataatgaagacacaaattttgggaaattaaaaagaatcccctatgaaccattacaaagattcctcaaaaaaaatggtgccagttactccgccagaggaacatacccagcaccctggataattgactaa

SEQ ID NO: 248094 - DNA, 636 bp, Klebsiella pneumoniae
atgaaacacataagcattgatatatcagaacttaatgataatagggttttatctcctgaatattggatatcaaaaaatattgcagctagtcactcaggaagtgtaagcttgggtgatttgttctttttatcaaaaaaaacaaccagttgcatttcttccgatgggtttgtctttgacacggcaaatagccacatgggattgataaatatacttaagggtgagtcaaaagagagggttagcaataaaaaaatgctaagtgaggggtgtgtaattatatcgcggctacgtccttatcttaagcaggtcacttatataccacaaggatttatgaataaattaggagtcagttctatttggggttccactgaatattacccattactacctaaagatcatgggttaaatcctgcatttctggttccttaccttctttcagatgatgtgcaagctatcctttcgaaagcagccacaggtggccatcaccctaggtttaatgaagatttactcatgagtttgaaggtgtcagaagagattttagataaggccgataaagcgtcattaaaagtcattaatattatcaacagtaatttggactctcaattatcaatggctagaattctaactagccattggtga

SEQ ID NO: 248095 - DNA, 1152 bp, Klebsiella pneumoniae
atgagtggaaggcatacagaagggaaaactttagtttctaaattaactcgttgtcaggagcttatttcagcaagaacaggatttgatgatttctatgaattattgaaaatattatacgttaagttcaaaatggaatctaaagatgaagggtcaataataagccttagtaaagcaaagggtttgatcgaaaagaataaaaatgaggttattctctttattgaaggtgatgcttgtataaatgttcctgatgatatattcgaagagtgtatcaggttgctctcttcaatttcagtgaaaggctcgagttatgatgagcttcatgttgcatttgaagtaatgacaagcaaggttatgaagtctgataaaggacagtatttcacacctttcaatgttgttgatatgtgcatttcattttttgatattaaatcagatcaacttatttgcgatcctgcttgtggtagcggtgggtttttacatgctgtttttgagaagaataaagagtgtaaggtttatgggtttgatatatcaaaaagggctgtgaatgctgcaagatttctatcaatagtatcatctaataactctattaaaatattccactcggattctttatctagagagcaatcattatctgctggtgaggatttgtattcaatagaacaggtgatgaaaagcaatgatccttattttgatggttttgacttaatcgtcacgaatccaccttttgctggggatgttacattaagcaactacagggatgattatgttttagcaaacttaccaggccggacaattgaaagagatgttctgtttttagaaagatgccattcattgctaaaggaaagtggaaagattgcaatagttctccctgataataagttttctgctaagaagtttgatggtttaagggagtggatgctaagtaattttaaaataaatgccgtgattagcttgcacccttatacttttcgaccatttacatctcaaaaaacttgtgttttgattgctgaaaaaggggaaactgatgataaggtgcttttcatcgcttcagagaagtgtggcaaaaatgcaagtgggaaatttctttttaaagatgatggttttgtagatgatgattttgattctattaagaactgtattttgggtgggttatga

SEQ ID NO: 248096 - DNA, 492 bp, Klebsiella pneumoniae; identical to SEQ ID NO: 148805

SEQ ID NO: 248097 - DNA, 765 bp, Klebsiella pneumoniae; identical to SEQ ID NO: 239749

SEQ ID NO: 248098 - DNA, 1287 bp, Klebsiella pneumoniae
atgaataataagctttatcgcacggaagcgatcgaatataaaaggcatcactggagaggaaaagctttgttattggctggattacctgcatggttaatagtattattatctactttatttttaattgcactgatcgttgcggtgatattttgtaagtttacacaacggatagatgtaaaaggagaggtcatcactctccctcattctattaatgtgttttcgccacaacagggattcatcatcaagcagtatgttaaaataggtgatcttgtcaaaaagaatcaacctttatacgagatagacgtctctcgtaatacgagtagcggtaacgttagtgctgcgcaagtagaatctattaatgaaaaaatttataactcagaagaaattatcaaaaaactggttcacaataaaaaacagacgctgaacgcgctaaatgaacaattaaaaacatctactgactcgcttaaagtaacgatcagaatgttgcaaaacacgcaagccggcctcaaaaaaatgcatgataaccttgcgagttacgacaaatatcttagtgatggtttaattactaaagatcaatataactatcagcattctttatacttccaacagcaaagtgcctaccagtctctggttagtcaaaaaatgcaacttgaatcacagattacacaacttaacagcgacaaagtaacaaaagctgctgattttgacaatcaaatatcaagtcaatataatcagactaatgattataagaaccaactcatcgaatctaatgctaatggtaaccttattgttaaagctaccgcagatggcagaatagaatcattgtctgctacacaaggccaaacggtcgataacggtagtagcctggcgcagataaagcctataggtaatgttgagtattaccttatactttggttacctaacaatagcattccctatttaaaaataggtgattctattaatatccgttatgatgcctttcctgctgataaattcgggcagttccccggagaaataatttccatttcttccatgccggcctcacgccaggaaatgtcagaatatacaaatgtaaataatggcagcacccaacaggaactagcactttacaaagcaatcgtaaaaataaaggataaagaattcagttacaaggggaaaacattgagcttatctaatgggcttaaagctcaggctgtcgtttttcttgaagaacgtcctttatatatgtggatgtttacccctatttataagatttctcaaagtgtgagcggccctgtcaatgactaa

SEQ ID NO: 248099 - DNA, 1242 bp, Klebsiella pneumoniae
atgactaaccaattatttgaaaaaatcatcgcaaaagttaatttttcacttctgaagcaaacacccgttatattgcaatcggaagccgctgagtgcggaatcgcatgtctggcaatggtttgcggctactatggtctggacattgatctgttcaatttccgccagcgttatggcagcccttcgcagggcgtaacgctaatgtccttgagcaaaacagcggagcatgctggtttaaaaagccgggcgctgtcgttagatctggatgaaatccgccagctcaaactcccctgtgtcctgcactgggggatgaaccactatgtggtgttgaccaaagtacgcaaatccagctttgtcgtacacgacccagcgctgggtaaacgcatcattggtaatcaggagatgtccaattattttaccggcatcgccttagaactctggcccgaccaaaatttccagcaagaaaaggctaagtctcgcctgcgcctgttggatctgatgcgtaatattgtcggattgaagtcagcgctgttgaaaattttcgccttctcagtggttgttgaagccattggcttattgctgccgataggtactcaactggttaccgaccatgtgattatggcgcacgaccaaagcctgctatcagtcatctgcattggtctggtcttttttacgctatttcgcaccttcatcagtatgctccgcgcctggacgtccttaacactgaataccctgacaagtatccagtggaaaactacccttttcgatcatttaaccagcctgccgctgtcattcttcgagaaacgacacctcggggatatacagtcacgtttttcctcactggataccattcgatcaacatttaccaatagtatcgtcagcggcattattgactcgattatgactattggcctgctgatcatgctgaccctttacggcggctggctgacatgggtggttgtcggctttaccctttgttacgccattatgcggctgggtacctatcgcttttatcgccgagtagcagaagagcaagtgatcaaaggcgcacgctccagttcgcactttatggagtcgctatatggaatctcgaccatcaaagcactgaacctaaaagagcgtcgttcccagcactggcttaatataaatattgaggcctgcaatgccggtattaaacagacgcgctttgatatgatgtttggtggtattaatacttttattaccactattgatcggctttgttga

SEQ ID NO: 248100 - DNA, 438 bp, Klebsiella pneumoniae
atgagcaaaatttcacaaatgataaaacaaaaccaagagaagaagaaccagcaaaatttgatctatcaagagaaattgaaacagctaatacacaacaacaattcattcgttcaagagttgaagaggttagaagaaatcaacagcaattcagaaagtcgcttgatagaactcaggaacgatctggagtatgtagaagatctctacattcaattattcacaatattagaagatacgtcagaacgttttcaatccatacaagacagaatgaaagaagacaaaaaatcgaacacagacaaaaaatcttccttgaaaagctcaaaacccagcaagaaaaaaacaatcaaagaagtgtcttcagaagtcgatttaaaccgtattagaaccgttctgaatactcttctaacccactacgacaaaaccttaaccgtgaacaagtga

SEQ ID NO: 248101 - DNA, 1404 bp, Klebsiella pneumoniae
atgaatgaaaaatcaattgaggaaatattagctgaaagacaactaaaagaatttaacgaatcgaaatttggtcagtttttcaataatcaaaaactaaaagaacaagaactgacatatcttaacaataaagcattagacatagtgaatgaagaagatttattcgaaataatgtcattaatacctcaaccatttattacagaagaaaataaaaatgttgatgttttaagccttatatataataactttttagaaaatacagaaataccattaacacttcctattttttcttttttaagctttttaagtgctttttgtgttaaaaatgaaatcacgtatacaattccattaagcgacgaaaaatcgccgcttgatacttggatcacaattttggcaccttctggaagtgcgaaaactttttcaaattcacaaataaaaaaggttataccagtaggcattgacgggaaaaaagttattgagtcaaatttcgtaaaacctaatggccctgcgaaatttatcgaagagctttcaaatcttcccgaaaccaaaaacggcgaaaatcaatatggtttttggattgaagatgaagtttcacaaatgtttaaacaggtagaacaaatcggatctccattatctgaaattaaagaatatttgttaaaagcatatgaccatgaaaaattaacaagaaaaagcaaaaaagaaacaatagaaactaaaaatatagttttaaccctgttatttataaatacatttgaaagttatgcgaataacatttcgaatgaatcaatgacggatggtttaatgagaagatttaatctcatttatacagaaaaagacagtgaaagagatttcacggattactcattatataatttgaaaaaaataagagatgagacattacaggacaaaatatctgaattattcaactcaataaaaccagatcaaaatttcacattttcagacaattgttttaaattatatcaaaaatattttaagattttttggcatagaaaatataaaaccattctaccagagaaagaaaacttttacagaacttatatgatgcaaagttggaaattcgcagtgttttatcaccttattttaaaaagagaaggaacagaaattcagggtgattgtttagtgtttggtatgaaaatatctctactatttgccaatagtatgaaaaagttttttgatttcaaactaaataaaaaactaacaccaaagaaaaaagagaaaataaaagtagatttcacaaaatacattgaatatttaaatgaaaatacagatattacattgagaacattttgcagaaaattcaacctaaaaaaagccgattcaatatcaattttaaaaagtcttgaatgtaataattatcaacacaaacttattgaagaactggagtaa

SEQ ID NO: 248102 - DNA, 639 bp, Klebsiella pneumoniae; identical to SEQ ID NO: 225769

SEQ ID NO: 248103 - DNA, 2307 bp, Klebsiella pneumoniae
gtgattccgattcggacagcgactccgactccgacagcgactcggactctgacagcgactccgattccgacagtgactcggattctgacagcgactcggatgctgacagcgattcggactctgacagtgactccgattcggacagcgactctgactctgacagcgattccgactccgacagtgactccgattcggacagcgattcggactctgacagcgactcggactccgacagcgattccgactctgacagtgactccgactccgacagcgattcggacagcgattcggacagcgattcggattctgacagcgattcggattctgacagcgattcggactctgacagcgactccgattctgacagtgattcggactctgacagcgactcggattctgacagcgattccgattcggacagtgactcggatgctgacagcgactccgattcggacagtgattccgactccgacagcgactcggattctgacagtgactccgattcggacagcgattccgacagcgactccgactccgactctgacagtgactcggattctgacagtgattccgactctgacagtgactcggactctgacagcgacagtgattcggattctgacagcgactccgattctgacagcgattctgacagcgattctgactctgacagcgattccgacagcgactcggactccgacagcgactctgactccgacagcgactcggattctgactccgactctgattccgacagcgattcggactccgacagcgactcggactctgacagcgactccgacagtgactccgattcggacagcgattccgacagcgactctgactcggacagtgattccgactccgacagcgattcggattccgacagcgattcggactctgacagcgactccgattcggacagcgactccgattcggacagtgactccgattctgactccgactctgattccgacagcgattcggattccgacagtgactccgactccgacagcgacagtgattcggattctgacagcgactcagactccgacagcgactccgactctgacagcgactccgactccgacagcgattcggactccgacagtgattcggattctgacagcgattccgactctgacagcgattcggactccgacagcgactcggatgctgacagcgattcggactcggacagtgactccgattcggacagcgactctgactctgacagcgactccgattccgacagtgactcggattctgacagcgactcggatgctgacagcgattcggactctgacagtgactccgattcggacagcgactctgactctgacagcgattccgactccgacagtgactccgattcggacagcgattcggactctgacagtgactccgattcggacagcgactctgactccgacagcgactctgactctgacagtgattccgactctgacagcgattcggattccgacagtgactccgactctgacagcgactccgattcggacagcgactctgactcggacagtgattccgactccgacagcgattcggactccgacagcgattcggactctgacagcgactcggattctgactccgactctgattccgacagtgattcggactccgacagcgattccgacagtgattcggactcggacagcgactccgactcggacagcgactccgactctgacagtgactcggattctgacagcgattcggattccgacagtgactcggactccgacagcgattcggactccgacagtgattcggattcggactccgactccgactctgacagcgattcggattccgacagtgattccgactctgacagcgactctgactccgacagtgattcggattctgacagcgactccgactctgacagcgattcggattccgacagcgactcagactctgactctgacagcgactcggacagcgattccgacagcgacagtgattcggattctgacagcgactccgattctgacagcgattctgactctgacagcgattcggactcggacagcgattctgactccgacagcgactcggactctgactccgactccgattccgacagcgactctgactcggacagcgactcggactctgacagcgattccgactccgacagcgactcggattccgacagcgactcggactctgacagtgattcggattccgactccgacagcgactctgactccgattccgattcggataccgaaccgcaggcaaataatgatacccatacggcggctatcgataccgtag

SEQ ID NO: 248104 - DNA, 1209 bp, Klebsiella pneumoniae
atgaaaaagacattggttctgacgacgctcgccctgctggtttccggctcggccgcggcaaaaacatgggtgctgacgaacgctgaagaggggatggataaaggaaactggcagatcaacagcgatcagctgaaggtgaaagatcatgcgttcagcattgagcagaaagtcctgcacggcggtaagcaggaaggcagcaaaatcctcaccattcatagtaaagacggcctgaccatcaccctgagcccgacacgcggcatgaacttgctgcgtattgagggtttcggcagccggatgggctgggattcgccggttaaagaggtcgtcaacccggcgtttatcaacctggaaagccgcaatggcctcggctggctggaaggattcaacgagatgatggtccgctgcggctatgaatggaccggccatccggtgaccgcggacgggcaaatttataccctacacggcaaggcgggcaacacgccggcctctctggtggaggtggaggtggccgacagcgcgccgtatgaaatccgcatccgcgggctggtgaaagaaagcacctttaaaaaagccgatctgcagaccctgaccgaactgcgctacgtgccgggtagcaacagcttcagcttacatgacgtcttaaccaaccatgccgactatccgcatgattatcagatcatctaccacagcaacttcggcaccccgatcctcgaagaaggcgcgcgcttcctcgccccgatgtccagcatcagcccgttcaatgattacgcgaagagcgggttaaaaacctggcagacctatcagggaccgaccaaagattttgacgagatggtatttaatattcagccgctggccgatgaaaatcaccagaccctggccgcggtggtcaacaaagcgggcgataaaggggcctctattcagtttgatacccgtcagctgccggtcctgacgctgtggaaaaacaccgataccgtcaagcagggctatgtcaccggtatcgagccggggaccagctacgcctatccggtgaccattgaacgcgagcaaaaacgcgtgaagcagctgcagccgggcgccagcgcgcagtttgatctaacctacaccctgctgcacgacagcgcccaggtagccgccgttgagcagaaaatcgctaagattcagggcgataacaaagtcgcggagaacgagacgccgatcgccaaagagtaa

SEQ ID NO: 248105 - DNA, 831 bp, Klebsiella pneumoniae
gtggccatcggggcggttattctcggtgcgatgatggtcatctccccggctatcttgcagccgtttacccgtaaaataaccaacaccgacgatctggcgctcgggcattttggatctattggctacctgctgtccgcgctggtgggcaaaattattggtaaaggcagtccctcgattgaagagatcaaagtacctaagtcgctcaatttccttcgcgactcatcggtagccatctctctcaccatgatgattctgtttctggtgctggtgctcgttgcgggcaaatcctttgtcgaggagaccctgagcgctggtcagaactttattatcttcgccattattcagtccctcacgtttgctgcaggagtttatatcatcctcgccggggttcggatggtgattgccgagatcgtcccggcgtttaaagggattgcggacaaactggttaaagacgcgaagccggcgctggactgtccgacggtgtttcccttcgctccgaatgccgtcatcgtcggcttcctcgcaagctttgtcgcagggctggtcagtatgttcctctgcccgctgttcggcttgagcgtcatcgtcccgggcctggttccccactttttctgcggggccacagcgggggtttacggcaacattaccggcggacgtcgcggggtggtggtaggggcttttgctcacggtctgctcatttcgttcctgcctgccattctcttgcccatgatgggggatatgggactgggctccacaacctttggagacgcagactttggcgttgtcggcatcgtgctgggggctttgttgaataaatcgaacttttgctga

SEQ ID NO: 248106 - DNA, 294 bp, Klebsiella pneumoniae
gtggaaacagaatacggagaaaccctgtacaaaggcaaacgtaaggtcaacggccttgagatttcagaatggtggacgaaacagactgatagttattatgcaaaaccagccataatttataattttgaactggttatccatcaagataagaaagaagggaataagctactggagttgtcgatggattacaccgttgacctgttgcacgcggataacgcattaaccgagaacgaactggtagcgctgtgggagaatataaccgaaacaattaaatatcacctcacccggtggtga

SEQ ID NO: 248107 - DNA, 237 bp, Klebsiella pneumoniae
atgaataggtgggaagatttcgcttttaatgaaattcacacgctgatccgagctctcaacataacacagaacagcccgcttaatgtgaatgctccggaactgagataccttgccgcgctttttgccgaaatgtcttatcacttggtaccagaatgggaagtggataagcataaacgcgcaaagctctacagagtcccgagtgaaggggctttgttgaataaatcgaacttttgctga

SEQ ID NO: 248108 - DNA, 171 bp, Klebsiella pneumoniae
atggttattgataataatatgaccctcgggatgtttatggcctttaacgcctaccgtggtcagttttcacagcgcgcttccagcctgatcgatctgtgtatgcagctgcgtatgctctctttacataacgaacgactgtcagaaatcgtctttagtgaacggctttgttga

SEQ ID NO: 248109 - DNA, 612 bp, Klebsiella pneumoniae; identical to SEQ ID NO: 110907

SEQ ID NO: 248110 - DNA, 150 bp, Klebsiella pneumoniae
atgagcgttatgacttactacggcactcacgacaccagctctgattggttgctcctgatggaacagtcctgtaaccaaataacgttagtaattcggctgctgtgttcgctgttgtatttctgcattttgggcagacatgaggaagtgtga

SEQ ID NO: 248111 - DNA, 570 bp, Klebsiella pneumoniae
gtggtgattgatcatgatgaagactcaagtttaatacttaaaacggagtttataaaaacaaaaacattaaaacactttttaactgtgatcatttcattattttatataattaccattataattttctttattctcccatcttcatgggtaggtaaaatattattattttccacaccaattgcctttggttattttttatattatatggcttataagactgcaaaaatctatcttaagaaacttactgatactataacttttagcagtgcagctattgcagcagctacagcactttgtggattaaacctgccacaatacttgtatgaccacgaagcaaatggaattatacaaatcattttatttttaatattacaaacattttctatttttgccaccacgaaatgtttaatttcatggggtgaaacaatagaagaaagcagaagatactacaaaaaaaatgaaatcataaaaaagaaagcgggcattttaaaaaatacaaagctgcttattatctcagctttgttatattcaaagatcaggtttcacaaaaacaataaaaataataaataa

SEQ ID NO: 248112 - DNA, 831 bp, Klebsiella pneumoniae; identical to SEQ ID NO: 226921

SEQ ID NO: 248113 - DNA, 429 bp, Klebsiella pneumoniae; identical to SEQ ID NO: 138162

SEQ ID NO: 248114 - DNA, 573 bp, Klebsiella pneumoniae
atgggcccatgcaatccgactgctggacttctcgctgaacttcacattgtgctcggtgccgaaccagtagatcgcctcgatcacctcgaccatgtagcgcttgctggattgagaggtacgaacgccgaagtagacacggccgccattgatgcccggggcggatttctgttcacgctccgggttttgcatctggctgaccagcacagtgatgaggtctttccactcctcaggctccagcttttcgccgtgccagatcacctgatcgctcaggtctttcaaaagtggccacataaggcgattctgtttgtcggtgcggctttcttcgcgcgcctcgataatcagcggagatcgttggtcgacgggcagagactggatgaaactgacggcgttacgcttaacgttgtcgttgataaggcagaattgttgcttcacgcttcacctccgcagaggctaaacgctgaatgcagaaaatcgccggtggccttcgccatcggtgacagggattgctgtaaggttttgtgcgccatgtgtccccacttggcgccggtcattagtgtcagttgctcaggctga

SEQ ID NO: 248115 - DNA, 135 bp, Klebsiella pneumoniae; identical to SEQ ID NO: 34870

SEQ ID NO: 248116 - DNA, 240 bp, Klebsiella pneumoniae; identical to SEQ ID NO: 247919

SEQ ID NO: 248117 - DNA, 171 bp, Klebsiella pneumoniae
atgcacagcctgctcgctaaggtcatggatcgcggcatcttccgcgtgccggcgcgccgcaagcgcaaggtcgaagttaagccttccgacatcccgaccctgaaagactacaccgcccgcctggtcgataagaagtggctccgcctgagagcaaggaggccgcatgcttaa

SEQ ID NO: 248118 - DNA, 450 bp, Klebsiella pneumoniae
atgacaccggcggcactcggcaatgccggtggcaatatcctgttctctctgctgaataacacggcactgaaatacgttggtttcggactgggcgcggctgacagctccaatgcgttccagtccctggctgcgcataacattaacgccggtagcacgctggcgggcattccgtttacagggaaaatgttttcacagtatggcgaatatgcgctgatgatcaccctgaacaacggcgttctcaaggtctattctggtatgactgataacccggaaactctgctgaccggatgtccggcatttgattacgtcaagctgggcagaaacagctcggtttctggatctacggtgtcaaactcaggtttctggggcggctggctgcagaaagccgtactgttcgattcggcgctgagtgatgctgacatgatggctcagttcgatctgctttcttag

SEQ ID NO: 248119 - DNA, 867 bp, Klebsiella pneumoniae
gtgttccagccaaagttgcatcccctgggagacgctcagcagcgaaggccgccagcgcagcagaccgtccggctgcacctgctgcagccagccggtcaggttcacgccgccgcaccgcagatcgatctccatgctctgcgcctgctggcgctcggccatcacccgctcggccagcgcctgcatctccaggcgctgcgtctcccagaccagctcgccaaaggcgccatacggcagctcgccggcggcgcgaaagcggcggaacatagccgagacgtcctgctcctcaataagcgtattgagcagttgctgattcagttgataacggctcagcccttcaagagtgaacggctcgtcgtctggaatatcgtcctcttcggcgcggaaattgacccgcaaacgctgctgaaagaacgcgcgtaccgggtgctgccagaagcgcagaagctgatcgaacggcaggctgtcaatcggcggtgcggtgagcggctgtataaaatcgctatgcgcctctccctgctggccggcggccgccagccattcacgagcgtagctcttgttctcgtcttcctggaaattggctacgtcgaacggcatgcgcgtatgcagatgggtgatgtgggctttaacccgcgcttcgctggcgtcgcagtcaagctcttcgtcaccggcgagacagtggctctggccgatataatccaccagctcctgcaccagcaccgaaggaaaacgctcgctgttgtcctgtatcgaacggccgatatagctgatatacagcgtctgctcggcggacatcagcgcctcgaggaacagatagcggtcatcatcgcgccggctgcggtcgccgcgctgcggcttctggctcattaa

SEQ ID NO: 248120 - DNA, 681 bp, Klebsiella pneumoniae
atgcttacccagcgcctgcagcgcctgaagatagaccggcggcagcgcggaaatcccgcagatgaagacgcgcgacggcagcccggcgggcggttcgtccgctttttccagggtactgataaagcgctggtagagattggcgcggtgccactgcggctgccccagctcggcggtgtagctcaccagcgcctgccacagcggcgcctgccactgctgggcatcgccgagaccttccacccgctggccggcctcccagcgcatcagccactccgggcgatagacgaggtactggtcatagaggtccgccacccgggcggccagctgaaacagcttgcgcttgtcgccgtcatcactcagatactggcgcagcaggataaaatcgtcttcctccaggtgctgcggcaggagggtcatcagcttccagctcatgctctgcttgctgaaggcgctttcgcccggaatatctttcaggacgcgcacgaacatatcccagataaagctcgccggcagcgggaactcgatattggcggcaatcccgaagcgcgcggccagggtcatctgcagccactgcgccatgccggtactctgcaccagcaccatttcggcctgaaaagggtcatccagccgctggcgctcgacgataaactccatcaacgcctcgagaacatccagccggtttga

SEQ ID NO: 248121 - DNA, 1218 bp, Klebsiella pneumoniae
atgaatgcttatactggtgaaacgcttgataaaataatagatctatttaagcagtttgaagaatattattttgatggtgatattgtccatggtgtaatgtcattaaatagatctaattatatttattgctatgaatatagcaatctttcactaataagtgcgatattttctgtaaagggaagagatgatctaagccaagagtttgttgacattaatacatttaatcaaaatttctttaataaaaatttcttaatgattattagcttggatatgaaaaagttgagatcattaggattagccatttataaagatttgaatgaagcgataagtttaagtcctaaagcaaagcacaagtttattttaatacaagcacctgatggaaaaatagagctttgtccaaatgaaacaatcaaaggacgtatacttcactacattcagataagtaaagtgtgggaagttttagtcaattcttcagatgatgatgacggaaattcttgcacgttccttggcgcaagaaaatcatttgttactttacactacgaactggatgatttggatcttgaattagatggtttttcaaaattcatgaaattaatggatttagaggatcataaagaagaaaaaaataaaatattatcaaatactattttctccttcacatctaataaagatttaaagtttcggtttagaactattcttaaacgattttctacttttgttgaaagattcgaagaaaactatcatgcttttgctgtcggatttagcttcgaaaaaataagaaaagaatatgaggaaaaatttagagattatttgtcaaaaattaattcagtgctttcagagtctttaactcgttcattagctattcctgcttctactgtattaacatttacagcaataaaaagtggctctgagggagcggtgcatgatattttattgaattctggaactttttttgtttctttgtttgtactatttactacttttttcactgtaaaatttcaattgaattttctgaaaataactaaagatgaattcttagggctttttagtagatttgagtcggaattagattctgttaatttgtccgaagcaagagataagtttgatattttctcatctcaggttggattgataaagaaattattgttatttatactctcaatgagtataactaatttccttataaatattgtttcctttgttacagtactcatatag

SEQ ID NO: 248122 - DNA, 360 bp, Klebsiella pneumoniae
atgttaacgccgtttggtaagacagtaagaaaaatgcgcatagacctggggcttacgcttaaaagcatggctgaggctatgggtatgacctcgtcttatctttcagcaatcgaaactggtaaaagggcggtcactaaacccgtgcttgatagcatcattggctatctgaatgcggatgaaaaacaaaaagaaaagcttatcagtgcagctcgtgactctcagcaatcagtagagatcagcttgtcaggtaagaacgaccatgctcgtgaagtcgctattgcgttcgctcgtagttttgatgagttaaatgaagaagacttccggaatttacgacagattttgaatcgaaaacagcagtag

SEQ ID NO: 248123 - DNA, 522 bp, Klebsiella pneumoniae
ttgagcggacaagattatcgtgtacccccgcagaaccgcgaatcaatacgttctatcgtcagatctctgcggagcaccttcggtattacaggtctgatgtttcctgttatggaggtgattgagttcgcattgcctcagttgatcccagattttgaactccatattggtgggatgaaggaaatgggggagacgcacggtctcacctacccacaggaacatttattgattcttcgtgaagacatttacgagggggctttgaatggggtagggcgtgacaggatgactgccgcacatgaactgggtcatcttctcatgcacaggaacattgctttcgcgcgttctgctccaggggtaaaaatccgcccttttgagagtagtgagtggcaagccaaatgtttcagtggtgagctattagtaccagctattcatgccaatgttctgaaaggtatgagtgctgaaaatgtagctgaggcatgcggagtatcattagtggccgcacgatatcagttagacaaaatgtaa

SEQ ID NO: 248124 - DNA, 1182 bp, Klebsiella pneumoniae
atggcagcaaggccacgaaaaaaagaataccgccaccttcctgattatcttttttttgataaagatcgtggcgtgtataagttcacgcttataactgggaaaaagaaaactctcggttcggatcgagtaatggctattgccattgcccgagaatataacttgagaatgcgacctgaaaatacaccttcgatagattcattaattcgggaatcgggcgggctgaatggtgaagccaacccgttttctgagcatgttgatcgtattatggagagagcgatcaaagatgagcagccgtctaaaagcacacttgacgattggaataatgatgccatcagggttaaagaattttttaataacatacccgcatgcgacattgagcttgagcacgtaaatgcctacatacggcactaccattctgaatcgtcggccaatgttcagaacagaaaagttagcttcctgaaaaagctattctcttatgctgtggatgaatcgctaatgatggataaccctgcaacacggaagaaaatgcggcgtgtcgataaaaaggtccgccgacgacttactttggagcagttcctggccatacatgcagctgctgaaccttggctgaagactgcaatggaccttgcattacaaactacgcaagcgcgcctggaagtttcccggatccggtactcgattaaggaacctaaagaaggggtgtgcggctgtgtatggttcgatcaggaagaggctggcatattcggaacactttacattcatcggcaaaaagtgcagcacaaagaggcctcacacgttgcaattccgatcggcagggccctgaaagagatcatcgacaacagcagagacaatgtggccagtccttatgttgttcaccggcttctggaaaagagaagcaatcctataagcaaggaagttaaccacccaacacaggtggcccctgattatttgagcagggcattttcagagctgcgggaccggataggtgtagcggcagaattacctatcaaagaaaggccaactttccacgagattagagcgctggcagctcatattttcgaaagacaaggtaccgatccgcaggcaaggatggcccatagcgatgcgaaatcgacaaaaatttatacccagaatcatgttgaatgggttgaagtaccgcatgctgaaataaaaatggcatag

SEQ ID NO: 248125 - DNA, 327 bp, Klebsiella pneumoniae
atgatcaagaccaccagctatgcagaagatgtaatgacgggatccgtggtggttgctcgtcatgtgattataacgttcgataaccgggtgcagccgggctttatggagaaggaaaccatggcaaagctaatgaaagcgagtctctggagtaaacgcgaatttaccaaagactccattcctgacaaccgtacaattaaacgttgggtcgaaaacggattactcatgggaaggattgtagatggttcagtatttgtctatgaaacggaaaaatggggagttgactcaattgttaatcaggcggtacgtcagttaataactgagggttga

SEQ ID NO: 248126 - DNA, 252 bp, Klebsiella pneumoniae
atgaaaaaagaattcagaaacaaaattacccagcgattctctcaggctgaaatcggccgccgccttgggtgtatgcagcaatcagtgtctctctggttaaacacgagggttccagctgatcgagtcatccctctttgtcaattaatgggctgggaagtaactccccatgaattgcgcccggatctgcaccccacgcctatcagtggaatacctgaaggtgtgattttgcccaagaaacaagaaggagtctga

SEQ ID NO: 248127 - DNA, 1122 bp, Klebsiella pneumoniae
atgactgccgcagttgaaaaatttttaataacaaatgaatgtgagtttgaagctttcatctcaaaaatgatgggacgaaaggatttagactctgatgagttctgtttccctgacgtagagttcaaaggctggcccacgatcagcatcaatgtgaaaggggacaagaagagatacagctcttcgttgacagcctcaatgctgttcgggatggctgagctaaccaatgagattcaaaaggcatttacagtcatccggcacgacacacataacaggcaaaagttaacaaactcagacaaacatttgcttgatattgtttaccatataagtgaaggttcaagccaagcagatggtcaatcagatgcaattgtgaatggggcagtttcggtgatcaaagaagcaatcggtaaaatgaatggcagacaggcgctttgcgcattggttgctattgtgattgccgccggcacagttggctggaaagttgcggatgaatattgggaaacccagcgccagtcatcttctgatcagatctctttagtcaaagaggcaaccggggcagtacttgaatcgcaaaagtctaccttagagctcttaaaaacaggtcagacgactgtcagccgtgaagttttggcgcacggtgaagatggtagaaaaaagtttttgaaaaatattgcccaagaccctaaggtcaaaacagtcaagctcggtgatgaagtaatcgatcgtgcacatcttaatacatacactcagcggcagtctgttgaacggataaaaaatacacgtcaggatgagttttatattcgaggcatatctcgctcaggggctaccaatcaagacatcagcatttcagttatcagggcctctaacggtgaaggtttcactatcaaaaccactgccgatataacttcaactgatgagcttttggtgttttccagcgcagtagcaacagagtctactctcgagatctcttatttagaagtcacagagaatggacacgtatctgcaggccagctaattaatatcattcagccaacagaaattcaaagcgatgccgctgagccggagtctacggattcagaggcagattctgtagctgatggtgaaccgacaaaacccaaaaagtaa

SEQ ID NO: 248128 - DNA, 1407 bp, Klebsiella pneumoniae; identical to SEQ ID NO: 180771

SEQ ID NO: 248129 - DNA, 270 bp, Klebsiella pneumoniae
atggctgaattacagcatacccaaactcgccccaaatatacatggttattcctggctaccccgaagcattccccagagtgcgccccggtcgttctccgctttgatgccgacacggaagccagcgctcgcgctgcttttccaggttgggagttgatctttgctgcgaagatccgcgcacaggccccatgtcgtgtttcgttcttcgattacaccactcggcgtggttgggagttcgacagtgccgcgattcaggaggtgcgtcatgcgtaa

SEQ ID NO: 248130 - DNA, 189 bp, Klebsiella pneumoniae
atgcgtaaggtcaaatggtcagaaatcgatattgaagacgaattgagccgtcttgaatcgatgctctccacctcgctgtatatgaatttcgatgatgaaaaagagtacagcattgcagtggatttaatcggtctgtcgttgacgcgcgttcgggagctgaaagaagtcagtgaggtgagccatgtctaa

SEQ ID NO: 248131 - DNA, 204 bp, Klebsiella pneumoniae
atgtctaacatcggtgaacttaacgaaattcttaaaaatgcacaaaaagccagcgtgatagctcgcgctcttcattactcctgggttgagctacagggtcatgaagtcgcacttatgctggaaatgacaaccgaatacaccgatttcgtgacggagcacctgatcaacctctccggggaagatggggaggcgatcgatgcgtaa

SEQ ID NO: 248132 - DNA, 201 bp, Klebsiella pneumoniae
atgcgtaaattatacgaagtacaaatagaccctttgcatcacgcaactatgacttcgtctctgctggatgcaataaaccagattgccagcaacaacgattcaacgacaaaccaccacatccctgatctcatagctattgctgctgagagagcgaaagccttgatggacatgctagaggctggtgaggtgctagatgattag

SEQ ID NO: 248133 - DNA, 477 bp, Klebsiella pneumoniae
atggaagataaagagcttatgacagcgctttttgcacagcagcgagttcaagttatgcacatagcaaaacattacgatgagttcactgatgcctacctctatgcatgggatcgcggagtttatccattccttagcgatacagacggtagtgttcctgttatgccacatgaatcctttagtgactattttataacaaccagagagaaaggactttttctacttaaaagacttgatgatgcctggctggcaaaagagaaactcactttttacaagcttgaggatgaattaaacgtcagcagaggatattccaccgattggacgcgatctgatttacttcacctttgcagatatttctatttggatggacgctttgacgattccttatggaaaaatatttgtaaaaacatggagtgtccaactgaagctcatttcattactgatagttttgacagaaaaacagatgtttttttcatgtaa

SEQ ID NO: 248134 - DNA, 153 bp, Klebsiella pneumoniae
atgaatgagaaagacgtggtgaacctgtatcagtctctggcccgatgccgtgatggctttatgcaaacccgcagccgtcacgataagagccagcctgtaccgcgcatgagcaagcgtgaccgggagttgcgggaatgcttccgcaaccgctga

SEQ ID NO: 248135 - DNA, 2307 bp, Klebsiella pneumoniae
atggcaggtaaatcattaggcactctcaccattgacctgatcgccagaaccggcggttttgttcagggtatggataaagccgaacgttcgtcacaaaaatggcgggataacgttaaaaaagatgctgcggccgtaggtgcatcgcttgccgcagtcggcactgcagctgcagcggctgctatcggtgtcggtgctgctggtatttcgttggtaaaaaatacctcagagcagatcaccgcgactgatcgctgggctaaatcgctcaaaatgtccactcaggaccttctgtcatggcagtttgctgctgataaggccggattaaccggggataatattgctgacatcttcaaggatattaacgataaagtcggcgatgcggtgcttaacaagtcaggtgaagctgctcaggcgctggatactctcgggctttcagctgagaaactggcccagcaatcccctgataagcaactgatggcaatcagtgaagcattacagaaaattccctctcaggccgggaaaactaatatcctcgaaagcctggggaatgacctgtcaaaaatgctgccgttattcgacaacaacaacgagaagctgaagcagtttatccagctgtcaaaggattttggtgtcgcaccgccgcaggaagatattgataatctggttaaagttaatcaatttttccaggatattgagagcagtgcgcaggggttaaagatcgagattgccagtggactggctaaagtagacctctcaccgattcaggatggacttgatgatatccgggatgtgtttaccgatcctgctgttctgtcaggtctggcaaaactggtcggagggatggcggaacttgttggttggatgggtaagttaagttctgaatctgctaattttctcagccatatatttgaagtgcctgacaggtttaaggctggtggctggtacgagtttgaaaaaaatcagagattaggagcaatagcagatacgcttcaatcagatttaggggtaataactaaaccatcttcaaactctgagttgccaataaataataacctgctccccgggcagagcaaccagaaacaaactaaaaagcctgatgctgaggcaaaaaaacttgaaagtgcctataaagccgtagaacagtcatatttaaagcaaattgcgctggtggatcaattaaccgggaaaaccaaagacgccactgaagtagaaaaactacattttgatttagtgtctggtcggctggtgggtataaataaagagcagcaaatcaggcttgagggcttagctactgaaattgataaatataatgccctgtcaaaattccgtgatttgcaggatgagttattaactccggaacaaaaattacttaaaacgacgaaagaacgttttgaagtattaaaagatattcaggatatgacaggcatcagccctgaggacttcgagaaggcttcaaaggcaatatctaaatcatctatcacagatgcacctaagtttcagggcattgatgcttcggtgggcggtgctggtggtgaattgattaaaacggcggaggcccaaaaagagcaggagaaatggtacaataagcaactggagatgcagaaggcattgctcgatcagaaagctattaacgagcaagaatatgccgacagaatagctgatataaataaaacaaataatgaaaaaatggaaagcattcaatcagcatacggtctatcgagtgttgcaatgtttgctgatatgacgagccagtcagcgcaattattacaggggcttggaaaagagggatcagctgcatataaaacactgtttatcgccagtaaggcagcggctattgctcagtcaattattagtactgaagttgcagcggctaaggctctggaattggggcccatttttggcatccctgcatctgttgctatcagggcggtgggttatgcaggtacagctatcatcggcgcacaaagtattgctggtatggcgcatgatggtatcgactcagtaccagaaacagggacatggctcctgcagaagggggagcgtgttgttacatcaaacaccagcgcgaaactggatgaaaccctgaatcgtgttgctcagcaatctaccgcggggaatcaaatagctcaggagtttaattttaacgttaatggcgacccttctgatgtacagatagccatgatgaaaaaagcggccgctgatggtgccagaatgggctatcagcaagccgtagactcggtagttaaagggcagggtgatctacatcgtgcaatgatgactaaaacgaattcaggtagaaaaataaggtga

SEQ ID NO: 248136 - DNA, 312 bp, Klebsiella pneumoniae
atgattaaaaaaatcaaaaaaaccttaaatagaataactataggtaaggtatttatagcaggtctattaatgctacctatgacactgatattccctgaaagcattatatgtgaatacgtgtcggcattaggttcagcaattacattcgcaacaataacttttaaattagcattgttcttcatttggtttattcatctcacttttttaatgagcatgagaggaacaacagagagagcagaaatatatatatctgacttgaaatctgaacacttaaaaagtgggaaagaaatgtttttagggaggtcaaaatga

SEQ ID NO: 248137 - DNA, 468 bp, Klebsiella pneumoniae
atggaaagacaacaaacaaaactttattttgctatatggaaattaaaaggtagtgagaagctacaagctattaaatattttattagttgcggtgaagatattcatgaaagagacaaaaacgagttaacacctttacatcaagccgttggatgtggtgatgttgaggccgtgaagcttttgttaacgcttggcgctaaccctaatgctatagacatatacggaagaacgccactgttctataccgctttcagccctaagtacaatggtcgtcagttagatgaagctctcatagcgggaaatgctgataccaccatttacgatgttaacgggcatacacgcgatcagttcgtgtatagcttcaaaagctcgatgttctaccgtccagaaccagaagcagtagaagaggaacaaccggaagaggtagccccttcagctcctgtgaaaagggcaggaagacgtaaagcatga

SEQ ID NO: 248138 - DNA, 2067 bp, Klebsiella pneumoniae
atgaatgaaaaagataatgttttacagttaacgccgaaagattttaagcgagctttacaagctcaggataacccgtggcgtgaaacagaagaatactcaataggtgcggaaggtatttttattcgcactgtaaagacttataaaaatggcgttgaagatgttaaatgggttcagattcatcctttccctttaatgccaattgaaagtgttgatatgctggattctgatattcaggaatcagtatttgatgaagaaaatcaggtttcatctaaagacacaaaaacttatactaaagttcgtttcttggatctaaatggtcaggaaagatttgtcaaaatccctcagtctgaactatctcaaatcagtaaacagtctttgttagctaaacgctggcctttacccccggctaacaaaatgtcaaaggttgctgacataatgttaaaggtgctggctgatgggcgtagaacggttgtttcacctgctggcgttgaatatgaaccatgtataaaaatcacttctggctctgataactgcggctgggttaatggtgaacacattaaaccgggtcacccgcgctatgttggtgatgaagaatgtatgacattcaaagcaggtaaagctgagattcagattgatattttagggcagtggtacgcgcaagatgaacagttagctttaatcgccgctcatcaacttgttggttataccttcggtaatatattttctccttccgtaagtcttattattgagttaacaggtgatccgggcgatggtaagtcagtgcgattaatcgcccaatcgtcttatgaaggtataccaatcaaaggtcataatatcctttattttgacgccacagcctctatcgcaggtatggagcgtttattcccgcttttaaacagcggaagcgttcttttagatgagtttgataaaatcgtaaataacaaaggtgcaaatgttgctaccgaaatgatatttatgatttgtaatggtactcaacgtgttttagcagaagctaacgacaataaaaaagcgagaaaaatcaagaaatggtcttttgcgcctgttgtagcttccaataaacctattgtagaacgtcttaatggtcatgaagatattatggctattaaagatcgtatatggactattcacacttctgatgaagagatttcaggcttcaaaggtgatctttctatcgttaacgtctggagaagacttttagaagaaaactatggtcatatttatggtatagctatcgattatatcaaaaataaccgtattgctcttatcaaacgattcgaagatttgagaaatgagctttatataaaagaatatggtgaacattacagtaaagatatgcgtgatgctgaaatgattgcctctcttcaattgggcgctgatttagtttctgaaattttcggtgaagaggctggtttatcagctcatagagctgtagacgttttaaaaagaagaatggcaaataccacgtttaacgctgataataactacaaaattgttattgaaagatttaaagaatggattgctgataacatcggttctattcgtattgatggttttgcttacacaggctcttatggtagaaacagtgaagaacaacagttagatcaggctgaacgcctcactaacaacgctatcatgtctaatcgaggtgctatagctggacttgagcaatcaagacctatgcagcatagaactgattttgaaggttgtatctggttaaaaccagaagcagaagcaagcttaaaaaaatcaggtatagcaattgatgaacttatgcgagcagcaaaagaacttgatttgttgccaaaaacaaaacgcggtgaattaattgataaacaaaaacttagtggtcagaaaaaagactggttagaaaataaaacgtcttatgctattaagatattgctttatccattccctgaagaagataatgaagttaataatgagtttgaggatgaagtgttttattcaaacgtggatcgtgaggatatagattcacttgttgaacaaaacattaatgctcatatgttcgatttacctaaaattgattaa

SEQ ID NO: 248139 - DNA, 567 bp, Klebsiella pneumoniae
atgtttattgaaaataaaaacaaagagaaaaagaagttaacacttggtagaattgctgctgccccatttataggaactgcgagattatttacagcgccttttgttttaccttataaagtgggtaaaaacattgttaatgctgttcaatatgctcatggtgatccgagcaataaacgtacctttgaagaatggtatgttattaaaaactctaatgaaggaattttacaaacaaactacagaaaatgcgcctcaatagctttattaacattgatgctaacgtgtgtcgctctgttctttggttttagttttatgacaagagctgatttaacaattccattaaggatggttccttttaccgctgcgcttgtcggttttgccgggtatttcaatcttatcgttaatgcttattgccttaaggctagaacttttgagaataaacttaatgttttcaaatccattgaagacattatacctaaccctttttatgaattcacttcttgtgtaaaagataaaaacaataaaagtagaaatgttccagttatgttttatccgaaaaataaaaaataa

SEQ ID NO: 248140 - DNA, 2211 bp, Klebsiella pneumoniae
atgaataaaataaagatgcttgtttttagcattttatttactgtgctgtattcggcacaagcacaagcggcaaactattatagtttgactggagataaaaactttgtgctaaatgcttttgataaatattttaatccatcaattgtagggataatcggaacttttttagatttttatgggccaatatgtttaatggtagctgctattattgctgcctacattttgattgttggaaccgtgacaaccgctcatgaaggtgagatgttaggtaaaaaatggtcatcattatgggttccgatacgtgctccgttagctgttagcttgctattgccagttagtaatggatgggctgttattcagcttatagttatggcattagctgttcaaggtacagaatggggggatgcaggatggaagaaaatagccccttctttaataactgacagcacttatatatccgtgacaaataaaacagctattcgccaactcgtagttaataccttgtattctgctgcttgtgtgaaaatcaataatgatgtagcaactaaggctttacaaaaatctggtgtgaagttatacggatttatggatgccgctaattttaaatctgattcaggttccaataaaatgattggttataccttcggctatccagatggaaacgcattttcaggttataaagcagataaatgcggaagtacaaaaatgaagcttcttaatgaagataaaatgccagatccgggttcattattaataaacacgaacgggatagcgatgaatgtccaaaaagctcagatagctgctaatgctgctttagtatcaggtgctatggcatatgctgaagctaacttgacagacaggtctaagactattgatgttgaaacattaaacaaacacattgatcttatgactaatgcttatgctcaaattgttcaaactgctgctgaagctgctatgaaagatgctgttaatcaatcacaggttgacaagttaacagaagctggatggacttatagctatgcgttttacatgagaataacaacggctgcgtcttcagctaatgccgctttaaataacttccctatttcctcagcaacattgaaagaagaagattttaaatacaatacatggggtgaagtttacagtagacttgataaagtaagaacgttattgaatgctactaataaactcaattctaacctttctgatgaaggtgataatgatgggttatatcaaaaagccatagggattatcggaggtaatttaggtgtattcggaactcaaaaagctgatacagcaagtttaatgcctttaaccgtttcggcaaatatcggtgagcatgttatatatggcgtagatgctatgttagcggctttaactgtaggttctatgttaggtagccttcctgtcattggtggtggtatacaagcggttgtcggtcttctgtctggaacattgacatctttcttcgttccattattgatagtaggaaacatgttagcacatgttatgcctatgatgccttatatcattggtttcggttgtgttataggttatttcgttcttgttcttgaagctttatgcggtgctccacttcttgtagtagcttcaataacacctgatcaggatggtgtagttggtaaacaaggacaaggttatatgttgcttttatccttattgcttagacctgccttaaacgtggctggctatgcggcttcatttgtagcgatgaatatcagttttgaatatataaatagtacgttctttgctgctgcgagtgatgtagaaggaggattcttaggtattcaaaaaggtataaccatgattgttatatattgtgtattaacgctttcagctacattagcatgttgtaagttaatgcatttattacctgacactatctttaaatggataggtggggcttcttcaactgttcttggtatgttatctactcatgctgaatcaggtatgttaaaagcacaggctgctgttggggcaagtatgcaaatggcaacggctggtcaaagtggaatgctcaatacggctaaaagctttggtcaaactttaggtgatagattaaaaccacagcctaataatactgctactaatggagataatggtgaaggttcaggtgaaagtgaagaaaaatcagaatcatcaaataataaacctaaagataccagcgtagatctacaggacttcaacaaataa

SEQ ID NO: 248141 - DNA, 504 bp, Klebsiella pneumoniae
atgaatagtattacaatagaagaaaaagatttaaattctggagtgtttgttattaatcaggctaagtttaaaaacaaaacagcatacacttgtattagaatgacagacgatattaagagcttactgaaacagaaatgttctggcgctttagatattgcaattattggattattaaatcatggtttaaacaaactaaaagagcaaaacaaagcaatagaaataaaaaacattaatggaaatatacattttattgaacatgataaaacaaatggtaattcttttataaatgtcaaagcaaagatacaaagggaaagcagcaaatcatttagtattagaatggataaagatttaaaagaaaggttaaaagaagcttcaggcaatatctcttatagtgttggtatattgtgcgttattaaatattcattatttatgcttgagaaaaacaacaaagcgttaataattaaaaacactgatgctaatattgacaattcttattttatataa

SEQ ID NO: 248142 - DNA, 480 bp, Klebsiella pneumoniae
atggagttagcatttaaatgtataagaagaagattagatcaagataatacggtcaaaacacttattaagttaacacaaaatcagttggattttatagataatcatatatctaaaaactcaagatctcttgctgtttctcagttgagtaaatgggcaatagaaaaacttgttagtgaaagtaaggttttaaatatctcattcttagaagatggttatcattttacagaaaacgatattgaagtaggtagcctacatattgtatcgcttgataaaagttttaacccagaaagtaaatatgtatcaatagtagcgagtaaagaagtaatagatatattaaaagaaaaaacaggaaacattgctttaagtaaagctctaccagcattaaccatttatgctttgaatgagcttatagctaaaaaggaaatgtatgtttatgacagcgtaaataacatcaatcaaataattaaacaaaggagttaa

SEQ ID NO: 248143 - DNA, 198 bp, Klebsiella pneumoniae
atgaaaaaatatattaatcttttatcggtaaacgtaaactacttattagcaatattatgtgtttttatggctgttcttactgctaatgtttatgataatgggaatgttaatataccagaattaattagcgaatgttttatgtgtattatgatatttctggcattttatgttttattcgaattgccacgaaaattttaa

SEQ ID NO: 248144 - DNA, 189 bp, Klebsiella pneumoniae
atgagtgatataaaatataacgttcaggatatttgtaatgaacttaaaagtttaaacgtttgggaaaggttttgtgaatggggatattctatttatcctaatctacataattcacaacaggctttcatgtattgttatgaagtatttaaacttaacgagaactatttcatagaggaatggaagaggtga

SEQ ID NO: 248145 - DNA, 564 bp, Klebsiella pneumoniae
atgaataaagaatataatgtagttttaaatgatggtgtaggcgtttacactttaaatagtggggtggtaatagttttagagggtgttcacaaagatgaaccattcatagagtggattgaactttataaagacgaaaatcattactataagaacaacactggttatgaaaggagttatcaaagtttagtttgcgaagatgattttaaagttcttattgaacgcttctgtagctatctatggtcgaatatgagtaaacacaattttagtaatgaggacataaacaaagtattaagttatgattacactgatgatagattaaaaatattttttgaattggataacacttctttaaaaatatctaaaattaaccatccaatctttgaagagtttttcagtgaattagatgttaaatgtaagttagcacctgaatataataatgagttccacacaggaaattttaatgccatttattttcatggtagatgtttagcttttgaagatgttatagagtgtattaaatataatggtggtgtcatgtgtaaaataaaaagaataggtgaataa

SEQ ID NO: 248146 - DNA, 156 bp, Klebsiella pneumoniae
gtgaaggtctgggtcgtaatatcaggcactccctatgaatcgtcagaggctatcgagggtgtttattcttccgaggaaaaggcagaggaaaagctcgccaccttaaagaatgattctcttaactacgcctacattgaagagtgcgaagtcgagtaa

SEQ ID NO: 248147 - DNA, 477 bp, Klebsiella pneumoniae; identical to SEQ ID NO: 229431

SEQ ID NO: 248148 - DNA, 1470 bp, Klebsiella pneumoniae
atgcctaactttggaataaaagatgccaaacaaaaattaatagaatttcttttgaatttagaaagcttagaaaatgaatttaaaaaagatattctagctcaagaagagaaaaatattaaatcattgtgggataaaaaatatgaaaaaattgatgggttagcctctgaaaaaggcttcatattgaaaggggtcaataaagatatcaatagcaatggtttaaaaaatatttcaacgtcttcattaagtaagatatcggcggataaaaaagaatggatcacactcgaaaaagaattaactgaattagataatgaattaacattgactataaaaaaaatcaaacaaaaaaactcttcgttaacaccagagttaattaaaaatgcacagagaaaattacaatcagaaatttcgctaataaaccgacagattagaacattaaatatagaacgaatttcagaaaaacaaaaaataaaagaatatagagaatcaataaataaattagatatagaaatcgatagattagatagtgctctaaagttagatgcctttctacctgaagataaaatgtcttctttatgtccactttgtgatcatgaacttgatattgaatcaagattaaacgttacaaattcaaaaatgaattatagagattctatcgcttttctcaaaagccagagaaatctttatatatcctatatcaataaacataatgagctagactctaagttcgataacatcagtaactatttggtcaatgagattaccttaaagaaaaatgaaataaaaaatctgagaaaagatatttcttcttttgaagactcgactctacgaactgatatattaaacgaacttactatatctcaaaaaatagagcaatataaaaaactactcactacatttaatgctgtaaaggcagatctaaaagatctaatagtggagtttacgaaattaaaagatgataaatcctcacttagactatcagacgaaagagataatataaagatagccttctttttagaaaaatttaagatactactaggttctgattatttcaactatactagcaatcatatttatcatattgcaattcaaaacaaagctccatcaagactacttcctgtagttattactggtcgtgatactcaaacaatcagactaagttcttccgcaagtgatttcatccgtgcacaatgggcattctatctaactcttttagatatttctgctaaccatccaggttttttaatactcgatgaaccaggtcaacacgcaatgaatgtagaaagcatggttgctttgcttacatacgcagcatcgtctaataaacagataataatgtgtatatcaaaagacacaaaagataagtcaaatactgcaaacttaaataaaatatttacaaaattgaaagaacatcaaaaatataaacttattgatattgatccacatgagcaaaaatgtgttggctctcgataa

SEQ ID NO: 248149 - DNA, 588 bp, Klebsiella pneumoniae; identical to SEQ ID NO: 243449

SEQ ID NO: 248150 - DNA, 408 bp, Klebsiella pneumoniae; identical to SEQ ID NO: 120048

SEQ ID NO: 248151 - DNA, 780 bp, Klebsiella pneumoniae
atgactaaggaacttaccgacgctataaaagcaattccacctgaggttatcgttaatgcctacaacgatggggcaaagggaccgcttgtacaaatggggatcttgggggaacaaattcttaaaaccttgaggtttctcacttatccaatacaagcggctgctcatcgccagaatttgatcgatagacgattcgcggaagcattggcctccatacctgaaccacaaagaattgctccaaatgaaggattggttctggaagttgcagataagttgaaatatcaaatcagcgataatctgatatctgatatgtacgttgatctgctgtcagcttcaatgaactcccaaaaggctaatttagcgcacccatcatttattcatttgatctcacagttatcatccgatgaggcttttttgctattaagaatgtctgaaggactatgcccgtcatatatgagaagaatggctgattgggatgttgtttctgaggaagagcgagaagcacaatattcatctgctcaatttgtatttaatggtgaaacattaaaccttatagattctttgttgaagcctgaggaaatgcattttcctcagaacttttatatgtatatagagcatttaaggtcgctagagctaattgaatactctggcgagtatgtcgaagtaccggatgaatggaggcagcggaaggattctttatatgcattttggttcattaggctaagtaaatttgggcgattatttttcgaatgttgcagcaaaagcttaaacaaactcggataa

SEQ ID NO: 248152 - DNA, 162 bp, Klebsiella pneumoniae; identical to SEQ ID NO: 98353

SEQ ID NO: 248153 - DNA, 564 bp, Klebsiella pneumoniae; identical to SEQ ID NO: 98351

SEQ ID NO: 248154 - DNA, 519 bp, Klebsiella pneumoniae; identical to SEQ ID NO: 98352

SEQ ID NO: 248155 - DNA, 351 bp, Klebsiella pneumoniae
atgctccaggctggtaccctcatcaatgagggtaccaaacaagcatggactggcatccctgatatcgataacgccatcaacatgctcgaccgcatcgatacactggaaagttgcgatgatgaccgtattgaggctgttaagaccgttttgcgcggactggctggcaactctccggcaattccgaatggttacgtgatggtgccgaaggagccgacagaagcaatgatgctgcataattcaggatgccagcaccacgcttgggatgatcctgattgtgcaatgcgccagacgcgcaggttaatttggtcacatatgcttgcagccgccccgcaggaggtgaaccatggctga

SEQ ID NO: 248156 - DNA, 1518 bp, Klebsiella pneumoniae
atgacccgtaccgtcgtggattttgccgcgtctggtattaacgataatgaaacctggctaggcccctttctggcctgcccgcaaaatgaagttgtggacgccttcgaggtcaactttgctttcccaaacggaatttgtgggttccagaacaacgggaataagcgggtccgccatgtcgagtatgaaatccagtatcgcgtttatggttccggatcagggtggacgagtaagccaggggtttacgcgcttaaaaacattaatggcctcggttttacagagcgttttgatctgtcctctcccgggctggtggaggttcgatgccgccgccgtaacgagcaggggagcaacaacgcgagagacagcatgttctggcaggcgctcagaggtcgtttgctttcccgtccgacctcctacgctgggatatcaacaatagggatcacggttgaaaccggcggccagctggcggcgcagtcagacaagcgtgtgagtgttgtcgccacgcggaattatgatggcggtggtgacaggacaatcagcggtgcgttcctgcatcttgcccgcagtctgggatatcgcgacgaccagatcgacattgcggcgctcagtacgctggaggcgacctactggacgccaaggggcgaatattttgatcaccaggcaagcagtgacagcacgtcagcaaaggatattttcgacaaaattgcagaggctggcatggggtattttctgctgtctgacgggttgctttctgtcgggagagagggcgtcaaaagctggaccggaatcattactccccaggataccgtcgaggaaatgcagacgtcattcagggtcccgtcggaggatgattttgatggcgtggatgtaaaatatatcaaccctgtgacctgggcggaggaaaccgtacagtgccggacgccggaaaatccttttccgcgcaaaacggaggcatacaccattgatgttgccatgactgcagatcgcgcctggcgtatcgggatgcgtcggttaatgaaatatctccaccaacgccgaacgtatacggctacgacttcaatgctgggatggtgtcatgacttcggtgatcacatcattttgtccgacgacatcccaaccgggaaaacccaaagttgcctgattgacgcgatgatttacgacttccaggaaatcacgctgcacgtcacggagccactggactggagctacgcgaatcctcgctgctggatacagtttcagaacggtcgaccatcatcgcgaatgctcatgccgcaacggatagatgatttcacgctgacggtgccgtacaacgacgacctgcatcccgacgactggattatggacgacccagatattgacctgccgaagttattgttctgcgacagtgaaaagggtgcgcggcatgggatagtccaggaggttgctccatcgggtgacagcaactgtcagattactgcacctgaatataaagaaattttctaccagtacgacgacgccacataccccggcgacgtcgcgtaa

SEQ ID NO: 248157 - DNA, 450 bp, Klebsiella pneumoniae
atgaccccggcggcactcggcaatgctggcggcaatatcctgttctctctgctgaataacacggcactgaaatacgttggtttcggtctgggcgcggctgacagctccaatgcgttccagtccctggctgcgcataacattaacgccggtagcacgctggcgggcattccgttcaccggaaaaatgttttcacagtatggcgaatatgcactgatgatcaccctgaacaacggcgttctcaaggtctattccggtatgactgataacccggaaactctgctgaccggatgtccggcatttgattacgtcatgctgggcagaaacagctcggtttctggttctacagtgtcaaactctggattctggggaggctggctgcagaaagccgtactgttcgattcggcgctcagtgacgcggatatgattgcgcagtttgacctgctcgcataa

SEQ ID NO: 248158 - DNA, 450 bp, Klebsiella pneumoniae
atgaccccggcggcactcggcaatgctggcggcaatatcctgttctctctgctgaataacacggcgctgaaatacgttggtttcggtctgggcgcggctgacagctccaatgcgttccagtccctggctgcgcataacattaacgccggtagcacgctggcgggcattccgtttacaggaaaaatgttttcacagtatggcgaatatgcactgatgatcaccctgaacaacggcgttctcaaggtctattccggtatgactgataacccggaaactctgctgaccggatgtccggcatttgattacgtcatgctgggcagaaacagctcggtttctggttctacagtgtcaaactctggcttctggggcggctggttgcagaaagccgtactgttcgattcggcgctgagtgacgctgatatgattgcgcagtttgatttgctggcttaa

SEQ ID NO: 248159 - DNA, 1065 bp, Klebsiella pneumoniae
atggaaaaacagatgaaactatcacccaaagaaataaaagaatgccaaaagctaatatctgaacttgaaaactccggatgggaaattgtaggcgcttattgggtcaaatatgcacaggcaaacgtgccgccagaaaagcaaggcaaactgaatattactgctgtcgggttcagtacgagaatgctcgatgcttacagattatcactagcgaatgccattagaaaagcagggttaaagttaatcagtgcttatgatataagattatctggtgatgatgcatttcatagcggcatatttcatctggaagaaaagaaagagcttacccttctcaaaaatgtctatttcacatcaacattccttagtgaactgtacatcttgaagtgtactgcatcagaatcaacatacaaacaccctcctagagaaaaaataacactcttcaaatattttgaatctcagaaattcaaagaggactttttgagcgggaatatttggctaggtacattgcgaggttatggcgtgatagaaaatgaaagtcagggggataagcaagaaggcgtaacgcgttataaaaccgcagagtctttcgacaaggatggttggcttgacttttcgaaaaaaaacccattcatgggtggaatggttaaattcaatgggccatttgatggaactatatacattgaagatccaacggttcatataccaaatgcatataccctttgttttagcaaggtacgaaacgatgaattattcaaaaaagatttcggtgagttttgcgtaaaaattcacgatgtggagaaattattcgccatgataaccatctcactttataatatagacccaagtattgtaaaatatcaaatgggtcatctcagtgtcgattacagcaaagaaactttaacttccttagattcagagcatttttctgcatttcacaagccgagaagctatgaatggcagacagagtatagatttgtgtggaatactgaactcagcgatcaaattaagccattccttcttaactcatcaaaactgctttcgcctgaaataattgaggacctcgcttag

SEQ ID NO: 248160 - DNA, 432 bp, Klebsiella pneumoniae; identical to SEQ ID NO: 177727

SEQ ID NO: 248161 - DNA, 162 bp, Klebsiella pneumoniae
atgttcctccagagattttccaccaaaccccttcagataataacttccatcctcatcagtaaattcaagcgcccggttctgtgcatccgtcaggcggcgaatctgtggcgcaccgtcacgctggtagttctccctgatcccctttatcgactcctgaactga

SEQ ID NO: 248162 - DNA, 324 bp, Klebsiella pneumoniae
gtgttgttcagaaccgtcgatctcgacatcaatcaggttaaagttttcgaggtagatttcctgcggcgaacggtaataaaacgcggcatttgccagcatcggcatgaataccgcgcctggaacgcagcggatcgtcacgttaggtttcgcagtgatataggtatgcaggcgatacacgccagggcgaaaaacgatttcgccaccatatggcaacttgcttacctggttgactgcggcctgcagctgcagggaaatggattcacgaccattccagtcaatatcaaagttcagccaggcatcaaaaatcgctttcgccttatatag

SEQ ID NO: 248163 - DNA, 255 bp, Klebsiella pneumoniae
atggagcccggtcaccccgttacgctcagcctgacagttcagcatcagcccgttcttacccgggcggggagcgataccgttgttagccagcgtccctgcgtcaatgctgattccggttttgaggttgtcattgaactggccgttgaccaccaccagtccggatgcgccacagtcgccaaatccatgcccgtttccggtacacacggcatcggatacgataatctgccgggaaacgtaaggctgaccgggccctga

SEQ ID NO: 248164 - DNA, 162 bp, Klebsiella pneumoniae; identical to SEQ ID NO: 248161

SEQ ID NO: 248165 - DNA, 762 bp, Klebsiella pneumoniae
gtggcccggtcgatcaccaggaactgcaaaaacttcgggatgttcttcgagcagcaaagactgtcagggccgggccagccttacgttgcaaggcagatcatagtctctgatgtcgtcagcacgggtaacggccacggcttcggggattgcggcgcctctggtctggtggtggtcaacggccagttcaatgacaacctcaaaaccggtatcagcattgatgcaggaacgctggctaacaacggtatcgctccccgcccgggtaagaacgggctgatgctgaactgtcaggcagagcgtaacggggtgaccgggctccattatgactcgaccaaaatacaggccgatggcggctattcattctccgacatgcacatcaacgataacgcccaggatgcgattttaatcgaggctggcgctaacaccctggcggatgttcgcttcgacaatatggacatcaaaaataacggtcgttatccggtgaatgttgccagcggcacctttaccgacctcgacttcacgaatcttcgcatgctgcgaaatggcggcgataccgcgtttaagctggacggcaatatcacgcggggctcgattcatggctgtaagctgcgttcgcagaatggcgctgcagcgattaccggcgcagggactatcagccattttgacatcgccgaaaaccagtacaccgataccaacagcaaccccatcaatctcaccggcacactgactaatgtcacttacggccgcaacccaggactggagtaa

SEQ ID NO: 248166 - DNA, 270 bp, Klebsiella pneumoniae
gtgataggtattcttctcgatctgcatcagactgacctgcatggtccgcccggttccgacgtaggcgacatccggctctgccagcggatcgttaatcaggctgtatttaaccgagccgacagtattcccgcttcctttcacacacaacacacaccgggcgctctcattgaatccctgaaagatgttggctctgacggcaagacggcccattttggtgaccttctgattgcgtacgtcaaaattagcgaacgcctgagccccggcgcctaa

SEQ ID NO: 248167 - DNA, 255 bp, Klebsiella pneumoniae
atggagcccggtcaccccgttacgctccgcctgacagttcagcatcagcccgttcttgcccggtcggggagcgataccgttgttagccagcgttcctgcatcaatgctgattccggttttgaggttgtcattgaactggccgttgaccaccaccagaccagaggcgccgcaatccccgaagccgtggccgttacccgtgctgacgacatcagagactatgatctgccttgcaacgtaaggctggcccggccctga

SEQ ID NO: 248168 - DNA, 267 bp, Klebsiella pneumoniae
atgttttcacagtatggcgaatatgcactgatgatcaccctgaacaacggcgttctcaaggtctattccggtatgactgataacccggaaactctgctgaccggatgtccggcatttgattacgtcatgctgggcagaaacagctcggtttctggttctacagtgtcaaactctggcttctggggcggctggttgcagaaagccgtactgttcgattcggcgctgagtgacgctgatatgattgcgcagtttgatttgctggcttaa

SEQ ID NO: 248169 - DNA, 582 bp, Klebsiella pneumoniae
gtgtttcaggatccggatcagcaaatcttctataccgatatcgacagcgatatcgcttttagtctgcgtaacctcggggtggcggaagaggagatcgcccgccgggtggatgaggcgttgaccctcgtcgatgcccaggggtttcgccagcagccgatccagtgcctcagccatgggcagaaaaaacgggtggcaatcgccggggcgctggtgctgcaggcgcgctacctgctgcttgacgagcccaccgcgggcctcgatccacgcgggcgggcgcagatgatcgccatcatccgccgcattgtcgggcaggggcggcgcgtggtgatctccagccacgatatcgatctgatctatgaggtgagcgacgccgtttacgtgctgcgtcacggcgaagtgctggccgcgggggatcccggcgaggtatttgcctgcgcggagacgatggaccgggcaggattgacccagccgtggctggtgaaacttcatagcgaactggggctgccgctgtgtaaaaccgaggcggagttttttcagcggatgcacaacaacgcgataggcgcgataaaggaggcgtcatga

SEQ ID NO: 248170 - DNA, 339 bp, Klebsiella pneumoniae; identical to SEQ ID NO: 207937

SEQ ID NO: 248171 - DNA, 840 bp, Klebsiella pneumoniae; identical to SEQ ID NO: 6027

SEQ ID NO: 248172 - DNA, 588 bp, Klebsiella pneumoniae; identical to SEQ ID NO: 243449

SEQ ID NO: 248173 - DNA, 564 bp, Klebsiella pneumoniae; identical to SEQ ID NO: 243305

SEQ ID NO: 248174 - DNA, 381 bp, Klebsiella pneumoniae; identical to SEQ ID NO: 118647

SEQ ID NO: 248175 - DNA, 267 bp, Klebsiella pneumoniae
atgttttcacagtatggcgaatatgcactgatgatcaccctgaacaacggcgttctcaaggtctattccggtatgactgataacccggaaactctgctgaccggatgtccggcatttgattacgtcatgctgggcagaaacagctcggtttctggttctacagtgtcaaactctggattctggggaggctggctgcagaaagccgtactgttcgattcggcgctcagtgacgcggatatgattgcgcagtttgacctgctcgcataa

SEQ ID NO: 248176 - DNA, 432 bp, Klebsiella pneumoniae
atggtgattgccgagatcgtcccggcgtttaaagggattgcggacaaactggttaaagacgcgaagccggcgctggactgtccgacggtgtttcccttcgctccgaatgccgtcatcgtcggcttcctcgcaagctttgtcgcagggctggtcagtatgttcctctgcccgctgttcggcttgagcgtcatcgtcccgggcctggttccccactttttctgcggggccacggcgggggtttacggcaacattaccggcggacgtcgcggggcggtggtaggggcttttgctcacggtctgctcatttcgttcctgcctgccattctcttgcccatgatgggggatatgggactgggctccacaacctttggagacgcagactttggcgttgtcggcatcgtgctgggtcatatcatcgcaatgtttaactaa

SEQ ID NO: 248177 - DNA, 1107 bp, Klebsiella pneumoniae; identical to SEQ ID NO: 243281

SEQ ID NO: 248178 - DNA, 525 bp, Klebsiella pneumoniae
atgagtaacaataaagtcatgcgtaacgctggcatgttgtatgtcagaatgttggtaatgctttttgtaagtttatacacttcaagagttgtactcaacactcttggtgtaagtgattttggcatttataatgttgttggtggcattgttttaatgtttgcatttatcagcaatactatggcaggggcttctcaacgttttttttcttatgagattggtcgcaataattttaaaagattaaaacagcttttttcagtaacagtaacaatatatgttttcttttgtatattaataacccttttagcagagacagtaggcttatggttcatcaggtctaaaatgaatatccctatagaaagggttgatgcagcattatttgtttatcatgcatcaataatttcattcatattcactataattagaataccatataactcactaattattgctcatgagaaaatgagtttttttgcaactactagcataatagaagcatttttaaagcttggtggtgtttttatttga

SEQ ID NO: 248179 - DNA, 396 bp, Klebsiella pneumoniae
atgcacatcaacgataacgcccaggatgcgattttaatcgaggctggcgctaacaccctggcggatgttcgcttcgacaatatggacatcaaaaataacggtcgttatccggtgaatgttgccagcggcacctttaccgacctcgacttcacgaatcttcgcatgctgcgaaatggcggcgataccgcgtttaagctggacggcaatatcacgcggggctcgattcatggctgtaagctgcgttcgcagaatggcgctgcagcgattaccggcgcagggactatcagccatttcgacatcgccgaaaaccagtacaccgataccaacagcaaccccatcaatctcaccggcacactgactaacgtcacctacggccgcaacccaggactggagtaa

SEQ ID NO: 248180 - DNA, 201 bp, Klebsiella pneumoniae
atgttaacagtaaaggtgatgtcacctggaggtggcgaaaaaatccatttcggactgagtgttggtttcaaccccaaccagcagagcatcgcgctatcgggaatggacaaaaatgtattcctgaaacccggtgaggttgcttacgtgatgaactcaaatggtaagaccatttcccgttacgaacacagggtgcagcaatag

SEQ ID NO: 248181 - DNA, 870 bp, Klebsiella pneumoniae
atgaaatgggggcataacgaattagcgcacgatctggctgagcacctacgccgaaatactgctcgcatctgctgggaagatatgcagcttggcccctcaggtacatgccgacctgacgtttatgcaatggcccatagctatagcaaattctgccccatcgtttatgaggtgaaagtaagtatgagcgactttcgcgcagacgtgaccgccgggaaatacacaaaatattttaaatatgctggcggtgttgtgttcgctgttcctgaaggtctgcttaaaaaatccgatatccctgatggctgtggcctgatggtgcgaaaagaatcaggctggcacactctgaaaggcccgacaatgcgccagatcgacaacttgccgcgtgacgcctggattaaattgctgatggacggcatgactagggaagttgagcgcacgcagattaaaagccgctcatacggttcctggtttgttgaaagaaacctgtcgaaaaaacatggtgaagatgtttcccgcctggtcgcgcaagcatgtatggctaaagacaggctggaaagcgaaatcaaatttgcagaggagcgcgccaaaactgttcgccaggaaagtatcgatgaacagaagcgccgcgaagataatcgccgccgggaagaggaacgactcaccgatgcgcagcgggatttagccgtgctgctgggcgttgatcctgattctccacggtatctgctggctagagcccttgagagcgccgttacacgactgactgaaaacgaagaaatcagccgtatgcgccgtatttttggcagcatgcagcgcgaacttaatcgcggacttgagccgcttccaggtgagcgcacagaaggagatgcagcatga

SEQ ID NO: 248182 - DNA, 885 bp, Klebsiella pneumoniae
atgaaactaaattttacacgatatgatatcgtaattgtaaactggttagaatcgggaataattaagaaaaatggtaaattgtctttttctggtgtgattaaggtttttattaaattagtattattgaaggcaaaatttaaaaaaataatatttgtccagcacaataaatatccacacaatacaaatattaggtttatcaaagtagctacaagaatcgttaatttgatagcttcattctctgatcatgtgataatccattctcctgttgtttgtggtaataaatatcattatattccccatcctttatatatttatcctattaagtctactgaggatagtgcctgttctttttctaatgataattattatatttttgggcgagttgtaaaatataaaaagtatgaagatgttattagtgcattccccgccaataaaaatctaataattatgggaacatgtgaagatgatgaatataaaataatgatacaagaactatgtaaaaatagaaaaaatgttacttttatgcctgaatatatttcagacgaaaaagcaaaggaattactttctacaggtgctgctttaatcattagccattctgatgaggatatgattgtatccggaagtttcttttacggtttgacaattggtattaagatattagcaataaatacaccatttttaggttgggcaagttctgttttacaaagagacgtaatagagacctttgatgatttagattctatgatgcatcatattaaaactgctcaaaaaggacaatcatcacgttattcatttcaatcaatagaggatgttaataaatattttggtgatataagtattgaatctaagtttatgagtttattagatattaatgagaagaagtaa

SEQ ID NO: 248183 - DNA, 207 bp, Klebsiella pneumoniae; identical to SEQ ID NO: 223153

SEQ ID NO: 248184 - DNA, 204 bp, Klebsiella pneumoniae
atgctgggtatcggccgcttcggcggcatcctcggcgcgttcagcggcgccttcctgatgcaggctcagctctcctttgagaccattttcaccctgctggccatcccggcgttcctgtcagccattgcgctgctgatcaagtaccgggtcagtaaatccgtgccggcgacgacagatgaggcgagaagcctgcagaaagcctaa

SEQ ID NO: 248185 - DNA, 552 bp, Klebsiella pneumoniae
atgaaagatatgaaagctgttgtggtttttaccgggaaggatttgaacataatgagaaccgagggggggtcaggctactggcatgccagaacagacaggctcaacgatgccgattacctcatagcagtaagaaacagaagggaaacgtgggcagtaaaagacctggaacacggcacagcattcctgatcgccaaaattaccgggtgttttaaaagccctgattacgacgacaggaacgtcataacctttgatgaatacgcagaaattcacactccaaaagcatggaaaatgctaaccgatggtcagcgctatccggttgcttacctgagcgcacaggaagcttttttacgtattggggtaacaccggaacaactggaatggaagaaattccatccttcatccccatcggttcctaatacagtgattcctggtctggctgaagagaaaacagaaaaactctcccttaacgaggcaattgaaagagccaaaaaggatattagcaacgcaacagggattgatagctcagccataacaataagcatcaagatctga

SEQ ID NO: 248186 - DNA, 360 bp, Klebsiella pneumoniae
atgcagggtgtgcactacacggacactgatacttacggaaccgcgcgcgcaactctgagttcgttcaataaaacaaagccgatgctgatctgccttacccttgacggtcagaccaccaggctgaccgacatgaccaacaatgtttcagcatctctcaccctggcgtcaggtcgcgagcgagcgccgactaccattcgcatcggcaagggaggcgttacgtactggggctcaacctcagcaactagtcgcatcggcgcctacatggttttcgatcgcgtattatctgatgctgagaaaggttctgttcgtgactatttgctccgttgcatacaggcaaaatatccgtcattgattttctga

SEQ ID NO: 248187 - DNA, 876 bp, Klebsiella pneumoniae
atggcccagggggagaggctgtttgtcaaagttacccgcgaactcctgcctcaggtaaaagataaatatccttttctctatcttgagcgcgggcggctggaaattgatgacagcagtgtgaaatgggtggatgcggatggcaacgtggtgcctctcccagtggcgaccatcaacacgctgctgcttggccccgggacaactgtgactcatgaggcgatcaaaaccgcaactgcggctaactgtgcggtgtgctgggtgggcgaggatagcctgctgttttatgccgccggttttttgcctactgcagatacccgcaatcttaaagcgcagatggcgctggcctgcgatgcatcgtctgccctcaaggttgcccgggcgatgtttgctaaacgctttccggatgccgatctggagggtaaaagtttaaacagcatgatgggcatggaggggagtcgggttcgcgcgttgtatcagcagaaagcgcaggagtatggcgtcggctggaaagggcgtcagtttacaccaggcaagtttgaactgagtgacctgacaaaccaggtactgacctccaccaacgccgccctgtatggcattttatgctcggttgtgcatgcgatgggctactcgccgcatatcggctttatccattcaggtagccctttaccgtttgtctatgatctggccgacctttacaaagaacggctctgtattgatttggcattttcactctcgagggaaatggcgggccgctacgataaacacaaagtctctgaggcattcagaaagcgagtgatagccctggatttgctcaacctgattgcggccgatatcaatgagctgatgggagggaaaggtgctcgtcgtactggcaaatga

SEQ ID NO: 248188 - DNA, 1278 bp, Klebsiella pneumoniae
atgcaaatcctcatgggacttatcggcatggtggcgctattggccattgctgtgctgctctccaataaccgaaaagccattaacctgcgcaccgtgctcggcgcctggataatccaggtgggtatcggcgcgttaatattgtatgtaccggccgggcgcgcggcgctattagcgatgtcgaatggcgtcgccagcgttattgcctacggcaatgaagggattagtttcatcttcggcgggctggtctccgataaaatgttcgaggtgtttggcggcggcggcttcgtctttgccctgcgcgtgctgccggtgatcgtcttcttctcgtcgctgattgccgtgctttactacctgggcattatgcagctggtcattcgcattctcggcggcgcgctgcgggcagtgctgaagacctcacgtaccgaatcgctgtcggccacggcgaacatctttgttggccagaccgaagcgccgctggtggtgcgtccttatatcgccaccatgactcgctcggagctgtttgcggtcatgtgcggcggcctggcctcggtggcgggctcggtactggcgggctatgcgcagatgggcgttccgctggagtaccttattgccgcgtcgtttatggcggcgccgggaggcctgctgtttgccaaaattatcgtaccggaaacggaaaaaccggacgataacccggctcatgacagccaaagcgctgacgcggataaaccggccaacgtgctggatgccgccgcctccggcgccgcgtctggtatgcaactggcgctcaacgtcggcgcgatgctgctggcgtttattgcgctgatcgccctgctgaacggcatactctccggcgtcggcggctggtttaaccatcctgagctgtcgctgcagatgatcctcggctggatcttctcacccctggcgtgggtgattggcgtgccgtggcacgaagcgacggtggcggggtcgtttatcggccagaagctgatcattaacgagttcgtggcctacatgaactttggcgaatatttaaaggcggatgccgaagtggcggcggccgggctgcaggtcatttcagatcacaccaaagccattatctctttcgcgctgtgcggctttgccaacctgtcatcgatcgccattctgattggcggactcgggggaatggcgcccaaccggcggcaggatatcgctcagcttgggctacgtgcggtagcggcggggacgctgtccaacctgatgagcgccaccatcgccggggtttttctcgccctgtaa

SEQ ID NO: 248189 - DNA, 714 bp, Klebsiella pneumoniae
atgaactatgccgaagcgcagttcgcgttggggaaagagctgtggctatgcgcttgccgcggtgacgattactccgccagctatttttcgccgacgccgcaaacgtggctggatctgatccgcgcctccagcgccatccccggcttttatcgcagcggcgtgttgctcgacggcgttagctacctggacggcggcgtcagcgatgcgatcccggtgcaggaggcggcccgccgcggcgcccagaccatcgtggtgatccgtaccgtcccttcgcagatgttttataccccgcagtggttcaagcggatggagcgctggctgggagagagtagtctgcaaccgctggtcaatttggtgcatcatcacgaaactacctaccgcgccatccagcagttcatcgagaaaccgccgggtaagttgcggatcttcgaaatctatccgcagcggccgctgcgcagcatggcgcttggcagccgactaccggcgctgctggaggactacaaaaccgggcgccagtgcggccgttatttcctggcaacggtgggtaaactactggccgaccagccgccgctgctgcgccacgcgccgcgtattgcccggcccgcgccggtggtggtgccgccggtgccggtggccaatgaagcgccccaggcgaccatcattcctgcgccccaggcgaatgaccccagttttgatcatgaggatctggcgtga

SEQ ID NO: 248190 - DNA, 531 bp, Klebsiella pneumoniae
atggcacgagaaagaaaactcataaacatcctttttatactttttattttgtgcgtattttttataataggaagctatgctattaattttggaaatagtccaatatccaaagacccatctaactggggagttctaggggactattttggcggaattcttaatccattaatatcaacaatcacccttattttcttgataaaaacttatcttactcaaaaggaagagatccataagagtgacatagaagcagattatcagagaaaaatttcactcaaaatcgcaagccttcaactgctaaacacacaaatctcagcatcccaagatttaatttctttatataaaagcgagatggaaggcgttacaatttcaatgaatgctcagggcaatggccgttcttacacaggaatagatggaaagttatatttttctgacaatgaacaaataaaataccgattaaaaatggccgataaaatacaaaccgaactaaaaaagatagatgaatatttaaaagaaataacaaaaatatcttaa

SEQ ID NO: 248191 - DNA, 1917 bp, Klebsiella pneumoniae
atgcaactaaaattaagtagcaaatcagattataaaggtttttttctaaaggaatcagttctgttagaaaataaaattattgttttaactggcaagaatggttctggtaaaaccaggcttttagaaagtttacaagatacgaacaccgaagcctatttaaacgacaaaaccatcccagggaatagaatacgtttcataccacaactggaactaacccctaactttggcggatcgtatgatcacgcccaccatcaggaaatgctacgccaaacactcggactttatgatgaaataaaatccgaactaagcaacccatcatttctagacaacctccaatccacacgatatgacaatccaggaataggaagacatagattatataacttatgccagagaatatcaaaaagcactggaaaaaaaccttctgaattaactcatggcgatatcacttttcattattcggaaacaccaaacaatatattaggcacattgaatatatctgaaataataaatcagtacatcaaacgccttcacgacaaccaacgcaatgaatggatgaaaacatctaaaaaacaagatgttgagttttacactgaagatcaattcgctaaaaaatttggaaaaaaaccttgggaggaattaaataaagttttacatgatgcttttgatggtaaattctatctaaaagaacctgatgaagaatcccttacatataacttccaagcacaacttatacaacatgatggcacaccagtactgaatgagcatttgtcatctggagagaaaactttactttggctagcattgacaatattcaatacacaataccacaaagaaaatgatgagatagttccgccagttttaattttattagatgaaccagacgcttttttacatccaaagatggtagtaaaaatgtataacactttagaatcgctaagtgataacttcggttcaactatactacttacaactcactcaccaacttccgttgccttagctcctgatgacagcatctatttagtagaaaacaattcaattaaagaaattgaaaaagacggtgcaatcgctgatttattagatggagttacacaaatatcacttaacccaaaaaaccatcgtcaagtatttgttgaaagcatgtatgatgcaattgtttataattcaatctacacaaaaatagcacctcgctcacatttaattgaccctaaaataacactaagtttcattagttcaggtccaaaaatgcctgaacaacatctgattgacaaagtaaattcaaaacttggtaaatttgatgatggtgtattaaaagattttgttgattcagttaatggggctgggaactgcgttcaagtcatatctcaagttgaagcattacaagaaaatgaaaacatcacagtgaggggaatcatagactgggacctaaaaaacaaatcaactgatttcataaaggttttagcagacggacacgcttactctattgaaaacatcactctcgaccccatatgcttattgttattaatgcatgtagaccaacctgattcaatgacaatcaaaaacatctgtggtgagaatgttcactggcaagaatggttaaagaatgaatctcttttgcaaaaatcaatcgaccaattcattttaaaattattcggaaaagagaatgacaaattagcagagatacattattcatccggaatgaaattgaaaacagattcaaattatttaagaatgagaggccatgacctagaagatatgataaaagcaaaatatcaacctctgaaatcatttgcaagaaaaggtggagagggcgaactaaaatgcgcgattgtcaacaaagccatgataaatcttacaaactgtgagtttatacctttttactttgaaaaggtattctcagaaattcaaaaacagtaa

SEQ ID NO: 248192 - DNA, 2940 bp, Klebsiella pneumoniae
atggcatttccaaatgttacgcagttgctggcttttgtcccacagaccgctaacgtgctggcacaggatacgcaaacaggaaccttctattactggaacggcactgcgtggagccagaatgcgtaccaggttaacaaagcgatcatcgccgccgcgcgcctgaccattgcgaagccgggaaaaaacaagttcaactaccggactgtcacatcaggatattatctgttcgaaggcacaggtgttccggcagcaaatgcggactatgcattttctgattacatcgccgtcagggctggcctcgtgcattcgctttcaccgggtgcgcgggtggtgacgttttacgatacgaatttcctgtacctgagcgacatcagttcagtgacgacattcaccgtgccttcaggcgctgcgtttgcgcgcctgtctgtctccgtgtccgcattagagacattccagatggagaccggtgttgcacctacgccatttgaagcgtaccgactgaaactgcctgccgcggccgagaatgtggcactggatgtgctcgacgcaacaggatttaagccgggtaaaaaccttttcgatccgcttgatgtcatcagtcaacgccacctgtcttcggtcgggacgattctttatgataccgatctcaccatgtcggtatctggctacatccaggttactccgggtgtgcaggtctgctgtaaccagcagtggaaagccgctgcctggtacgatgcgaacggcgcattcatcagccgacagtacgatgccagttttgcgacgaaggctatcgccgcactggtgattccggcaacagcggcatacctgcgcatcgaggtactgacgactaaccttgctgtgacgcaggttgaactgggcgcgctcgcgacggcattcgagccattccgcctggtatccccaacgtcattaaacgcacacccgctgcggttcggcgaagagcctgcgacactggccagcatggggttgttcgttcccggcgccaacctgttcaacgcgaaaactgcgaagtttggttatatcaatgagttcggcgtggtattcccggtagcctccggttctaacaactattactactctgactatattccggtaacggcgggagacgtgctccgggccagcgcgtcactgcgctttgtgaacttcctgtcggcgtcgaaggcactggtaagctcgatcaccagcacaacgcaattcacggtacctgctggcgttgccttcatgcgggtctcgaccctacaggccaacgtggcatcgctgcagatcgttaaaggtgcatatctcccgacccgtgaggactacatggccgtgctggcttctgctttggctgatggaacgcctgtccggatacctggcgggctcattgataccagcagcctggcggttgactttgtgaaacaaggtctgctggttgtaggtaaaaaccgatataaccgcctcaccattcaggcaggttacatcaatgaaaccggagctatcgtcgccgggggcacgacctgggtgtattcggacttcattccggtcaagccgaataccacttacgtcctgaatcttggggcgcgtttcatgggcttctatgcggcgaataaagcctggatgagaacagaagcgagcgccgggcagacgctgacaacgattactaccgatgctgactgctacttcctgcgggtaactatggccgttggtcgcggccagacgctgcaactggaagagggtacgacctcaacaacgtacgaagaattcgcctattcgtacctgacgcaactggcggacggaacgccggtaaaaggaaccgggatcaacacgtcgacggcgatcccggacgattacggtctggagcgcctgcgcgaaacgcacatgcgcctgatgaagatgaccttcggggaactggtacggttcgtcatcgcgaatatcggcgacagttatacccggacgactgcgcgatacgcgttgaaagtggctcagaagttgtggaataagtttcacggaacggccatcacgtcgaacgtgccgccgatcggctacgggtaccggtctttcggtttcgatgccaatggcgataacacggatgtgatcggcgttaacgttaatcagtccagcggtgtgacctgcgcgtacaacatcggtcatggccctgatatctcttctgtcacgatgacggcagccggagacacgatctcttacgtgcaaaacctgactctgggttttgattcattcctgtacgtggaaggcggagcgggcgttatccagtaccaggccgccggtatgtcagcaccaacggttattgacctgaccacctatgcagcaggcatgcagataattccaatgaccctgccatcaacggggatcgcgacgaccgttaccattacggccaacacagcaccggcggttctttacggcgtgaagatcctcaaccagactgccgcggggatcctggtgcacaaacttggggggagtggctcgagtacggcgcactgggtgaacggtatggacagccgctggctgaccgcattccaggacttgggggctgacctggtgacgattatgcttgggacaaacgaccagggggcatcgatgccggcggccacttaccggaataacctgctgaccatgatcgaccggatacgctcggtgcgacccgcggcggacattcttctggtctgcccggcagagaacaaccggcccggtggcaacaccattcctatggccacttatgcggaggtgatgtacaagattgcacgcgatgatcgggatgttgcattcctcaacctgcaggcgtcattcggagcgaaagcgtcggactacgctttaagcgggatccgtccatggatggtgtcggatggactgcatccggacccggcaacgggcgggtatgcaattgcttctgccattctgcatgcattgagtgctcttaatttgtga

SEQ ID NO: 248193 - DNA, 237 bp, Klebsiella pneumoniae
atgtacagcagactgttagccatatgcctgatgacgatgttgatcgggagctgcgcgaaagctttacccgcaaaacctgaagtcatcgacaccgcctgcgactgggtgcggatcatctacctgaccgaccacgatatcgacgtgctggacaagcagaccaagcgcgacattctggcgcacaacaaatcagtgctggtgaactgcccgcaacaaaccgacaaggctactaatagctaa

SEQ ID NO: 248194 - DNA, 645 bp, Klebsiella pneumoniae
atgaaccaatcacaatttcaaaaggcggctggtataagcgccgagttagctgcgcgctggtatccgcatattacagccgcgatgaaagaatccggtattaccactcccctggctcaggcgatgtttattgctcagtgcgggcatgaaagcaccgggttcagccgtctggtcgagagttttaactacagcattgcaggtctggctaattttgttaaagccaaacgccttacgcaggatcaggccaattcacttgggcgccggcagagcgaaccttcactcccattacagcgtcagcgtgcaattgccaatctggtgtacagcaagcggatgggtaacaacgccgccggtgatggttggctctatcgtggtcgcggaattatccaggtcacggggctgaacaattaccgaacctgcggtgacgccttaacggtcgatttagttgctcagccagaactactggctcaggacaattatgccgctcgcagcgcagcatggttctttgtgacgaatggttgcctcaaatggggcggagaccttgagcgagtgacccagattatcaacggtgggcagaatggtattgatgaccgtcgcgctcgcttcctcaaagctaaatcagttctggtgtggggttctgatggggattga

SEQ ID NO: 248195 - DNA, 801 bp, Klebsiella pneumoniae
atggggttaaaaaccatggctaaaaactcgatcgacgtgtacggcgccagcggaaagacgaacgttttaacgtttgaacctgaacacctgcatctgattaccgacaaaactcacccgctctacgatgagcgggtccatctgccgatcgacgaagggatggtactgaacattgcggagctcggtgtactggaacctatcatcgtctggaaagaccccgaattggggctcacctgcgtagttgttggccgtcagcgcgttaaacataccctggaggcaaataaactccgtctgaaagaaggcaaagacccactgcttgttcctggggtagttaagcgcggatcagcaaatcagatggctaaatacatggtcagcgaaaacgaaattcgccgacctgatacaccgcttggccgggctaaaaaaatgtcagacgcactcgaccgcgggctcgatgaggacgacattgcagtgttgtttggctgcagcgttcagaccgttcgagcaacgctctccctcctcgaggccacccaggccgtccgggaagctgtagaggctggcacaattaccgttacccaggcgcgtcagttggcatcgcttaaacccgaagagcaacgggagaaggtcaagcagatcgagacagcgaccgccggcatcactggccatgaaaaagcccggcggcagcgccaggttcttggtgaagcaaagccgcgtatcaaatcacgcaaggaaattacaaaagccctcgaagatgccagcggcgaatatgccgaggctctgcgctgggtgcttggggaggcggtatga

SEQ ID NO: 248196 - DNA, 1101 bp, Klebsiella pneumoniae; identical to SEQ ID NO: 192429

SEQ ID NO: 248197 - DNA, 630 bp, Klebsiella pneumoniae
gtgattaatctaattaaagcacgcctgattcaggctgatctgaaagaaattgaccgagagtttgaagaaaaaggctttggcagcctttttacgatggtattgtttaaacaggcgctaatatccattgccaatcttgtcgattttgaacacacaattagaatggtgtacaaggagcacccgcaactctcgcagcattaccgtcagacctcagccgaatttgatttcgctaaatatcttcgcaacaaatttgttgggcatattaagccggaactcatagagaaggccctagagtggcgcccagagatacgtttctttctgaataaaacatcagatagccatgtaatgggtttttataatatgtggattcttgaaacagctattaatagttacgttgattcggatgggaaacataaaatatttgatagtgaaactgcactggattacccaccagacaatacacgctttcttatttatatgacgaaaataatcaaaagtggaatttcatttcttgaagaatttatattagcaatggatattgaatatgaaaatttatgcaatccggatttagaggagcaactaaggctcggcggtattgccgggaagacagatttcgcattcatcaaaaaataa

SEQ ID NO: 248198 - DNA, 891 bp, Klebsiella pneumoniae
atgtcaggaattgaagtggaaatcgcaccacctgccaattggcaggactttgaacggctcactcttgattatgctaaaaagcaatggaaagacgaatatgcacaaagacatgggcgtcaaggccaagcgcagtctggagttgatatctatggcacccatagcatctcacatgaattaataggcattcagtgtaagaaaaaaaaacacttcgaagtttcgtctaaacaactaaccattgcagaaattgatgtagaaatagacgcagcaaaaacattctctccacgattagatcatttcataatagcgacaaccggacctagggatgtaaatttacaggaacatattcgtatacaaaaccagtcaagtattccttttaaggtttcactattattttgggaggactaccaagaatttcttaatgatcatgtaggattaatgtataaatattataaggaggttttagagtaccgcagcaaatacaatgaactagatcattatctgcttctactcagcgaagctttcgatagacctgcaataaaaacctcttttgattgtgaaaaccaagccctcgattttatcaaagctatggctgacacacagaatgcaatagctaccggtcgcttagtggaccgacatgaacgtattatcaatgaatgtagagtccctagacctaaaatcaaaaacctaacaaaagcaggccagtatctgcaaaaggctcgagaaattgcaacaaaaggtatggctgaaggggtaatcgttcaacatcaatatgtaatagaaatcaagtcgcgtgaagtggttgacgaacttaataaactaaggcggaaggctgtcgaactccttaataatgagctaattaaacgtgacttggaaatagtacatttttgttaa

SEQ ID NO: 248199 - DNA, 954 bp, Klebsiella pneumoniae
atgagaaaggcgttagtcattggtattgatcattacgacaaaatatcccctttgtatgggtgtgttaatgatgcatacagtgtaaagagtgtactcgaacgacattctgatggctcagttaactttgccgttaagctaatgacggctactggcccgacaaagcctataaacagaaaagaaataaaacaagcagcggagcaattatttgaaggtgatagtgatgttgccttattctacttcgctggtcatggttatatagaaagtgttggtggttttctttgtggtagtgattgtgaaactggtgatgatggtttttcactccatgagttaatacatatagccaataaatccagagcgcgaaacaaaataatcattttggatagttgccactcgggtgttgcaggcagtaaagaaagaagtgatccaactgcagagcttaccgaagggatgacgatccttacggcatcaactgaagagcagtattcgatggaggaaaatgggtctggtattttcactacattgctagttgatgctttaaacggttctgctgcaaatttgattggtgatatcactccaggcagtgtttatgcacacattgatcagtctttgggagcttgggatcaacgacctttattcaaaacaaacgtcaaaagcttcgtttcactaagaagtgtgcaatctccattagatttggccgatttgaggaaattagtagattacttcccacaacccggctttaaatttcaattagacccatcttacgaaccgaaaagtgattgtcctgatccagataaaacggaggtttttgcaattctccagcaatttaatcgcgtcaatctcctcgttcctgaggatgcgcctcatatgtactttgctgcgatggaaaacaagtcctgtaggcttacagtattaggcgagcattaccgacggctcattgaaaaaggattaatttaa

SEQ ID NO: 248200 - DNA, 492 bp, Klebsiella pneumoniae
atgacagtttttatcagttatcgccacactgatcgagcgcaggccatggcgatcaataagaggcttacggaagaaggtatctctacatatcttgatgtgcttgatgttgagtcgcaatccactgatgatataactagtgtaataactcgtcgaattagtgaaagcacgcaccttattgcggtagtttcaagtcaaacggcacagtcctggtgggttccattcgaaataggcgaggccacaatcacttatcgcaggatttgctcgtacagaacgacagttagtgaactgcctgagtatcttagtaaatggccgcagatgacaaaaccttctgagattgaattgttcattcaatcttacaagaatgaaataagcgggaagcgccagattacccttgagtctttcaatggaagcgaggcaatgcgtcgtgtagataaagtaaatgcagacacattccacgccgatcttaagcaaagaattcggagagggtactaa

SEQ ID NO: 248201 - DNA, 609 bp, Klebsiella pneumoniae
atgaataacacgcttcttcctccgtctgccagcgcgtggatgcgtggtgccgaagctgccacggcgaaactgtccgggatcacggtagccattcgcacgctgtggacgccgacggcatgcccggttgatttattgccgtatctggcgtgggcgctgtcggttgacaggtgggataagaactggccggcagagaaaaaaatagcgtcaatccagcaatcctactggcttcatcgcaggaagggcacccgcgcagctgtgcggcgagtgatcgaagatatgggattttccgcgacgtttgcggagtggttcgacgtcggcgacgagccagggactttccggcttgagattgatgttaacgaggttggattaacgccaaagacactggatgaattaaaccgcctgattggtgatgcaaagccagtgagtcggcatctggcgcaaatgacgattagcacgagcgccagaggaaatgcctggattggcgtagcaccatttgacggcaccataaccactgtatacccgccgggatatacacccgatgacagtatttattttgatggcgctgcgcactatagcggcaattattatttttcaggtgagcagaaatga

SEQ ID NO: 248202 - DNA, 156 bp, Klebsiella pneumoniae
atgaatgaagaaaccaattaccgccagttctggcgaaatctcgtgatctgctgcgtgctttgctcgctgctgttttggctaccaatgggatacctcgcctttcatgttggctccgtggtgtgggaggcgctgtggtcgcttattacaacggaataa

SEQ ID NO: 248203 - DNA, 228 bp, Klebsiella pneumoniae
atggttaacgaaattgacgctgtggtcactcgggtgatcgagtgctggccgattaacgacttctggatggtggaagttgaggtgatggccggtggtgaatacctgcgcactgatatcaccgtcagcacgaaacgagaggcctgcgcaattcagccgggcgacaccgtagcgatccctgtcgtgggtctggatggcgattttgccgatgaagatgaattgccgttctga

SEQ ID NO: 248204 - DNA, 207 bp, Klebsiella pneumoniae
atggctatcaaaaaaacacacgtcggcaccgtcataaccaaagacggcccgaagcttaagaagctgcacgcaacggaaaaaatgtgggtggtcgctactaacgagctttatcacaaagagacggggcgccgtcactttgcagaaaacaccaggcgtcggctgcttctcgaatcaattcgcccaattcaggaggctaatcatggttaa

SEQ ID NO: 248205 - DNA, 954 bp, Klebsiella pneumoniae
atgattaagtcacctttgaaatgggcgggtggtaaagcccgcgttatgccccagctgctggagcacttgccgaaagctaattgcctgattgagccattcgttggcagcggtaccgtatttatgaatacggattaccgccgttatgttctctgcgatagcaatcgcgcgctgattaacttctttcttcagttgagggatgacacagagcgcctgatatctgttgccagggatatgttcaagcacggcaacagtaaaagctggtattacggcgagcgtgaccagttcaatactctggcatgggatgactcggaaagggattgttacgagacgttgtgggcggcgtctttcttgtacctgaatcgtcattgctacaacggcctctatcgtacgaataaagagggcggcttcaatgtcccgtttggcagcttcaaggctccctattttccagaaactgaaatgcgcatgttcgccgaaaaggcgcgggacactcacgcaatctttctttgtaatgactttcgcacctctattccatacatcgcgaagaacagtacggattcggtaatttactgcgatccgccgtacatcccgaccagcaaaacagccaatttcaccgcctacggcaagccattcacgttagacgatcaccgcgcgcttgtttcaaccctgcttgatgttaatcgccagcacggtacgcgctcggtgatctccaacagcgatacaccagaaacgagcgagatctattccgctttcaaccttcacgccttcattgtccgccgctctgttagcgccaaaagccgggatatggctggcgaggtaatcggcgttctgcgcgtttgtgatggctgcggccgttctggtggtggtttctgcccggactgcggccaggtgatggggaactccacctacaacgcaatggcggcaacgggcgattttgacgatctggaggctttctga

SEQ ID NO: 248206 - DNA, 195 bp, Klebsiella pneumoniae
atgagccattcaccggaatacatcaaaggagcactggaggcgctgaatgaagtgcaggccgtcgggttatcaatggcgatgatagctggagtggtagtcggtaaggaggccggagataccgtcaataccattatcaaggatgccaccggtcctttgatccaaaaatacaaagaagcaaaggtgaaaaatgattaa

SEQ ID NO: 248207 - DNA, 567 bp, Klebsiella pneumoniae
atgaatcatttaatggtcgatttgataaatatcagcaaaaaacagtcttcacctttgtgcgccattgaagccgtgttttttgagccgtcaacgggccagattggagaaaccttttactctccgatcgatgttcgggcagcaaaaggcttaaagggaaacatcagtatttccgctgcttttgagtggatgaaaaaagactctcactggcgggccgaattgatgagcgccaccgaggttgaagaggatgtgctgtgtgacctcgcagcttttatcgtcaacaatcttgagcaccagttcgggccgttgtttgtttggtttaaagataccccggaaaagctggtttcactgcggtatgccgtcgagcgcaccgaggtttctggagtcttcccagaaggtacaaaattccgctgcattcgctcccttctcgatctcgctgctgctaccggctatgcgccccacgcgcgccgcgctctggtgcgttacaccatgactgatgcgcgatatcaggccgagcaggtttgcgagatctggcggcgcctgacctccccacacattgaatcgctgtga

SEQ ID NO: 248208 - DNA, 147 bp, Klebsiella pneumoniae; identical to SEQ ID NO: 128734

SEQ ID NO: 248209 - DNA, 552 bp, Klebsiella pneumoniae; identical to SEQ ID NO: 128735

SEQ ID NO: 248210 - DNA, 204 bp, Klebsiella pneumoniae; identical to SEQ ID NO: 128736

SEQ ID NO: 248211 - DNA, 726 bp, Klebsiella pneumoniae; identical to SEQ ID NO: 128738

SEQ ID NO: 248212 - DNA, 402 bp, Klebsiella pneumoniae
atgtctactacttatttttttaacaagcaagataatagccagcttgagaagctttccaatgacgatcttgatgaactgaaacgacagatagagcgggagattgaacgtcgtgcaaatgggccaaccggcgttgtgtatgtcgttactgattggggaaaccatcgcgtttttactgattttcgctgtgcggcaatttgcttcgctgatatcgctgaaacagtcctggaggacgcccgaactaaagagggtaaggaattattcgaactaaataagggaaccttgctttacggtatcaggccgatggaaatgagtgttgcagatatcgaggcgaaggttgctcagaaatatttcgatgatgtttgctatgagaagcgtttgccggaactctttccttctgtgtga

SEQ ID NO: 248213 - DNA, 780 bp, Klebsiella pneumoniae
atgaacgcactctctgttttctcgtttcaggaagcgcaccctgttcgggtaattatgattgatggtaatccgtggtttgtggccaaggatgtttgtgatgctcttaggttaactaactctcgcgtgtcccttgacgcgctggacgatgatgaaaagggagtaagttcaacttacacccctggtggcaaccagaaggtctcgattatttctgagtccggcctgtacactctgatcctccgctgccgcgatgcggtgaagcagggaacgacggcctggcggttccgcaagtgggtcaccaacgaagtcctgccagccatccggaaaaacggtgaatacagctacgtcgaaaccaccccaaaaagcgccggcgaaccattggactggcggcaaaaggaagaattacgcggcctgataaacgatatagcccaaagttttcagtatcgaaacgcgtggatcagtggtgtttggctggcgctgcgacgtgcctgcaggaatccatcacctaaccaaattacggtcgacgatctgccggctatcattgccgaattacgccgaatattaacggcggcagaaactgccctaggtaatatgcgagtttacgaacgggagctgctgcgcgaggtagttcgtggcgggcgccagagtatgtcgtgtgaagaattgcctatcactgatatcaatacggaaatggagaaggtgctgccagcgcatttcgagctggccatcaataaactggaggccttatccacaaaattagaggctcctgccgtctcttcctga

SEQ ID NO: 248214 - DNA, 780 bp, Klebsiella pneumoniae; identical to SEQ ID NO: 248213

SEQ ID NO: 248215 - DNA, 165 bp, Klebsiella pneumoniae
atgttcaaattcaagttcgcagcgatctgccgtaccgataaaaaatcccatattcatcatctgtccaccatcgcctcatccgagcgtgaagcccgtcgccagttcgccagccgttttgttctcgttctgtcagcccgtatccgggttagcggggtggccgcatga

SEQ ID NO: 248216 - DNA, 402 bp, Klebsiella pneumoniae; identical to SEQ ID NO: 248212

SEQ ID NO: 248217 - DNA, 351 bp, Klebsiella pneumoniae
atgatttaccgcaggggatgggtgccggttttgtttcggcatgagcttgagcgtaagttaaaagagcagggtttcgaaaactggaaagagatatgtaattttctttgcggtgaaggggatgactacgccgaatcagccaaaatgccagagcaatacgattaccaggtggtcgacaataccaaatggatggcaagccgtgacgcgacgttctggcagcgtcttaaccgcctgtggttcgtgccgctgtatttgttgaccatcccattccagtggcttatccgtgggcgtgtgggattcgctacaacgtcaaaaacagcagcattcttcagccggttaaccgggctgaagtag

SEQ ID NO: 248218 - DNA, 297 bp, Klebsiella pneumoniae
atggctaaagatatcgatgcacttctggaacagcaggcggatcagatgaccgccgttttaaaaagccatgcggcacatattgaaagcatgctggcgcagcatcgctttcaggtcgcgcagctggcattgcacaacagcccggaaccgttcgttcatgaggtattcaaccatctgcgtgatcgcctggtacaagtcaccatcaatgaagctggccttgctgatgctgaggatgcgcgttacctgctgagaatacttgatcgcatggaattgtcagcattagaggggaaaccattatga

SEQ ID NO: 248219 - DNA, 492 bp, Klebsiella pneumoniae
atgaattatggactggtgagcaagcaagacgcgcgcctgtatgccgaagccgtttgcgatgtgatcgggcatggcaaggcgaatgcagctgttttgctgtgtgtcgaaacggccgcagccgagacattgctcggcgattacaaagacccgacgccgaccagcgccggaaccggattaacccaggttgatctcggtaccttcgaatggctccgcgataagtacaaaaacagccgttatgccccggtactgctgaatcagtttggcatcgacctgagccgaacagtttatgaggaactgaggacctcgccgctgatggcgatgctgttttgccgcctgcgctatctgacggtttcagagtcgattccggcgactcgcgaggcccgcgcagcgtactggaaaaaatattacaacacctcggcaggcaaaggcacgccgcaggattatatcgataaatgccagcgcgctggcgttgatgcgctattcacgcagtga

SEQ ID NO: 248220 - DNA, 477 bp, Klebsiella pneumoniae; identical to SEQ ID NO: 229136

SEQ ID NO: 248221 - DNA, 1197 bp, Klebsiella pneumoniae
atgataattaaacccaagattcgtggtttcatctgcacaactacacatccggttggttgccaggtcaacgtaaacaaacaaatcgagtacgtccgcaaaaacggaaaactcactgatggtcctgcacgtgtgctggtgatcggtgcctcaactggttatgggcttgcatccagaatttctgcagcatttggcggtggtgcttccactatcggtatcttctttgaaaaaccgggtacggataccaagcctggctctgcgggctggtataattctgcggcttttgatgaagcagcgaaacgtgaaggtctttactcgaaaagcatcaacggcgacgcgttctccgatgagtgccgcgacgaagttatcagcctcatcaaagaagatctgggtcagattgatttagtggtttattcgcttgcatctccggtaagaaagatgccaaaaacaggcgaaattgttcgctctgcgctgaagccaatcggtgaggtttatacctctaaagccattgataccaacaaagatcagatcattactgccagtatcgaaccggcaaccgaagaagaagtgcgtaacactgttaccgtgatgggtggcgaggactgggaactgtggattgatgcgcttaataacgctggcgttctggctgatggtgtgaagaccgttgcttactcctacatcggcacggatttgacctggcctatttactggcacggtgcgctcggtaaggcgaaggaagacctggatcgggcggcaaacgcgttacgcaacaagctggctcctctcaacggtgctgcaaacgtcgcggtgttaaagtctgttgtcacccaagcgtcttcagctattccagtcatgccgctttatatttctatcgtgttcaagctcatgaaagatcgtgggatccacgaaggctgcatcgagcaaattaatcgtctgatgactaccagcctatatgggggtagtgccaaacttgatgacgagcagcgaatccgcatggacgatctggaacttcgggaagacgttcagcaagcatgtcgagatctgtggccgacgatcaccaatgaaaatctggagcagctaacagactacattgcttataaagaagagttcctgaagttgtttggtttcggatttgaagaggttaactacgaagccgataccgatacaaacatagattttgatgtgaaaacattaatctaa

SEQ ID NO: 248222 - DNA, 468 bp, Klebsiella pneumoniae; identical to SEQ ID NO: 128621

SEQ ID NO: 248223 - DNA, 414 bp, Klebsiella pneumoniae; identical to SEQ ID NO: 128619

SEQ ID NO: 248224 - DNA, 354 bp, Klebsiella pneumoniae; identical to SEQ ID NO: 208900

SEQ ID NO: 248225 - DNA, 1461 bp, Klebsiella pneumoniae; identical to SEQ ID NO: 208901

SEQ ID NO: 248226 - DNA, 159 bp, Klebsiella pneumoniae; identical to SEQ ID NO: 208902

SEQ ID NO: 248227 - DNA, 135 bp, Klebsiella pneumoniae; identical to SEQ ID NO: 208903

SEQ ID NO: 248228 - DNA, 207 bp, Klebsiella pneumoniae; identical to SEQ ID NO: 208904

SEQ ID NO: 248229 - DNA, 351 bp, Klebsiella pneumoniae
atgaaaagattgattctcacgtcactgatcgttctccccttcgcctcaagtgcaaccacattcacctgtaaggcgatccaggaagggcagatcgattctggtagccaaaaatcttcagtcgaaactcgccttgatgtgcaggacaaaagtatgaaggtgaacatgggtggtaaaacctggcgactcggtttcttgggtgagaaaagtattgcgaagatgtacgccacgccagacggagggattgccgtcacatacatcgacaatgggagtgagcctattttcgttatgcgccccacaaacaatgatggacagactgctgtctacacgctcagcctgtgctctgagatgtaa

SEQ ID NO: 248230 - DNA, 558 bp, Klebsiella pneumoniae; identical to SEQ ID NO: 128732

SEQ ID NO: 248231 - DNA, 543 bp, Klebsiella pneumoniae; identical to SEQ ID NO: 128733

SEQ ID NO: 248232 - DNA, 318 bp, Klebsiella pneumoniae
atgctcaaaggtggtatagttgcgcagacgccagggaccgatattgagaccgggacgcaggttcaaatacgtgctttcgtaagtttctgcacccttatatcggctctgatagctattcatgttgtaattgaggagaagggctggaataccttcatcccaacgttcaataggcacttcatccaggctgcgcgtattcattgccgcatgaggaatactcagattcagcttttggcggttaaactggaagtcggcaaatgcatcagggatgcccgcaagattagcgcattcgctatcactgacggcgagttctggaaatga

SEQ ID NO: 248233 - DNA, 828 bp, Klebsiella pneumoniae
atgtttggaatagagacaacatggctatgtcaggatttcgaggctggcttacaatgtagggaggaacataatttttatttaaatgttgcagactcatatagattaaggatatgttgtataaaatacttacaaaagatcaaaccaatgcgagttcttgataataatggtatgaagctgaatgctgagtgcctggtaggtgaagaagatggggtatatggcttgatacttgagtcctggggaccagcacatagaaacaaagattataatattgccctcgattatattattgaaagacttattgattccggagtagacaaagtcgttgtatatttggcctcatcaccaatcagaagacatatacaatctataactgagagaaaaatacatcctgatgagtatttttctttagtgggaaaccaaccttccaatatccgtcaagaaatgtgtaggtatcagaattatttcagcagaactggtaaaaaagatgcaccatcagggaacagaacaaagcgaataatgataaacatccctggcgtcaacagtgctgaattttggaaacctatcatatacggagatacatcagtatttttcgagcctacttatgatgagagaattctaaataaaagggtcagcagactaataaatattcctttggatgagcccaagggttctaaaacacctggaacattagaaagagttcagaaggtttatattcgggaccctgctgttaaagcttgggtattgcaaaagagtaagggaatatgtgaaagatgtggtgaaaatgcaccgttcttaataaatgacgacaccccatatcggctttgttga

SEQ ID NO: 248234 - DNA, 948 bp, Klebsiella pneumoniae; identical to SEQ ID NO: 34943

SEQ ID NO: 248235 - DNA, 222 bp, Klebsiella pneumoniae; identical to SEQ ID NO: 92408

SEQ ID NO: 248236 - DNA, 306 bp, Klebsiella pneumoniae
atgcccattattgcatgccagcccaaaccaagttcttgcttgtttcagatttatacttcccccctgaccaagctcattcataacaccaagatcaaactgtgcctgcgcatcgttttgcgaagctgccttttcataccaagctctcgcctgatgaaagtcctgcccaaccccttcaccattttcgtatattacgccaaggttatattgggcatcgacatgaccttccccagctgctttttcgaaccattccttagcctttcgatagctctgagttacgccctgaccgtagtaatagatctgacctaa

SEQ ID NO: 248237 - DNA, 903 bp, Klebsiella pneumoniae; identical to SEQ ID NO: 30075

SEQ ID NO: 248238 - DNA, 828 bp, Klebsiella pneumoniae; identical to SEQ ID NO: 206964

SEQ ID NO: 248239 - DNA, 1266 bp, Klebsiella pneumoniae
atgggttcatgtgcagctccatcagcaaaaggggatgataagtttatcaccaccgactatttgcaacagtgccaaaacaatcacgtcagacctaaagacagaaagttgttactgaccaccatcctggccgatggtatcaaccttggactgacaaaaatggccgaatcctgtccgggaacgaccaaatcgtcactcgagggcattcaggcctggtacatcagggatgaaacctattcagctgcgctggccgagttggtcaatgcccagaaaaaaagccctctggcggcattctggggcgatggaacaacgtcatcgtctgatggacagaactttcgggtggggagtcacgggcgttatgctggtcaggtcaatcttaaatacggtcaggatccaagcgtgcagatttatacgcatatttcggaccaatacagcccgttttacaccaaagttatcagccgcgtgcgggattcaacacacgtacttgatggtctgctgtaccacgaaactgatctggaaattacagagcattacaccgacacagcaggtttcactgagcatgtttttgcgctaatgcatctgctcggattcgcttttgcgccaaggatccgggatcttcatgacaaacggctgtttattcatggaaaagctgagttgtatcaggggcttcagtcaatcatctcgacaaccagcctgaatctaaaggaaattgaaacccactggcatgaggtgctgcgtctggcaagttctataaagcagggaacggtaacagcatcactgatgatgaaaaagctggcaagctatccgaagcagaatggtctggcaaaggcgctgagagagattggccgcatcgaaaggtcattgtttatgctggactggttcagggatcctttactgcgtcgacgcgtacaggcggggctgaataaaggtgaggctcgcaatgcccttgcgcgagcggtctttatgcatcggctgggtgaaatcagagatcgggggctggagaatcagagctatcgagccagcggtctgacgttgctgactgcggcgatctcactgtggaatacggtatatatagaaagagcgatagattctttgagacgaaaagggatcccgattaatgagcaactgattacccatctgtcaccactgggatgggaacatatcaacctgagcggggattacgtctggagaacgaacctcaaactgggacagggtaaataccgcgcattacgctcagtgaatagtaatatgtacaaaaaacaggcttag

SEQ ID NO: 248240 - DNA, 579 bp, Klebsiella pneumoniae
atgggcaatgaagacgcccggttcgtggcgctgcagaacagccgcaacggagaaagcctgctggccgggaatatgggggaaggcgtcagaatggcccgcgacaatcccgatacgggggtggtggtgcggctggccggtgatgaccgcccctggaaccccggggccatgaccggtgggcgggtatgggctgaaccggcgccggtggctccggtaccgcaggccggggctgacattatcctcccgccagaggtactggcacagcgggcggcagaagaacagcagcgccgggaaatggaaaaacaggcggaacagactgcccgggaagtggccggggaggcgcgtaaagccggcgagccggcggaccgggtgaaagaggttatcggggacgtcattcgcggactggagcgtgaccggccgggtacggagaaaacgacgctaccggatgatcctcagttccggcgccaggaggaggcgattcaacaggtggcctcagaacgtctgcagcgtgagcgtctgcaggctgtggagcgggacatggtgcgcgacctgaaccgcgagaaaaccctcgggggcgactga

SEQ ID NO: 248241 - DNA, 486 bp, Klebsiella pneumoniae; identical to SEQ ID NO: 86491

SEQ ID NO: 248242 - DNA, 603 bp, Klebsiella pneumoniae
gtggaaccacgccgggattctgctggaagggaatatgctgctgcatcacctgtatggccatctcagcaagcgcgtgccgtatggtggatactggttagacaggacgatgaaaatcgtccgataccattctctgtgttaatctcttgtggaattttaactataaatccaagggatactgaaatgaaaaaaatagctctagcattggcaattgtcacagtaacaggctgttcgacaacagttgtacctcccagccaagctatttccgcctcaaaagagcatgtttttaaatatcaagaaaacgaaggtaataacggtagcctgacaatcgttcgtgattcaggattcgtgggagcaggatgctatgcaacagtttatttgaatggtgaacgagtagcgaaactggatccgaaagaaaaagcgacattttatttatcagaaggagagtgggctgtcggtgctaatcttgaaggtaaaggactttgcagtttaaaccgagagagacaagaacgatttttcaatattaaagctggagagaaaaaagcagcaagagtttttacggatgctaatggcgatttggatataaggccaaccactattaattaa

SEQ ID NO: 248243 - DNA, 189 bp, Klebsiella pneumoniae
atgaataaagccgtactcgctgtgctgctcgatatagcggtcaaacgcctttttgtagcgaatggcagcggcacgggagctggtcacgaccatcgccttggccttgccatccagccggtgggcgacgtttttggtgaagtgctcaacgataaactgtaccttctgggtcacattggtgggatgcaatga

SEQ ID NO: 248244 - DNA, 432 bp, Klebsiella pneumoniae; identical to SEQ ID NO: 143379

SEQ ID NO: 248245 - DNA, 588 bp, Klebsiella pneumoniae
atgcaccaccgccccacgcttgaaggtcagcaatggctcccggcgtttggtcttggcgtcatacggcaggcgatcattgcggtactgatccatggccgcttcgcaggactgggtgaagtcggtcttcagttcgacggttgccaccggcagaccgttgataaacagcaccagatcaatggcaaattcacgggccgggtgatacttcagctccggcaccacgcgcaggatattggcctggtagcgctcaatgactgctgcattgcgcttgtcttccggtgcagcctcggtcatctcgatcaggccgcaaccggcaatggaaaaaccctggcgcaacacctgcatggtgccttgtttctccagtgctttatccaagcgatccatcagcacttcaagggttttggccccgttgagccgttccagcttgtcccatttttcctgctggccgctggttttgatccagctttccaggtcttcggggtacaccgcccgctcggtgtcgtagaacttggaatcacccagcttccagccctgctctaccaaccggtcgatgatgtattgctggaagtgtttttcctgatgtgctgctga

SEQ ID NO: 248246 - DNA, 243 bp, Klebsiella pneumoniae
gtgctgcagctggtgaaggatggcgtgaccgacggagtgcagatcgacccgacactatatacgcagtacagcatccggagtgtgccgtctctggtggtacggtgtcaggccgggtatgacgtggtacgcggtaacattcacgtcaaacaggcgctggagaaagtcgcacaaaccggtgactgcgcacaggtggcccggcagatgcttgatgcgccctcgaatgccgccgggagccagccatga

SEQ ID NO: 248247 - DNA, 510 bp, Klebsiella pneumoniae
atgaaagtaaaagtgatgttgttcatttgtatacttgctcttgtatcaggagcaggatactttggccggcatataactttttcgattcagtggcctttgtttgaagcacttagaactacagcatcgataatttttgctgttgttggggcatggttcgcgattatctatccagaaagattaaagaaatcttttcgtggaggtgattcaagcggtggcggtgcaggaatccataacctctttacgcctattgttcattcgacagctatcctcgctgctgtactgctcgttggcattggtgctccgttattaaagcaatttgattgggtaatggagcataagacagttttcagaggactatcttacggattattggtattcctcacgttatggcagcttttaactgtcgttttaagtcttactggccccgacatccttaaacgatttacttcgaagcaagaagcttccaagagagctgcaaactcgatgctcaaccccaaaaacaaaaactaa

SEQ ID NO: 248248 - DNA, 1041 bp, Klebsiella pneumoniae
atgattacagagaaagccacattcaccttttaccaggttagaaacgcaggtttctatcgtgcaggagccagtgttccagaatttggttctctaggtgaaacgcttatcgatttaaataactgggccgggcaaaaaatactaaaagaaacaaaaacatttgaagctgatgaagatcggtacccggcctatctagttgattctaaaaatgttggtgatgattgggtgttacttctctggaacgaagttccaagtaatggtcagcgcatgccatctttgagtgaggatgcagtgtatggggctgatccggaggtgataatgaatcctattcgtgaaaggactatcccggggtttgccacttacttttggttcattgctgacagaaatctcatggccacagtaaagctgcacaataaggtgacagcgcaggctaccctacaaaagtatatccagtgttttttaaaacaatcttctgaacatgctaaagcggaagtcattgaacttgaggatggttcacatgagcttaaagtcactgggtatatgttggatgtaaatgatgctcaagaagagcgtaagcattactaccctagattcaatgccaatttgataaaaaatccaggtaagcacgaagaaataagacaaaaagcgaactttatcagtaaaatagaaagagttatcgagttagatcttaaccgtcatcccgatttggatttttggcaaaaattattggataaattgcatgttggtgcccagcaaggacctggggtatcaaccaaggtaaaatatactctatccccagatgtaggtcttgctgatgtaaatcaaatgattttggattgggataatgatccatctgaagtgaacgattatggttttgtctttaaaggagaaccaagcaagacatattggttaagtaattcgctctctaggacgcaatttgatgttcgtatcgagagagagaacgatgaaatcgtcaacttacaatctttactagtcgaactaagggcgaagaaagatctaattttgaggggctcaggcttataa

SEQ ID NO: 248249 - DNA, 174 bp, Klebsiella pneumoniae
atgcgtaaccataatccgatgccgggaagccgttacaaggattcgcacggggctgtagtgaccgtacagcgcgtcgagcataaccgcgtgacattctatcgcgaggggtaccagttcccgtgcgtacagcccattgagcgcttcatgaaggagtacacggaggtgaagcaatga

SEQ ID NO: 248250 - DNA, 303 bp, Klebsiella pneumoniae; identical to SEQ ID NO: 239334

SEQ ID NO: 248251 - DNA, 306 bp, Klebsiella pneumoniae
atgcaagaaccgaaagggcgctaccgtccgtttatgaccgcagctatgatgactagcggtaagactcaagcccaggtcgctaaagaagtgggctttgaaaatgcaaataacatctctcttatcaaatcaggccgagcgcatttgtcggtagataaggtgattccatttgctcgttctgtaggcgctccacctgacgaattcatgatgatgtatctttctgagcgaattccagaagtatatgaattcgttaaaaaaatcaaagatgaaaacgatgctcttaagaaaaagttaggtattgctgattaa

SEQ ID NO: 248252 - DNA, 1050 bp, Klebsiella pneumoniae
atgttgaactcattcgagattgatagagcattagaaaattgctctgttgagacagtgcaataccttcaacgctgccaatccatgaccggaactcaaatgatggcaatggatgccgactcaaaattcagtgaagcctttatgtttttcactcgactatcacttctggttactcggcgacggccagagctaggggttcactgcatccttgttcatgttatgcctgttattggagacaaaagagtcgccgacattaatcgcttaacgataaacagactcattaatgccctggtgctggatggtaagttagtacaaagccggcgcgttttttctgttttaaaacagttccttgggtggtgcgagttccagggtgtgatcgagacttctccacttggcgcgatgtctcttaacaaagtagctggtgggctgaagccgaagccgcgggaacgtgtcttatcggacgacgagttagagaaattctggcatatgtgggattttgccggcgtatcggaaagcacgcgttgggcggctcgcttcgttctctgctcggcaagacgacctgatgaagtgctccgcgccagacgtgaagaatttgatcttgatagaggtgtatggaatcaagggagtagaaataagtcaggcagagaacattcattaccgatcagcccaataatgaggttgtgcattactaagttgctggatgctgcaggtggtagtgaatggatcgtgccgtctccaaagaacggtttgaagccggcatctaaagtaatgatagcccaggcatcgagaagaataatgagaaaaggttatctggccgagagtcttccggcacccttcgaaatcagagacctacgaagaacggccagaagtacactttctcgcttaggtgtggaacaagacgtggctcgaaaaattatgaaccacagtcttgaagggatagatcgtgtatatgatagacacgattatttagatcgaatggctgaggcaatgatttcgtactctaactttctgatagaaaaatgtaatgttggacaattaatcagcaatacctaa

SEQ ID NO: 248253 - DNA, 360 bp, Klebsiella pneumoniae
atgatgaccttaaaatattattttcggcactgcttatgggggtggtgcgggtatggctacctgacctattttataattagcgatatgaatagcgggcgcatatttcctctctatgttccatatatgccattcgtggtggtatatcttatttttagtgccatactctacccattttcttactatacatcggagaaactagcccttaagataatgtcgcaagatttttgggaccgtcacatcggtgagaaaagtggtgtgtatggcatgtttattattgtgtggttattctgcatgccattgtctttacccttattcattgtgtatttatgtatacgtaataagagttcattaagtgagtag

SEQ ID NO: 248254 - DNA, 192 bp, Klebsiella pneumoniae
atgatacctaatattcttgggcttctggtgatcgttttcatcatgggctttttcttcggcgtcatactgattcaaagcatcaaaaaagatgaagtgaatgccgggattatggagttcagacgtcgtgtgtatcgtgtagtcgatgtcacagatattgttaaaagcatggaacgcagagagggtgaagagtga

SEQ ID NO: 248255 - DNA, 381 bp, Klebsiella pneumoniae
atgtttgttgaaggactggcaatgtacctcgcgggaaagggggtcgggaaggctggctcggatatttttatcgatgccatgccacagaacgtaaaatcagccgtcatggtgacgtcggcaaccagcgggatctcagttgatgatgaactgcgcgggttctattttgactctatgctgattgtcgtgcgcgacatttctttggcagcagcgcaaaagaaaatgaagacaataagtgattttctgcccgtcgataacatcacgtcaaagaacgtttttttcaggatgcttcgacctatgactttgccgatagtgtatccccgaaatgacggtgctctgtttgagattgggcttccggtagaattcgcagggtatatgttgtaa

SEQ ID NO: 248256 - DNA, 360 bp, Klebsiella pneumoniae
atgaaaaagcatatggatagtaaattgtctgaaaccattacagaacaaaaagatgaggcaccccaggccgggaagacggttagctgtcatctaaaactcacaccagaagctgacagccgactgttgaagcttcaatatctgttgcaaacagaaaacctaaagctgtcaaaaaccagtattataaatcaccttcttgaaaaccttagcgttgaatatttaagcaaagacttgtctgatatttttggtggcaaaattagaaacgatatcgttcaggtttttcttaattctgaaatgaatgatgatgatttaaaaatcctacagcaaatggaaaaaaacaacaaaaaaaaaccgaaaatttga

SEQ ID NO: 248257 - DNA, 552 bp, Klebsiella pneumoniae
atgattacttcagaattaaaaaaacttccatttttcacgccaccaaagtcaaatcgacaaatagccaagttttggaagagtgatactcttataccagaagatgaaggtaaattgtatgccaaaagcctgattgagttcatgaaaaacaactcacagatagttgggtcaaatattttcaaagctattgtcagagatattgtagaaagtggtgatttgcattcacggaaagctcaaacatttttctctgaactagagatagctatagtcaactctcaaacaggacaagagcatttacctaataaagaatctcatatagaaagacctaaacggagatatggctttacgttatccgaagcagcaaacgagatcaatgtgtcttctggaagattgatatcctatatgatcaacaatgagtggctcgatgcagagtctatacaacctacagaggaagcgctggtaagaggaatgcttaggaggcgtcgcgagttaccattcgttataaccaataaaggactggctttactacgttcaaagaagaatctatttagttaa

SEQ ID NO: 248258 - DNA, 693 bp, Klebsiella pneumoniae
gtggaaagtcggggcgagataaaacagaagaaaaaagaactgtgggaagctttttgcaataatgagatttcaagagaaaaatacggattagcattaaaagaattaagaaaaggctactggactaaattcagagttgtattggtctcaatttatttaattgccttctcggttgcggggttatatatctaccacgagatctctatggagaacgaacaaatagctgaggaaaatcttaaagctcagcgtgaaaaagaaaagttggcgaagatcgaaagagcgaagttcgaagtgtggcgccaaaatcgccatgttcaagaaattaaattcataaagagtcatatcgaaaataaggattattcatttatttcaaaagcaattagtgaatgccgactaaagtctgagcaggaagtcgggaagagatataagacatactccattgttgatgagtattcggctaacagcattcaagatcattcagaaatgagcactggacaaaggattctatcagaagatgagaaggtcagtcaattcctggcattgaaagataatccagatgttagtgtaagtaacataaatggcagtcttcaatggctagtaatggattacggtaaaagaaaatatataaatacctactgtctttatgagtttgatcctgacaaaaaagaaatactcgtaaaaacatctattttttaa

SEQ ID NO: 248259 - DNA, 582 bp, Klebsiella pneumoniae
gtggtaaatgttttatattatcaccaaactgaccttgatgttattaatatggaaactaaaaacttcacatacggcataccatctgagaaagatcgcgatctaagaaaaactatagaatttttcaaacataatcgttgtgtaagaataacaatggcaaatcataagaccttttctttgtttgtctccggttatgaaatgaaatcttatcgcatttttctcgggccagaactcagatataaaaaagacaatcgcgtcatcatacctgtagattacatcatctcagcagagcgcattgccgcctctgaagtcgacacagcctataagggtcaaacgacactgaagcgcggggattttgaggatgatggctttgttcgttcggggaaagatttctttcaagttatccgatacgcccaccagcagggaaagcctataagggtctatctctcagacaatcgagtcttggatggtgtgtccaccggcatgaatgaacagtcagcaggtataaggttgtcggacggcagagtcgtccaggtattctatgattgggttgaccgaatcattcccgtcaatcatgaaatataa

SEQ ID NO: 248260 - DNA, 216 bp, Klebsiella pneumoniae
atgttcaaaagcctggcgattaacataaccgtctctgactacgagccgacaacaaaaaacgatgcgctgctggagcaaatagtccgatctgacaaggttgtgatgaaagtggccgagcagatctccctgggagaaaggagaggggcgtttgtttatgatgccgatgatctggatttggccgtcatatggagcacggcaactttagaaaatctttga

SEQ ID NO: 248261 - DNA, 234 bp, Klebsiella pneumoniae
atgaccccttcaaacacatatctgaccgtcagtttaacaggcactaaagaagtcactccaaacgacctggcagcagtctaccgcgactggatgaacaattacctttccgttgtggcattcgctaatgactacggcatcactgaagcacaggcagagctggccatcgcaaaaggtcgtgagatccacgacgcccacgccgactggcttaaagagttcgcgcacaaggaagcctga

SEQ ID NO: 248262 - DNA, 672 bp, Klebsiella pneumoniae
atgcttatttgtatttctgattgtgtgtactttgacattggcttacgtcaatcaattattcaaaaaaaaaactgctgtaataaaattaccaagattgttagttatacatccaaaattaaagttagtgatttccctatctattttcattcaacaaagaatataggttcacatcttaattacatcttagttgattactcgcagaataaatttcagactctgcaatctgttttatttctaaaaacattctatccattgaccaaagtgtttatttgcataaaaggagattttgtttttacagaatatgaaaagtctttaatttttataattaacgctgaggtggtttataatttttctgacttctgtgatttaattcggatcagtgataaacgaaatacatgttcaccttgtgatattttatttaattcaatcccatccaacttaaatatttcacgcaaagaggtcttatatatttcacttgtaatttcaggcctttcttccgagcaaatatctgctgtattaaatttagacattaaaagggtttattattacagaaataagattttctctaagttgattattaagaataatatcgagctaatttgtagggtgcaaattttaactataaggttttataataaggtattgagagatgaaatcgtatctttacgctaa

SEQ ID NO: 248263 - DNA, 552 bp, Klebsiella pneumoniae
atggagctatatattatctctgtggatatattcttaattgatggattaacaaacactttatcctcggatgtatctgccgtccacaaattatgcccaactaatactttacctaaaaaattcagccttcatagtttgttaatcattgataccagggttaatttagataaaaagttttatgattccttatctaaaaaagaggttgctattattttttatatctgcggcacttcagcgaattcaacttgttttgtttatccaggaaattcaatagattacaatgcctttgtatcgaaaaatagtcattctccgttttttcttgataagctcagagtacttaaaatgcaattcttgttcacagagaaagaatgcaagatacttttttctatatttgaaggattatcaattgtagatatatgtaataaacacaatattcaaattaaaacatttgatactcatataagtaatattcgcttaaagacaggaatgaaaaggatacacagcctgttcaaatataaacaagtcatctattacagcatagtgagagaatcataa

SEQ ID NO: 248264 - DNA, 303 bp, Klebsiella pneumoniae
atgtcacaactaaaaatggaagatgaagattacgcgctgttgtcggattttcgcgctacattacgggcttttatggccttcagtgatactcaggctcgcagcgtggggttgactccgcaacagcaccaggctctgttgactatacgcggcaccccatcaggcaatgccactgtgggttacatagcagaacgtttaatgttaaaaccgcacagtgcttcaggtttattgagtcgtttagaagaggggggttggtgctacgcgagccagatcaaaccgaccagcgcaaaacatttttgcgattga

SEQ ID NO: 248265 - DNA, 1323 bp, Klebsiella pneumoniae
atgcacaacacgctgattgcgattcaggctcgcttgagggagcttatctcccaagtacaagcttccgttcccaacgatgaacccttcgggaatgcgcatgcaaactggacttatcccggtctgactcgtgcggagttgatcgaagaagccgagactatcgttggcctgatcgaaaaacggtgcggcgaagatttgggtgaacatgaagcgcggctacaggactatgtgcgtcgccttcagcacttgcagcagcatacagtcccgcaactgtggggcaatgcaggacaggccgtacccgtttacatgctgacgctccaggggctgcgcaaggctctcgatccggtattgaaccgagatgatcgggccgaggcggcgtccaagctgaaaaggctgactcaacagctgcgaggcatggaggcgcgcctgaatggccttgaaccacgagctacagaactcaacacgatggttgagcgcatcgagcaggcgtatcacgcggccgaccagttgcctacggacttggagactttggctgaggctcggcagaatatatccgatctcataaaggatgctacgagagatcaaggtgacgtgcagcggatcagagagggcgcgggagaactcgacaagcagctgaacaagattgcagatgatgccgaggcagtgcttgaacgttgcgagactgcgtattcggccgcaaccagcgtcgggctggccgcagcgtttagcgaacgatccagcactctgtcgaaatccatgtgggtttgggttgctgggttggtcggggcattggccgcagggagttacttcggctctgcccaactgcactccttggctgagttgttcaaggctcccaatgttgctacctcagtggttctcctcaacctgctactttccgtgttgtcggttggcgctccggtttggtttgcctggctttctacaaaacagatcggacagcggttccggcttgccgaggactatgcctttaaagcttcgatctctagagcttacgaaggcttccggcgggaggcagcacggttcgacaaagacatggaggcgaggctcctgacatcggcgttgacaaggctggatgagcttccgcttcgattggttgaaaccgacagccacggtagcccatggcatgagctggcatcatcgaatgaagtgaagcaggcaatgcaagcggtacctgggttctctgagcagataaaagacttagccagcaaagcacttgtaactgttacgtcactcaaggtgccagtcgcgtcaatctccactggtgaggaggcgcagtcatccggaaaaaacaaggtaggtgacgcatga

SEQ ID NO: 248266 - DNA, 879 bp, Klebsiella pneumoniae
atgctggtttacgaggtagccagtctaagaaacgtccaagctgcgattccagacgaagtagagtttttccatcccaagttgcgagagtatgtgcatggagagggggacggtgctgtgcgtttggtggctgaacgcccgcccatccactcggtccatgatggggcggatgcgagtgtgaatactaaacctgttttgttgcaggctccctccgtcgtatttgagttttccaaagcgttcaatacacgcaaaattgctgataaaaaacaggagggagctaagggtaagactgacgatgagattggctccaaggcatcagaggacgtaagtactgaagagtcagtttttggggggattctgcccagtgccgagtggaccgcagaggcggatgaaaccgatgatctgcgtctatatgccaacaagtttgattgttttcagtcgatgcttgagcagttggtggcaacccatggttgcgtcattcgctcccagcaactgcacaagctacccaagctctaccgttgtaaacgtcatctgcttttggatggcaatccaagatgcctggccgttgttgaggtggagttgcagggccgcaccttctatatcctagaagtcgatacatctgatggtgtttgttctctatcaactttgctattacggctgaagtcgtctctggattggcccaagcagcttacgctgttggcagaagagttaacccagaaatcactgcactggccaagtcagcggctaaaaatgctctgcggcaaggatggctattccggcattcctcacccgcagaccaaatccgtggataagggcaagttgcatgaagagtcgatagagcactgggcggcaagatttcacagttggatgacttcaatctaa

SEQ ID NO: 248267 - DNA, 243 bp, Klebsiella pneumoniae
atggacactgcgttcaggccggaagccatacgagagcgtatgaaaatcactctcctatatcggctccatcgccatcagcatggcccgctgaacaatacgatcacgcatcgctgggatacccagtggccgcagtttgccgttgcttttcgggatataaacccgtcttgctggcaggggctggtagtgacccgagagaagttcttcgctgagtctttgcaactcagcagacagtccggcctgtag

SEQ ID NO: 248268 - DNA, 546 bp, Klebsiella pneumoniae
atgcccaccctgaactccgggcgcactgtaggttatgtccgttacccaacgctcatccggagcatccggattgaactgtcgctggagcttgttgggcgacacgatactggcctcgcctttgcgtgcccgcgggctccggtacccgacctgggcctttatcccgacacgcttcatcagtcgccagactctgttcactccgcactgttgcccgctatcccgcaagtccacatggatcttgcgataaccataaacgcaaccggactccagccagaactgtttaatctgtcccgtcagtctcagatctacctggtggcgcttagaatgcggctgctgaagccaggcgtaaaagccactgggatgaacatccagcacccgacagagcagacgaacaggccagcaactgctgttgtcacggataaaggcgtacctcagtcggacagctttgcgaagtacgccgctgtagattcaatctgtcaacgcaacactcctttcaattatctctttcggtgttttgaacttcagtgtctttcttggcctgttgtttag

SEQ ID NO: 248269 - DNA, 2745 bp, Klebsiella pneumoniae
atgctggacaagaatgtagcagttagtgttttaaacactcaagccctggccagagcgaaaattaacgccgagaattttaaaaatggcatagataaaaagcttaaatatggcgagtcaaaatgtgcccgctatgttaaaaaagcattaatcgctggaggggcatctgcaaaaaattcaggaattgaatcagctaaaaattatggcccatggctgcttgaaaataactttaaagttgtgggtggcgctacaacagtgtgtactggcggtgtattcacaatttctggtcagcaagtgggggatgttgtcgtaatccaggcagcaccacaccatgtgcatggtcatatggcgatgtttaatggtacacactgggtatctgattttgtccaggaaagggggttctatcctgcccagatatatcgtgatcaaaacataccctatacactttatcgttatggcgataataccacatcagagcagaacgccacggctacccaaaaaggaaaaattaaaattgtctggccgatcccttctaataaccggggaagtgagttcaataatcaggaagagatcctctctcatgtcgggggggaatccaccgggcagtatatgattggccgtagcgggatgtggcatggcgggatccatatcacggaagcaacgaccccgtggtgtgctctgagtggcaagtctcctcttgaagcattagatttcccagttccctttaaaggtgagcaggctgtgcgatgcatggctgatggagaagtcgttgcttatcgtgtctgcaaggattatctgacgattgcatgggaatccggcccactgagcttttccggttcgtttgttctggttaaacactttattcaaccgggggagaaggaatccagcgggctgtatttctataccctgtatatgcacctggctccctattcagcctatagtgtcaatcaggcggaaaccaagtggacagtccaggatacgctttctgcctacgatccagaatgggtcatgaccgccagtaccaacaataaaagtatcagtgaaagctatcgcaagggtacgatcccaaaaggatctattgttgagtgggataaaacagacagcagcctccataccgttgcatttaataagcgagagtatggccttgttacttttgttagcctctcagaacatgcgttgaaaaagggcaagaaaacatccctgaaaccagggcagcaatactggatgcttgtggacaaaaacaacctgtctcctggcactgatggggtggtacagccttcctggtggcagaaactcatgccgccagcaaaagaagcgatgaaatttgaccaggtagtatgcccgactccctttgttatcagtgcaggtgaccctgttggtcacatgggatattaccaggcacctaaggatggcggatatgaagcgcgataccaggttcatatcgaatgcacgagtatggatgataatctggaaacgttcctgaccaaccctgagcaggtgggagaaaagaacccactctggctgaagtacgctccgggcctagcgttgtacaaaaaagatgttgcaacaggaacattcacaaaggatacaaaggtaacaaccagggcggggatccttccactgagtcaaatgcaaacagaagtcgataagtcgaccaaacaggaatactggcagctgcgaccagaaaatgcttacgtccctaaaggccaggcggaacctcaacttttgtcgcagtatgatctggcaaagctgggcttcagaactgaaaccgcagaaccagccagctttgattacctggatggaaaaaaccagcccactggattcttccgtaacctcatcgattcgctctaccaggccgcgatagatgatacacgaaccagtcatgctctcgtgaagcataattaccagcgcctgctggataaaattgacagcggaagcgaccgctattctccaatggagtactggagagcacttcacaatcccgactatcgtgacgttattcagaaaacaattgtaaaacatccaagcgactggtacttcaaaaaaggcgatgctatctggcaaccattcctcaatgcgctgaaaaaagatgccccggagtggaagaaatatagcgaagattttatcgataaaatggcatggatgcaggatgttacatccgaaaaactagggccttcattgtggcatatgcaccccttaaaatttttagcctctctaattcagactaatgtaaatattagaatacttcgtttacgtgcatttctacgaatgatccgcattggtgaggggaccattcaggaagacggatacagaacgatgtttactggtgcaaaatttacagattttagtaaacaccccaataccagacatgaagctaatggtgttgtttcgactgctgctggagcttatcaatttttatacgggacatggagaaatctgcaacgtagatattctttctcagatttcagtcagagtaatcaagacctcggttgtatagcgctcattgcaggtcgaaaagcattagacgcagtaatgcaggacaagattagcgaagcaatacatttatgtcgtattgagtgggccagtttacctggttcaccacatggtcaaccaactgcaaataaaaaaatgatcatggaaaaatatgaagtctacttagctgaagaaaagctaggtaaaacaagtttacacgccacttcagaagaaatgacgaaatttattgaagataattatccggagtatttatga

SEQ ID NO: 248270 - DNA, 213 bp, Klebsiella pneumoniae
atgctcgtccgtacgcagttcaaaaccggccccgcgcttttcacgctggctgttgaccagatgccccatgttcagctgcgttttgccgtattcggtggcgagcttgatatgctcttcctggcgcttatcctccatccgcagcttattgttcgccggtgtgcgccacacgttccgcgtatgattgtcgctggtaacatggtccggatgctctga

SEQ ID NO: 248271 - DNA, 780 bp, Klebsiella pneumoniae; identical to SEQ ID NO: 248213

SEQ ID NO: 248272 - DNA, 402 bp, Klebsiella pneumoniae; identical to SEQ ID NO: 248212

SEQ ID NO: 248273 - DNA, 1077 bp, Klebsiella pneumoniae; identical to SEQ ID NO: 199874

SEQ ID NO: 248274 - DNA, 966 bp, Klebsiella pneumoniae; identical to SEQ ID NO: 207018

SEQ ID NO: 248275 - DNA, 432 bp, Klebsiella pneumoniae; identical to SEQ ID NO: 143379

SEQ ID NO: 248276 - DNA, 192 bp, Klebsiella pneumoniae; identical to SEQ ID NO: 246859

SEQ ID NO: 248277 - DNA, 396 bp, Klebsiella pneumoniae
atggctgcgaaaaataaagcagtggagctggaagaaacggtcgtacaggacaaccatgcgaccgagaccgcacaggacaaccatgcgactgagaccgcacaggacaaccatgcgactgagaccgcacaggataaccatgcgactgagaccgcacaggataaccgtgcgactgagactgcacaggataaccgtgcgaccgtggtcgcacaggcagaacgcaaatccgttgtgttcctcggtccgcatagccgttattcccgtggagatatcgcgtggtttgaaggatcgcacgccgaagagctggttaagcgccgtatcgcggtatggccgaaggatgccgaacgcgcgctgaaaccgaagccgggagacagcgattttgatactgacattggatga

SEQ ID NO: 248278 - DNA, 594 bp, Klebsiella pneumoniae
atgcaggaaataatgacaacaattgagctttctggaattcttggcaaaactttcgggaaggttcatcatcggttgatttcaacagtccaagaagcaggcatagcgctggctgcaaccatccctggatttgaaaatttcatgaataacagcaaagaaaaagggttgacctttgctgttttcaaaggaaagaaaaatatcggtaaggatgatttaggattccccgttggtggtgaagttatcagaattgttcctgttttaattggtagtaaaaaggcggggctgcttcaaacaattcttggagcagttattattgttgcctctgctgtcggctcttactttgttcctggcaaccccgtgtcagcatttggttataaaatgggggctgctatgatgctcggcggcgttgttcagatgctctccccacagtcagcaggcctggcccgaaaagaatccgctgacaataaagcgtcctacgcctttgggggcgtgacgaatactgcctctcagggatacccggtccctttgctttatggcaaacgccgaattggcggagccattatatctgccggtatttacgtagaagaccagcaataa

SEQ ID NO: 248279 - DNA, 237 bp, Klebsiella pneumoniae
atgatccccactcgccagctgcatgcgatttgcacctggtgtatccgcaatcagtaccgcagtggtaacgggtgcgactatgccggcacccggtattttgacaggaacaatcagccagttgatgacccgtcgcaggatgtctgcaacggaacgctcacggcctgtaaattacgtcatggtgagaatagtgaactgccgtttggcgggttccccggcacctcattaatcaggagctga

SEQ ID NO: 248280 - DNA, 1818 bp, Klebsiella pneumoniae
atgccctacacctacggcagtaacgacggcaacagcacctcggatattgaaaacagcaagctggtggtgatgttcggcaacaatccggcggagacccggatgagcggcggcggcattacctggtatctggagcaggcccgcgagcgctctaacgcgcgaatgatcgtcatcgatccgcgctacaccgataccgccgccggtcgggaagatgagtggatccccattcgccccggcaccgacgccgcgctggtggccggtatcgcctgggtgttgattaacgaagatctggtggaccagcctttccttgataaatactgcgttggctacgacgagaaaacgctcccggccggggcgccggcgaatggtcactacaaagcctatatcctcggcgagggggacgacgggatcgctaaaacgccgcagtgggcctcgcgtattaccggtatccccaccgagcgcatcattaagctggcgcgcgaaatcggcatgagcaagccggcctacatttgccagggctgggggccccagcgccaggccaacggcgaactcaccgcccgggcgatcgccatgctgccgatcttaaccggcaacgtcggcatcaacggcggcaatagcggcgcccgcgaatcaacctacaccatcaccattgagcgcctgccggtgctggaaaacccggtgaagaccgccatctcctgctttacctggaccgacgccatcgcgcgcggtccagagatgaccgccagccgcgatggcgtacgcggaaaagagaagctggatgtgccgatcaagttcctgtggaactacgcgggcaacaccatcatcaaccagcactccgacatcaataagacccacgaaattctgcaggatgaaagcaagtgcgaaaccattgtggttatcgacaactttatgacctcgtcggcgaaatacgccgacctgctgctgcccgacctgatgaccgttgagcaggaggatatcattcctaacgattacgccggcaatatgggctatctgatttttattcagcccgccacctcagcgaagttcgaacgcaaaccgatttactggatcctaagcgaagtggcgaaacgactcggcgacgacgtgcatcaacgttttaccgagggacgtacccaggaacagtggctgcagtatctgtacgccaaaatggtggcgaaagatccggcgctgccggcctacgaggatctgaagcgaatgggcatctacaagcgcaaagacccgaacggccacttcgtcgcctatcgcgacttccggcgcgatcctgaagcgcatccgctcaaaaccccgtccggcaaaattgaaatctactccagccgactcgcagagattgccgcccgctggcagctggagaaagacgaagttatcagcccgctgccggtctacgcctccacatttgaaggctgggacgatccgctgcgcagccagtatccgctgcagctgtttggtttccactataaagcgcgcacccattccagctacggcaacgttgatgtattacaagcggcctgtcgccaggaagtatggatcaatccgcttgacgcggaaaaacgcgggattaaaaacggcgatatggtgcgcgtttttaatcagcgcggcgaagtccgtcttccggcgaaagtgacgccacgcatcatgccgggggtctcggcgatgggccagggcgcctggcacgacgccaatatgaccggagatcggatcgaccatggcgcctgcatgaataccctgaccacccaccgcccgtcgccgctggcgaaggggaatccacagcataccaacctggtcgatatcgagaaggtttaa

SEQ ID NO: 248281 - DNA, 2205 bp, Klebsiella pneumoniae; identical to SEQ ID NO: 229473

SEQ ID NO: 248282 - DNA, 822 bp, Klebsiella pneumoniae
atgcgtttagcatcccgatttggacttactcattccattcgtcaggaacgcccactgactaacgatgaattagtcaaggttgtaccttctgtgttttcagaagaaaagcataattcacgtagtgatcgctatacctatattccaaccattacactgctggataaattacgtgaagaaggtttccagccattttttgcctgtcagtcacgagtaagggatgaggataaacgggggcatactaagcatatggtaagacttcgccgtgaaggggccaataaaggaacagaagtacccgaaatcattcttcttaactcgcatgatggatcgtccagttatcaaatgatcccgggtatgttccgttttgtatgcacaaatggccttgtgtgcggtacgtcgtttggtgagattcgtgtacctcataaaggtgatattgtgggaagggttatcgaaggtgcttacgaagttctgggaattttcgataaaataactgaaggcgttgatgtcatgaagtctattaccttaaccaaggaagaacagcgtctgtttggacaagctgcattaacctaccgatatgaagatgaaaataaatctccggtcagtattgaacagataattcatccgcgccgttatgaagataaaaaatatgacatctggactacatatcaaagggtccaggaaaatctgattaaaggcggtttgcctggccgaactgaaaaagggaaaagaacaacaacccggccagtaaaagcaattgatggtgatgtcaaactcaataaggcattgtggttaattgcggagaaattccgcactcttaaaggctaa

SEQ ID NO: 248283 - DNA, 405 bp, Klebsiella pneumoniae; identical to SEQ ID NO: 111143

SEQ ID NO: 248284 - DNA, 858 bp, Klebsiella pneumoniae
gtgactgatatccttcaaaaccactattcacaggttaaaaacccgaatccggtattcacgccgcgtgaagggaaaaagaccctgccgttctgccgtaagctgatggcgaaagccgaaggcttcacgtcccgttttgatttttccattcatgtggcgtttttgcgttcgctgggtaagcggcacaggatgccacccctgttgcgccggcgtgcaattgacgcgctactgcaggcaatgtgttttcactatgatccgctggccaatcgcgtgcagcgctcgattaccaatatggccatcgagtgtggactggccaccgagtccaggagcggcaacctgtcagtcagccgtgccacccgggcgctgaagtttctggccgagctggggctcatcacctatcagactgaatatgacccgcagatcggctgtaacatcccgaccgatatcaccttcaccccggctctgttttccgcgcttgacgtttctgaggtggctgtggtggccgcgcgccgcagccgtgtggagtgggaaaacctgcagcgcaaaaagcagaaactgaaacccctggagatggacgaactgatcgcaaaagcgtggcggtttgtgcgtgagcgttttcgcagctatcaggctgagcgtaaatctcacggccgtaagcgggatactgcacggcgggatgcatcacggcagcgtcatgacatcgagacgcgcgtgcgtcagcaactgacccgcgaatacgccaccggccgcttcaggggcgataaagaagcgctgaagcgtgaggttgagcgccgtgtgcaggagcgcatgctgctgtcgcgcgggaacaactacacgcggctggccactgcccccctataa

SEQ ID NO: 248285 - DNA, 210 bp, Klebsiella pneumoniae; identical to SEQ ID NO: 226503

SEQ ID NO: 248286 - DNA, 348 bp, Klebsiella pneumoniae
gtggacctgcgcgactggaaagtggtgctgttcatgcaggggcactgtccctactgtcataaatttgacccggtgctgaaacagctggccggacagtatggcttctccgtgttttcttacaccattgacggacagggtgatgatgcgtttcctgaagcgctgccggcgcctcctgacgtgatgcagacctttttcccgaatatcccggtggccaccccgaccacgtttctggtgaacgtaaacacgctggcagcgtacccgatcctgcagggcgccacggatgcgcagggctttatggccagagtggatacggtatttcagatgatggagaacccgaataatggataa

SEQ ID NO: 248287 - DNA, 162 bp, Klebsiella pneumoniae; identical to SEQ ID NO: 196661

SEQ ID NO: 248288 - DNA, 1041 bp, Klebsiella pneumoniae
atggcatcagatattcaaaagattttagataatcactcaaaggttgttgaagagggctatatttccacaggtgagctgaagtatgacaattacgcagtaaccacattacgaggcggagtgggaaaatccactctttcattcaacttagcttatgagatttcacgtaaaaattctcttttagttgcagatctgtgtgcgcagacaaatttgacggagaatttactacgtggacacgattataaagttactgttctcgatgcgcttcagcccgcactattaggtgctgcctttggtgatgttcctgatgacatttcatataaggtaagtaatcattgcgattcatttaaaggggggaaactatcttatgtcatcccaggaagcgctgagttattcgcgttcccttcaactttataccagcaattgcagatagcaaactcgcaaaacaacacaaccgctgtaaataacctattggaaattctagataaagttttatctaaagaaaagaaagagaaaggtttagataaagtactaatggacactagcccattctatgcgggtggtactcacctatcatggtgtgctgcagatgctgtgatcattcctgtacgcgtcgatgaacactctattgagtcactgaaattaactttggacttactttctaacaaagggaaagatttccagatctggaatgagagggctggaggaaggaaagcaccaaaagtagcagccatcgtaatgactatggcaggtgcaaagagccagaagaaatttacacctgatagtgcttcacggatgtacattgagagagcacttgcagttgcagaaaaatatccacacctttttgactttgacgacccaagagattcttttgctataaccgatgattttatgtcaactggacgtattagtggagcaaagggaatacctattgccgaattgcgtgtaggggcattccactcggtagaaggtaaaagattgcaagttaacagctcagcagaaagatacaaacgagagttgaaatatctagttagcctactttaa

SEQ ID NO: 248289 - DNA, 291 bp, Klebsiella pneumoniae
atggctgatttacgcaaagctgctcgcggtcgcgaatgtcaggttcgtatcccgggcgtctgcaacggcaactctgaaaccacggtattggcccatattcgcattgctggattatgcgggaccggtattaagccgcctgatctgatcgccgctatcgcctgttcatcctgtcacgatgaaattgaccgccgcacgcgcttggtagatgcggagtatgcgaaagagtgcgcgctggaaggtatggcacgcacacaggttatctgggtgaaagaggggttggtgaaagcatga

SEQ ID NO: 248290 - DNA, 828 bp, Klebsiella pneumoniae
atgggaagtattcttgaacttcatggtgctcaatttacggatgaacggcttccgaaactgagagcatatcctggtttaactgacggctctctggctttacttgatggtagtgaacttgcctcatttgatttcagtgcagttgtcactggtatacctaatcttgctaagagtgaggcaacgcgcttaaccgggaaagtagagtcagatcttgtgtttacttggtcaaacactcttggccttacaggttctacccctgaagcgaaatttgagagaacccctaagggtgggctacatgggattttatctcaacttaatcaggtttctgggcatagagctcgtttccagtgtccagggttaatggactacatatcgacgcatcagcatgaccataaatttgctctgttcatgcattaccaagttactcgggcaggagaaggtgctaatgctgcttcagctacggatgcgctgatttcatcacggacatctccctctaccaacagactgatcgttttccgtttacccaatactgttcagtcttcaccagctgtcattggcctacaatcggataagaacggcactgattttacttctagtgtgtattatcaagatctaccggtatggggcgcagcgtccgggtttggtgcgttagttaacaatacttgtcgttcatgggttatgtaccgcttacatttcgttgatattgatgcatcagggctcacctatgctgagttgctcgcatcagagcaacagatattcaatattaactttggcgctaatggtaaatatgccggggatacaatcccgaccagcccaacactcttgccttag

SEQ ID NO: 248291 - DNA, 2883 bp, Klebsiella pneumoniae
atggctaatttacctgaaactcctgcatgggaatccggcattcatcaactcgaagaatcggaaagagccaaagcaggccccggcggtattttaaatattcaggcagcccaacttgcgaatcgaacccagtttctgagaggggaattaaatgcatataatggactcataaaatctggtgaattacctttcgctgacctggatactgcgcaagccgcaattgtagcgggtaaaatccctgaaggtagcttgttttcttttcgctcatcaaatccagcctggtgggcagaagaagggaaaaatattggtggggtggcagtaaaaacagggaaggttattctttcagacttgctacaaattgttactgtagaagcctcatcagaagatagtgacggaacgattgcaggtttggcatcgacaaaagattctcagtatttttttgtcgttaataccacagataaaacagcaccatttaatattttcagaaataacaatggtgttgcagagtctgtatcagacataattggatattccattatccaaggtcttattgactctggatttattctaaagcctatggacccatccactggctatgtattgggatgcattgacccgatatcgcgcagaatggcttggggtatcactatccatggagaggtgattgcaccattactaaaacttgaagatggttctattcatgtcgataaattgacgccagaattacagcaactggtcccggtaatgttggaccctgcgacaggctatgttttcgggcttcaggatcctgtaactacacgttttgcgatgctggtggcaattaatggcgctataacaatgccgctattgaatataccggacaagagtgttgatgctccggccctgtcggatagcctaagtaatcttattcctgttcaattagacccctctacaggttatgtttttggcctacgagatcctattacactgagattcgcgctgcttgtttccgtcacaggggaaacaacgatcccgttacttgttctgggtaaaaaaatcatcaccatggataacctggctgatgatgtgactgttaattttcttcctcaacctgcagatattgttgatgccagacccgaaccgttgagggcggctatagctgaagtgtctgtgcgtaccgtgcgccgtgcaggtcatggatgggctccatttccatcacatctctgtcgttctttatcaggggtcaacacatctggcgtcgcgctccagttccgacgaacagctggtctgcagtttaccgggaaagcatttgtgggtagctatagtccaggtattctgcaatctaaagtcaagaaaggtcgattcacaactactccagtaaatacaccatcgggaacttttaatgctggtgactactacacatatgaggtatacgccgggaataataacttgtctgagacgacaccagggacatggaatggacagaatattttccttggcgaccttctcgtgtatgacgggtctacatgggcgattcaacagtcaccaggtcgtggtgcacaacgtgccccggatatgtatttcgtggtcgattccgcaggctggttcgacggaatggaggtggctgcaggcgataagcttattttcctgactaaccagaccgctggtggggcccgcctgacaccgacatgggttaatgttacggctacctctgatcggttgttctatgccggcgagtttacaccctcatcattaccggttattccggttattaatggtgtttaccaggcatcggccgcaggcacaattggtgttgatagctatattacgggcgattatgcctggtttaatggttcggaatggattcgaatcccaaatgatactgctgtttttgatgtggctgcaggagggtctgtttccctgcgttgccattacaattcggatgaatgggaagtccgcaggaccgataaaaatgacgttcaggttgccgttcgcatgaaaggccaagtaatgagccagatccaggaagtacttggagaaaagcaattgctcatcagtgactcaatgttcggtcagggtaataccggcaatcagatcattactgccacgggtatccctggagaggttcgctcctatggcggcgcaacatcggaacaagtcctcggtatgtataaaaaagaaattctttcctggggtgataactatcgagcacagactatcgtcatgtggcacggtcagaataaccagccaacaactgacctgaatgctgccgccatcagagaggtcactatgcagatggcccaactggcaggggcccgggacattaaagtattgtttttatcgattcttggtcaacgcatcatgacgtggaatggttcacgaattgttgtccagcagcatgaggatcaatttgcgaataccggagctctctacgatttgtcgacttggtataaaaaattaatgcccggtcgttatgctatttgctatgaaatattactttccgcagcaacagatgctgtcgaccccacttttcctggaatgactgaaaaagaagtcgctgcaaaattcggtgtattaccctggtcatttttcaacgggtcatcattaacgggtgttacaactaaccaattgctctacaagggcacctggacaggcactacgttacctactggcggtagtcatggagattattatcttcgtactgatacaacaaatattggcaatgttatttacaacactaatggcatctggattgagaacactattgaccggactcacctgagtctcgctggtggtgctgctttaactcatggcggtgagggttttgatcttggtagcggatataacgcgataccttcacgcgacggcgtcgcagctatccttcttaataatcatttttaccgataa

SEQ ID NO: 248292 - DNA, 213 bp, Klebsiella pneumoniae
atgagcaggcgtggcaactgctgggataatgtggtggccgaatcgttcttcagttcgctgaaaaaagagcggatcagaaaacgcatctataaaacccgggatctggcccgggccgatatcttcgattacattgaagtgttctacaaccgggcccggcgccacagccacctcggcggcgtcagtccggaggccttcgaacaggcctcatcgtga

SEQ ID NO: 248293 - DNA, 3606 bp, Klebsiella pneumoniae
atggcaaccctgcgtgaacttattattaaagtttctgctaactctcagtcattccagaccgagattgcccgcgcttcacgcatggggcaggattattataaaaccatgcagaatggtggtcgtcaggccgcagtcgcagcaaaggaaagccaaaaggctctttccgagttaacggatggatttgcttctgctggtcgggccgctacggcagcagcagctgcatttgctactggtaaattagttcaaattgctgaccagtggaactccgtaaacgcaagacttaaacaggcttcggtttcctcaaacgatttcactttatctcagactcgtttaatggcgataagccagagtacgggtactgcttttactgataacgccaatttattttcacgcgctgctgcatctatgcgtgaatttggctatagctctgatgaagtgcttaaaataactgaggctgtatccacgggtctcaagctctctggtgcaagcacagaagaatctagttctgttattacccagtttagccaggcgctcgcacagggggttttgcgtggcgaagagtttaatgccgttaacgaagctggggatcgtgtcatccgtgccctggctgctggtatgggggttgcccgaaaagaccttaaagcgatggctgaccaggggcaactcacgattgataaagtcgtaccagcattaatcagccagttaggtgtgttacagggggagttttcctcgttaccgccgacagtgtccggctcaatgcaaaaagtcactaactcgtttatggcatgggtcggtggggtaaaccaggcgactggtgcaacagacgcactttctggcggtcttgatgggctggcaggtacgctggattctcttacatcttctgctgtcagcggggccctcagtgacgtagcagataatatgtcactggttaccaccgccgcaggtggtctggttggaattggattagcacggtatcttggcgggattgttaccagcgcaagtagtgctactggcgcacttatctcagcggcaaaatctgaggtagctcttgcagtcgctcaggaaaaagccgcgcaatcttctgttgctgcttcccgcgccgccgtttatcgcgcccagcaagcccttcagagtgctaaaagtgcagatgttcaggctgcacaacaggagagggttacagccgcagaagcaagggttaccgcggcacagggtcgattgactacagccctcgccaccgggacagctgcagaaaaagtacgagcacgaacagctctggagcgggctcaggctgggcttgtggctgcaaaaaatgccgacgcacaggctattgcagaaagaaaattggctgcggctcagtccgctcttggtcgtaatattgcaggtcgggtctctgcccaaaataaccttaacagcgttacctctgtcggcacccggttgatgagcggcgctcttggcctgatcggtggtataccagggttagttatgctgggtgctggtgcatggtacgctgtttatcagaatcaggaacaggcccgtaaatcagctcaggagtacgctagcactattcaggaggttagcgacagatctaaaacgatgacgctaactgaggcctctgataacgaagataaggcgcgcaaatcactaaaagagcaaaatcgacttatatcggaacaatctagcaaggttaaagcgttaaaagaagatatcgccgggtatcaatatatgctcgccaacagggggccaactacgagtggtggttttatgataaaccacctcacaagcgtagaggcagcaacgaaaggattggcctctgcaactgaatcattggctgtagagcaggagcgcttaacgcaactgcaggataaagcgcaggaaattcaacgggtgcttgagggtattgagcatcgtcgagtcgttcttattcgccagcaagccgctgaacagaatgctgcctatcaatctttgataatgatgaatggtcagcatacggaatttaaccgtctccttgggctaggaaataatttactgatggcccggcagggattggttaacgtgccaatgcgaatgcctcaggctgatttaacatcacagcaagccaatgctctggaaaaaagccgtcaggaccttgaactatcaaagcttaaaggagaagcaagggagatagcccggttaggttatgccgctgacgaattagggctcaaggatgaacctcagtttaaaactaaccgcgatctgtatattaatcaggggttggcgaaatggcgaaatgatgaatccaataaacccacccggaaagcgccaaaaagcgaagaggttaaagcggctgaaaagacagaagacgtttacaagcgccttattaaacagcagcaggaacaaattgccctgggaagccagaataccgaactggctaaaatgaaatatcaggtgacgcagggggagttagcctctctagagcaagccaaaaaagaaataatcctgcaaaatgctgcactaatcgatcagaaaaacattgctgaacagttgcaaacgttccgtgaggggctggctgacagtaatgccgctgcgcgtgaccgggggaatatagattttcttggcgccgggatgggagataaagcccgcgaccgcatgaaggaaatggtggatattcgcactgacttccgtaagcagcaggatgagcttcagcgtgactttaacaagaagcaaatttctgaagaccagtacaaacagcaaacggaagctctgcaggcggcgcttgctgaacggttagcgattcaggaggactactacaaaaagaccgatgaacagcagtcagactggcgcacggggatcagcgattccctgatgaactatgccgatcaggcttctgatctgagctcaatggctgccactgcaaccagcgagattctggatgccaccactaactctatctccaacaacctgacaaacgtcctgacaggcgctgcttcgtttaaagatgggatgtcgaatattttttcttccctgggcgaaacggtgattaagacgctgatccagatggcaacacaggcgttgatcactaaagcgattatggcgtcatttggcggcggagcgggtgggttgttcggtagtctttttggcggtgccagcggtgcggcaagtagtggtaccgctattcaaagcgcgggagctaatttttcatttaacgctctcggaggcgtttacgattctccgtcactttctgcctacagcaatggtgtttacagcactccccaatattttgcgtttgcgaaaggggcaggtgtattcggcgaggccgggcccgaagccatcatgccgcttacccgtggcgctgatggttcgctgggggttcgtgcggttggacgtgagtcaccggcagtccaggatgctgcaaggcagattgaggcgcaaccacgaatcgcggtcagtgttgatgcccgtagcacgtttagcgggcaacctgacgacgcaacaatgctggcagtagatcgaaggaatgctgcactggagcgacgcatcatcaacacactcactgctgaagtaaataacccccagaagaaattcggacgcgccatctactccaatctacagcccaaaaaaccaagatag

SEQ ID NO: 248294 - DNA, 1650 bp, Klebsiella pneumoniae
atgagcacatataaaacgaaaaatcctttaggttccgccgccgtaaaggacctgtacgataacgctgaaaacgtggataaattcgttaacgacaggacaaaagaggagttagaggaccggttaggtgtgcttcgcaaaacctggcacggcatggagatgatcttcagccgctttatcgactacatcactggtcgcggcgagcaggcagttgcagctatcggctggcaggagcttggcaactgggctgttggtctggctgtcgataatcgccagcagatcgtctactacaatggctcctggtacaaataccttggtgagcttgaacacgtcattgccggagattctcctgagaacgatggcggtgtgtggtcggctgaaaaccctacggggaaatggtctaacatcggtgatgcggctcttcgctcaaacctgggttcaggcgaagggacctcactggtcgcaaagttaggtaataaacctcttgtcgctatcagttattacaaaaatcaggggctgtccgaccaggatgctgtacaggctgcttttgatgaatccagcaacatcacttttgatgccaatgtcactctaaccagcgcgatagaatttgatcgctccgagccgtgcactgttattttttccccgggaattactgtcacgaataccaattttctgccgagactaacaacacacccgaaccacaaaatatcaggcactacgttcagaacaaaacaatgtagcgctgtgaatatcgatggaacgtcggttaagcaccagactatggctgttgaaatggctgtccacgatacgctatccagcggtccgaactatgagccgttcgttgctctgatggccgcaatagagtcattcaactgtgagcgccagaaactgtggggcatgaacatactgactaatgcccacaacctaaactctggtgatgaggtgtacgggattgagattgactgcaatgttgatggctcgtttgacggggctggaaactattgtggggtttacatcgcgggtgctggggacttatcggcatcatccggttctgatggcattcgcgttcagcgattacgagatggtgtttataaatggcaatacggtcagcgtatttttgattcagtgaccgggctggggatatacgacgcgagtaactattccatcttcgcttcaggtatagcccctattgcccggcggcgcgatacgcaatctggtgtatggtcgtttatccactcagtttcagcatctgtaattccgtggggagtggatgattatggcgatacgtattcccggcggctgtatttgggtacgggaaacggaaaagcaaaaaacagggtaaacctcgacggtggtgtgaaattccataccacatcctcagctgtcgcgtggggggcaataagtgctggcgggtattctgaaaaagatgtgacgacactgtttggcatttctattgctgactggacgaactacacactggacgtgacgccagtcggatacgccgggtcaatgcctgttgtggctgttcaggtttatatcaacagtgcgaaaacgcaggcgtacgttcgaatcatcaatatcagcggcgtggctttgtccgaatgtaatgtcggactaaatgccaaactatgtggccactcaccaacaaactaa

SEQ ID NO: 248295 - DNA, 408 bp, Klebsiella pneumoniae; identical to SEQ ID NO: 120048

SEQ ID NO: 248296 - DNA, 1035 bp, Klebsiella pneumoniae
  misc_feature (1020)..(1029): n is a, c, g, or t
atgtttaaaattcttcgtgtcattccttcaatggatccgcaaaagggaggtccatctgaaggtatcagacagcttcagcaagagatacataggcaaggattaaatataaagtgcgatatagtatgcatggatgatttatcagaagatgttaaagatgttgagtatgctagtatttatgcggtaggtaaaggtaaaggtgtatattcatattcagagagtttgaaagattggttagagaaaaatgtccaaaaatatgattttgtaataatccatggtatctggcaatatcatagctatatcgctagtaaattatgtattaaaaacagcattccgtattttttatatactcatggaatgcttgacccttggtttaaaaaaaattatccaataaagcatatcaaaaaaatgatttattggatgttaattgagcgaaaggtcgtgaacaatgcggaggctgtaatatttacaagtgaagaggaaaaaatactagtacgtcagtcattcccactatatgaaccaaaagaatttgtaactgcatacggaacttctggcagtattgtcgataaagagattgcaaggagtgcatttaatgaaaaattcccttcgctaaaaggtaaaaaaatacttctttatatggggagaattcatgaaaaaaaaggatgtgatatactaataaattcatatgcaaaaattagtaaagaacataatgactatcatttgttcattgctgggccggatacgtctgcatacgcaaaaactctgaaagatcttgtgtcctctttaaatttaaatgacaaagttacttggggtggaatgcttagcggtgatgtaaaatggggcgcttattattcaagtgagattttttgcttagcatcacaccaagaaaactttggaatagtcgttgcagaagccttatcatgtgaggttcctgttgttactactacgaaagtcaatatctggcgagaaatagaacgcgccgatgctggcatgattgcaatagataatgatgattcttttacnnnnnnnnnntactga

SEQ ID NO: 248297 - DNA, 360 bp, Klebsiella pneumoniae; identical to SEQ ID NO: 171758

SEQ ID NO: 248298 - DNA, 141 bp, Klebsiella pneumoniae; identical to SEQ ID NO: 36145

SEQ ID NO: 248299 - DNA, 141 bp, Klebsiella pneumoniae; identical to SEQ ID NO: 36145

SEQ ID NO: 248300 - DNA, 141 bp, Klebsiella pneumoniae; identical to SEQ ID NO: 36145

SEQ ID NO: 248301 - DNA, 888 bp, Klebsiella pneumoniae
atggctcgtgattcgctttacccagtgagcgttaaagctggaaaaccgatccttggaatgctacctacaggatggcaaaagttatcattagaaaagtgcttaaatatagaggcaagaaaggcatatatacaagataatcaagagtatgacttagttacagtaaagcgctccagaggtggcgtaataagacgtgagcatcttaaaggaaaagatatctccgtaaaaagtcaattctatattaaagaaggcgactttctcatatcaaaacgacaaattgtgcacggtgcttgcggtcttgtacctaaagaactttctggctcaattgtatcgaatgaatattgtgtgcttacagggaagtccggtttttatcttccttatatggaatttctatcggagtctctatatttccagcaaacctgcttccactctagcattggtgtgcacatagagaaaatgatttttaagttagatagttggtttaagtggccatttaatatccccccactgtctgaacaaaagagaatcgttaaaatcctgtcaacctgggataaggcgatttcggtgacggaaaagctgctcgccaatagtcagcagcagaaaaaagccctgatgcagcaattagttaccgggaagaaacgcttgctggatgagaatggggtgaggtttagtggggagtggtgtacgtgcactttgtctgaagtagcacatattattatgggatcatcacctaaatccgaagcctacaacgataatggcttaggtttgccattaatacagggtaatgccgatataaagtgccgagtttcatgtcccagagtttatacgtctgacattacgaaagaatgtactcctggagatattcttctaagtgtcggctttgttgaataa

SEQ ID NO: 248302 - DNA, 204 bp, Klebsiella pneumoniae; identical to SEQ ID NO: 92423

SEQ ID NO: 248303 - DNA, 423 bp, Klebsiella pneumoniae
atggcaatcgaagaggctgaaaaactgttcgaccatccacttaagcagtacctcttattccgtgagtttgaagaacaggttgaagcccgtaagctcagtgatatcccggatgctttggcggtaaacaagcatgctcaggcatattacggtgtatttaaaaaagagctgcctgaggtttttgcgataaacgacattcaggtgcatgagaagtggacgaagctggcttttgaagtagacagtatcatcgtcaaagcagtggcagaaaactccctgaaccctcaggatatcgagaaagcagtcaagacaaatctcttaccgctgttgtttacgacctgccgggaaataggtgccggaatgaatcaggtaaaccgtattgtggaaactatcatccagatactacgcgttggtttgatgaaatcatga

SEQ ID NO: 248304 - DNA, 855 bp, Klebsiella pneumoniae
atgttcggagagcgtcaccagcaccggcaggaaggcgatcagggtcatcaccgcgttgataaagctcacgcccatatcttcgagggtggaagcaaaacgcatggtatcttcctgcacacgctgcgcggcgccttcgatatggcgcagatgctgccagtgggccatatagtgctcgttcatcgccgtgcgccagcggaagacgtagtggctgacgaagaagttgttcatcacgccaataatcaccgcgatgatcgcgatgccgagaaagacgccgatttcctgataaaactggttgatgctgaccttatgcggggtggccagcgcgctctggatcaggtcgtagaacggcgcataccaggcgttgatcgccaccccgacttccaccagaaaccaggtgacgaagatgatgagcgaggtgccgagaatcgaccagtactgccagcggtgcgggcagtagacaaaccagaacagcgcgaacacgccgacgcaaaacagatagtaagcgtagaacaccagatagttgagcgaccagaagcgcgccgcgctgatcgccacattttgcgatgccccggtgacccgcagcagccagtcgccgccgcccgcctgccaaaagatcacggccagcagcgaccagataaaggcagaaataaaaaacggccccggtttggggaaaaaagatttaaacatcattgtctcctgctaacttcttatcgttctgctattgctgtgtacgacgcatacgtcggccgccgcgtggatgagccctcgcgggacagacgaatgataagaccggatatcaacagcttagttctgctgccatgcatgcagaattgtttctgtgggtttcacctgtaa

SEQ ID NO: 248305 - DNA, 660 bp, Klebsiella pneumoniae; identical to SEQ ID NO: 229470

SEQ ID NO: 248306 - DNA, 285 bp, Klebsiella pneumoniae; identical to SEQ ID NO: 137551

SEQ ID NO: 248307 - DNA, 168 bp, Klebsiella pneumoniae
atgcatactaacggacgaggggggcaggatgatgcgaaggatgcttttaaggcctggggtgacctactggataaaaacgagagccatcaggattccaagaaagaacaacctgaggcttctctgattaagttttattataacaagtcaacgatgagcgatctggactga

SEQ ID NO: 248308 - DNA, 489 bp, Klebsiella pneumoniae
atgcgtaacggaaaaatcctcggctgggcatggggggccggttttgttgacgggattggccagggcatggaacgcgcttcacagccggcagttggcctgggggcaaccgcatctgttggcgccggtgatgttctgaaaatgggtgtcggcggtggtgcatctaaagctgcgcagacgctgagcgagtactacatcaaaagggctgagcagtatcacccggtcattccgattggtgccggtaacgaagtgactgtcgtgttccaggatggatttcagctgaaaaccatcgaagagctggaagcggaaaagaacgggcaacagcaggctcagaatcaggaggcggggccggcaccgcaggctgatgcccatcatcagtcaggcggcggtatgaacggattcaatactgacgagatgctgaagaagctgggcaaacttgatccgcgggagttctctccgggcgcagcgccgcagggggaaaataatggctaa

SEQ ID NO: 248309 - DNA, 1944 bp, Klebsiella pneumoniae
gtgaccggaaccgcaagccaactgcttggtgtctccttactcaatacggtggatgtctccctgctggcggcgaactccacgaagttctcggttagcgaaggaacaactgaggatgtgacgatagcggtcactggttcaacgttgctgagtctgcagtcagtactggcactggtggggcaactggtgggcggcgcttcatccattactgccgatctgtcgatagtgaataccgacaccggtgaggtggtgcagattattccggatgctgtgagcctgacgccgtctctggcgctgctcaatctggtttactccggcagcgcgaccttcagcgacctgccggccgggaactacgcggtggtggtttcttcaccgcaggcttccggcggtctggccgcagtggttgatgaactggcgtcagcaaatctcctgtcggttgcccaggcgacaatcacggattctacgcagtacacctcgacggcaattgccggcaatgtgctggttgcggatgcagggggtgatgtagcagacaccggtgatggcattacggtaagcaaaatcgcctccagcgtgcagaccacgccgcttgatgtgacggctgcaggtgttgtgataaatggtctttacggtcagctgacgatccatgcggacggcagctatacctacaaggcgactggcgatgcggatgctgttggccaggccgatatctttacctacacgatagtggatgcggatggtgatacggcgacggctacgctgacgattaatatcgtggcaggaagtgatatcggtgagtcggatgctgatgcagattccgacagcgactccgattctgacagcgactctgactccgacagcgattcggattctgacagcgactctgactcggacagcgattcggactctgacagtgactccgattctgacagtgattcggactctgacagtgattccgactctgacagcgattcggattctgacagcgactctgactcggacagcgattcggattccgacagcgactcggattctgacagcgactccgactctgacagcgactccgactctgacagcgactcggattctgacagcgattcggattccgacagcgactctgactctgacagcgattcggactctgacagtgactccgattccgacagtgattcggactcggacaggactccgactccgactccgacagcgattcggactctgacagcgattccgattctgacagtgattcggactctgacagcgactcggattctgacagtgactcggactctgacagcgattccgactccgacagcgactcggactccgacagcgactcggactcagacagcgattcggattccgacagcgattcggactcggacagcgactcggattctgacagcgactctgactcggacagcgactctgactctgacagcgactcggattctgacagtgattccgattccgacagtgattccgactccgacagcgactcggactctgacagcgattcggactctgacagtgactccgattcggacagcgactctgactccgacagcgacagtgattcggactctgacagcgattcggactctgacagcgattcggactccgacagcgattcggactccgacagtgactccgattccgacagcgattcggatgctgacagtgattcggactcggactctgacagcgattctgactctgacagtgactcggactccgacagcgactcggattcggacagcgactcggattcggacagcgattctgactctgacagcgactccgattcggacagcgactcggattcggacagtgattcggattccgttgaggcaatacctgataccaatagttctgaggttgtgcagcagtacggcaatcttaatggtactgaaggcaatctctcgcaactggttggcgtctcgctgctga

SEQ ID NO: 248310 - DNA, 879 bp, Klebsiella pneumoniae
atgaagattattattctgggcgccggccaggtcggcggcacgctggcggaaaacctcgtcggcgagaacaatgatattacgctggttgataccaatggcgaccgtctgcgcagcctgcaggataagttcgacctgcgtgtcgtccaggggcatggctctcaccctcgcgtactgcgtgaggcgggggccgatgatgccgatatgctggtagcggtcactagttcggacgaaaccaacatggtggcctgccaggtcgcttactcattgttcaatacgccaaaccgcatagcgcgtattcgtgcgcctgattacgttcgtgatgcggaaaagctcttcaactctgaagcggtacccatcgatcacttaatcgctccggaacaactggtcatcgacaacatccaccgtctgatcgaatatcccggcgcgctgcaggtcgtgaacttcgcagaaggaaaagtcagtctcgcggtagtaaaagcctattatggtggcccgctggtggggaatgccttatccactatgcgggagcatatgccgcatatcgatacgcgcgtggccgccattttccgccacgatcgccccatccgcccgcagggctcgacgattgtcgaggccggagatgaagtcttctttattgccgcctcgcagcatattcgcgcggtcatgagcgaactgcagcgactggaaaagccgtataagcgtattatgctggtcggcgggggcaatattggcgcgggtctggcccataagctggaaaaagattacagcgttaagcttatcgaacgtaatcagcagcgagccgctgagctggcggaaaagctgcagcatactatcgtcttctacggggatgcatcggaccaggagctgttggctgaatag

SEQ ID NO: 248311 - DNA, 486 bp, Klebsiella pneumoniae
gtggacctgtttattgccgtcactaacgacgacgaagccaatattatgtcggctatgttggccaagcgaatgggcgcgaaaaaagtgatggtgctaatccagcgcagagcctacgtggatctggtccagggtagcgtcatcgatattgcgatttcgcctcagcaggccacaatttccgcactcctcagtcatgtccgtaaagccgatattgtcggcgtctcctccttgcgccgcggcgttgcagaagcgatcgaggcagtcgcgcacggcgatgagagcacctcccgggtagtcgggcgttcgatcgatgagatcaaacttccaccgggcacgatcatcggcgccgtcgtgcggggcaatgacgtgatgatcgccaataataatctacggatcgagcagggcgaccatgtgatcatgtttttgaccgataagaagtttatttccgatgtcgaaaggctgttccagccaagtcctttcttcctgtaa

SEQ ID NO: 248312 - DNA, 507 bp, Klebsiella pneumoniae
atgaaattaacccaaaaaagacttaaggatatgcttcgatacgagccagagaccgggaatttctattggtcaaaccctaccgcgcacaggatgcacaatggcgagctggcgggctttatcgattacaacgggtacgtttacataaaagttgacagcaaacggtattccgcccatcgcttggcttggctttatgttcacggtcaattcccctctgagatgattgatcacatcaacaccattcgatctgacaatcgcatttcaaatttaagaaaagcaactcgctcgcagaacatgatgaatcaggcaaccagaaaaaacagcaattctggggttaaaggagttggctgggataagaaaagccaaaaatggcgagcaagatgccaagttggcggcataaggaaaagtatcggtttctttgattccattgaagaggctaaaaattttttggtcatctacagaaaccaagtgcatggagagtttgctaatcatggaggacccgcagcatga

SEQ ID NO: 248313 - DNA, 138 bp, Klebsiella pneumoniae
atgttgatactcttcattctcctgtcgatctggctctgtcgactgtcggagaagcctggctggtttaatgtcagccatattatctcaatgctggagatcgaagatgatcatatggcacgcagcaaggggctgcgttga

SEQ ID NO: 248314 - DNA, 351 bp, Klebsiella pneumoniae
atgaccacgcctaacccacctttgaaaatcgagataccgtcagaaatggaagctgattttatcagcattcttgaacaaggtgacattgcctactcctatccggttgatgagtgcattactacgcattattttacggttaactccgctcaggacatcataattgagatagttaactctaaagccttatggggagctataggatatgcaatttgcaacctgatccaccgaaacaagcataaaaatctcaaaattgagctagatgacctgaagataagcgcatccggattcaagccagaagaccttaaaaacatcattgagctaattcaaaaaattcgcatcagcaaggattaa

SEQ ID NO: 248315 - DNA, 255 bp, Klebsiella pneumoniae
atggccagagatgaacctaaattcacgttccgcatgccaccggaagtgaaagaaaaactaaaaaatagagcaaaaattaatggtcggtcattcaacgccgaactcctgcaaatcgtgcaagacgcactggatcagccatcgccactatccggctaccgcgacgacgccgaacgccttgctgatcaacaggcagagcagtttaagaaggtcgtattcgatacgcttaaaggtatctacagcaaggataatagttag

SEQ ID NO: 248316 - DNA, 921 bp, Klebsiella pneumoniae
atgacaagtatagcaattcttgaagcagttaacacctcttacgtaccattcaacggccagcaagttttaactgctgttgccgctggagtgacttacgtagcgatgcgtcagattgtggagaacatcggcatcgactggacagggcagtcagttaagttgcgtaaaatgaaggataaattcaactgtagagatatctctatggttgccgctgacggcaaaattcgtaagcttctgtgcctccccctgaagaaactcaacggctggctgttcagcatcaaccctgagaaagtccgcgccgacatccgggacaagctgatccagtatcaggaagagtgctttaccgttctgcatgactattggactaagggaaaggctgagaacccgcgcaaaaagacaacggtagacgaaagaacgccgctccgggacgccgttaatatgttggtaagcaaaaggcatatgatgtacccggaagcctacgcaatgatccatcagcgttttaacgttgagagcattgaggatttagacgccaatcagatccccgatgctatcgagtacgttcatcgcgttgcgctggaaggtgagttcctaggtaagcaggaagagttaccggctcctaaattgaacctcccggacatcacaatggaatggtggtacagcaacaattttccgatgcgggttggcaaccttgagcgctatccgggtcataaggtatggcatgacttaaccttgacgccgccgatgatgtacggcgaagacaccaaatcacctgcactgttcctgattgagacgcttgagaagatgggcttcgatatggttggaccacgaattgaggtcgaaactatgcggatcatgcttggtaagggaaagcagagaatcagagtcatgggcgacgggcgggttaagtatcttctgtcactttga

SEQ ID NO: 248317 - DNA, 360 bp, Klebsiella pneumoniae; identical to SEQ ID NO: 207868

SEQ ID NO: 248318 - DNA, 195 bp, Klebsiella pneumoniae
atgcataatgatgggtatgaacatatacataggctagatagacaggaatttatcgcatggtatgaagaggttgtgagggtagccagggaaaataaaagcaatgttgatctgtcatacaaagggttttgggtagacttttttgatgatggacttactccagaacaagcgatcgaacaaaaaatcaaggtgggataa

SEQ ID NO: 248319 - DNA, 387 bp, Klebsiella pneumoniae
atggttaagaaaatcacattactgggcttgtctgctctttttgtttcacatgttgcttttgctgataattcgagcaactggatttccgttgcatctaatgacaccactgaatattcagctaaaaaaggtactttcaaaaacatcaaaggcgagtcatctatccttatgatgttcgataacaaaagcgataagacaatcaaatactacaaagtcagcatcaaaaatgcggattgtgacaatggcttcggaaagctgagtttcttcggtatggatgggagattagattttcagggcgactacgtagccgatggaaacagtgttggcgctggtatgggtgattttatttgtgctgtgagggttgcagcagctaacgcacaaaaaggctaa

SEQ ID NO: 248320 - DNA, 453 bp, Klebsiella pneumoniae
atgattttaaataagcttaccgcttcactgtcgccgatagtgaacgggatgctggcgctgctcgcttttgtgcaacagcaacaactgatgctggcattattagcggggctgacgatgccgttttttgcatcaatgaaaagcgatgaacggcagaaagccccgctctggaaaaaactgattatggctttttccctgctgtgttttctctccggcacgctggctccgatagttatcggatcctttcagtggctgtataaaatcagactcaccagtgataattcagcactggcgtggtcagtacggattgctttcactgtaaccgggattatttttcatattatgcttcgccgggtattcacgccggaactggacaaaataaagaaacgccttgttaaaaagaccacccttgaacgggaattacgtactgatgtccgcaccggctttgttgaataa

SEQ ID NO: 248321 - DNA, 588 bp, Klebsiella pneumoniae
atgattccattaattaattacaccatcttaactgatgcattgcacgctctgaaagaaggcaatattcgtcactgtgagtccctcggattcacgttcgaagaaatgaatgctcttaatcagttatcactcgatgaactgtttgctgtcagccgggcggcggctccctttgtttcggtcagtgtccgccatgatgttctgcatcatttattggcgcaggcccgacaggaataccgacagcagcagcagattaaccgggctatccggctgggcggttctatcgagttgctcaaccactactttggcctgacgtctaatgatgtctgccttcagcgacggttgctgggtgtcagcgtgccatatggacgtacacctgagccggatgaagagacagatgccgagatctggcggcaatggcagaagtgccgggtgggcaacctcgaatcgcctgacgcactgattgccatgatgcaggtaacggaagccctgaagcgtaaggtcgaagggctatcactcaccatggtctggaaacgtatcgcactgtgcgaacaggacgctgccgctgacaggaggacgccacatgccggatga

SEQ ID NO: 248322 - DNA, 1269 bp, Klebsiella pneumoniae
atgtcccttaccgatgcgaaaatccgcaccctcaaaccttctgataaaccctttaaagtctccgattctcacggtctgtatcttcttgtcaaaccgggcggctcacgtcactggtatctcaagtaccgtattaatggtaaagaatctcgcctcggtttaggtgcttatcctaatgtttctctgaccgacgcccggcaacagcgtgacgacatccgtaagctacttgcacagaagataaacccggcacaacagcgtctcactgaaaaggcagcccggtcaccggaaaaagccttcaaagccgtagctctgaactggcataaaagcaataaaacctggtcggaagatcacgccaatcgcgtgcttggccgtatgaacaaccacattttcccgataattggtcatctgacggtaacagaactgaaagttcagcacttcatcaatctgctgaaaggcgttgagaataaaggtttgctggaaatagcttctcgtacccgacaatacataagcagcattatgcagcacgccttacatcaggggttgattgaacacaacccggctgcagacttgaaaggcgtcaccgttccgcccatcaaacgtcactatcctgccctgcccctggaacgtctgccggaactgctgaaacgcattgacgactacaaacagggacgggagttaactcagttggcaatcatgctatctcttcatgtgtttatccgttccagtgaactgcgttttgcccgttggccggagattaatttcagaaacaggctctggactatccccgctacccgagaaacaattcccaatgttcgcaactctgggcgaggtgcaaaaatgcgtgcgcagcatattgtgccactttcccaacaggccatcgacattctcaaacagatcagagaaatctctggtgatcaggtactgatattccccagcattcgtgatccgtataaaccaatgagtgaaaatacgattaataaggctttacggctaatggattatgatactaaagaggatgtctgcggccacggattccgggcaatggcctgtagcgccctgattgagtccggcctgtggtcagaggatgccattgaaaggcagatgagtcatcaggagcgtaacagcgtgcgagcagcgtacatacataaagcggagcacctggaagcgcgtaaagcaatgatgcaatggtggtcagattatatagatgaatgcagggaaaaatatgttcccccctataattggagcagtcagaaaaataatcatgctgcctaa

SEQ ID NO: 248323 - DNA, 870 bp, Klebsiella pneumoniae
atgtcaaatgacgcgttgatgattgcaagtgctattttaaacttgcagcaggagtcgagtatttttaaagattatatttttccaaccctaactacatcaggctctgtatttcttggctatttagtggctaataattcatttaccaaacaagaaatcataaaatcagagattgaacgagtcaataatttcaacaaatttctcgttgcaatagatagtggaatgcaaacacttatagcagtgaaaaacacgtataagggaagaataaatacaaatcccatagaaagagcactgagcatcccaaaaattaattgttatttttcaccaacaccagatgtgacattggttgttttcttagcaaaggccaataaatataatgaggctggtaatttttatgaaacatggaacaatcttcctcgtataaatgctatgttagggaattttcaatatctctacgatctagttaaccatcgcaatgatgtattatctcaattgcgtgaattctatcaaattaatactctagggcaaagctttcttgatccgaattcgctaaccgctgatcaattcaaagttttgagaacagctattgatttaacagaaggtgttgtgtgtatggttgaggggttacttaaagaatattactcatgcttaaaaaatctacccaatgctgctaagttgtccataaatgaaaagttaactaaacatcatgtcgaaatattaacttacacaaacccatctcctcaatttagagattcattctcccctgtgcctaatgtggatatttcagagctagctaggttgctgggaacaacagaggatgttgcaagaagttcattcattacagggtatgaaaacgtaccgcccttgttttag

SEQ ID NO: 248324 - DNA, 1752 bp, Klebsiella pneumoniae
atgtttgattatatatcaaaacttccgttaccggttgagcaaatacctcaaggtttgaaggatttattatttattgaagacaattccaacccacagcgagatgtaactgtaactcatcgttacgaaagaaataaatatcaagatgattatgattatactcatatgatcatggccgtagttcccgaagatgatgtagcaaaactaagtgtattacgtgaatccagtgagggggtcgttacgtattctacgccatactgcacagagaaaggtgcagcttgggggatagatatttctatttcaggttatggatatattgtagcctcttgggggtctggttctcactactccttttttttggccgaagatgtctggatgaaactgggtttaaaaccaaggctcataggtgatgatgaacaaaaagtattatttgatgaagttgcttcgccttcttatggagtcgcacaaggaaatgtctcaagtgaatattatttcaaaagcaataaagatgtaaaatggacaatgaggaatgattacctcagaaaatatttatggatgaaaggttgtgtaggagtaaaagttttttacttcgaagcctttatcgaacgaaccaaagaggtcctcggtcttttatcaggttctaatcagtttgtattaaagcttccttggattgatttaaatatagttgatcatggagataggataatacttcaagcatggggaactgttcaatctgttcagccagtgctttgcgttgaattagacgtcaatacattaatatggcctgggcatacggttccgatgacaaggtcccgagccagcgattatacaaaaatcgaatacgtatatgttgatgatgctttccttactaaatatgagaaagataaaacctacgaagctattccatttttttataatgaccattatcaagtaagccctagttatggcgcgcagtgggcgtttagagactgtatcagaatcggcagaaacttagtaaaaatgcctttttatgaactttatcgaggagttccagagaaggaagtatatcatgtgtttgaatatgcgaaagatgaaaatcttattgacgttaactcattagatgttgaacatattgtttctaagacttttagatttgctagagaactagctaacattaatgagaatctagtatccctaggaaggtgtttagatgttcccctatcgggttctgatatttttgaatataataaagatgaacttgatgctgaaggcctaagaaactatcctgtactgcaaaagctttctcatgtagcctcaagcgatatgcaagaacaagatttcttagcgagatgcaagactataaacgagatcatcaataagattaaaataggtacactaaagaaactaagcattgcaatgggtgttaacgctaaggatgttgaaagattgcaaacgctgaagttattacaaggaatactaaactttacggatgtaattattgaacagaatgaggagccatcagcacttaaaaatgctaatgaacttacaatatttaattcgcctaatcttaaattgtcggctctttttattaataacgatttgagaaatgccgaagctcacgaagcagttggtaaatccatcgaacatttagccaatcttggttttgattgtgcaactttagcatcaggttatagtcatgcgttagattttatttttgacaaaataattaaaagtctaaatgatttcaatgagaatttaaataaaattcttcattaa

SEQ ID NO: 248325 - DNA, 6414 bp, Klebsiella pneumoniae
atgaatctagcagtaaggaacgtagacaaagtcagagtatcacgtgcgggacacacttttcatgaaaggtggactgcgcggcgagctcttcagcttgtgttcccgaaggataatcttttcgcgatagtgatcgaaggcctatcccctaacgaagatctaaagcttggaaaagaggcagaggatatagccgaccttgttctttattatggcgatggagatactttcgaaacctgcacagcccagcagattttgcagttcaaatacaaggaagcttccgagcccgtcacatcatcctatctgaaaaaaacgatcaagaaattcgccgcaacactgcgaaattttaaggccagcatttcggatgaagacatagtgaagaaactgtcattcgggtttgtgacgaatgcggaattttctggtgagctttgggatgctatcgcgtgcttgaaatcgggccgcgcaccggggtccaatagcgccaagaagcaacttgagtacctcaaaacctggtgcaaggaagagaaggtcgaagcggaggatattttcctgctcatcgagtttcgcgctgcaacaaatgatttgcctgcgcagaaccgattcttgcgacgaacaatcagtgattggtcggctgactcaagcggactggctgcaaggaggctgtttgcactcgtagagcttgtccgagagaagtcgcaaatcgaggggcagggcaagaattctatcaggcgtgaagatatcctcgatgctcttgaatgtgatgaggatcagttatttccagcggatacgcggtttgttgatgttggtgatgtcgttgagcgcagcgcctcgcaagatgtcaaagacgagatcgaagccagcaatcttcccgtattcctccatgctgacggcggtgttggaaaaactgtcttcatccagagcctgaccacatatctgaaagatactttcgaaatcgtggtgttcgactgtttcggaggcgggtcgtatcgctccgaagcccaagcacgtcaccttcctcgggttggccttctgcaaatcgtcaatgaactggcgacccgcggactctgcgatccactttttccaactgacagcgatcaatatgggttgatcgaaattgcccgcaagcgtttcaagcaggcgagcgagactgtcaaaagtcagtcttcactgcaaggtatactggttgttttggacgcagcagataatgcgcagttggaagccgaggcgcgaaatgaaatcgccttccctaggcttctccttgcatcgctgagcgcagaacctatcgaaggtgtgaagcttctgcttactgcgcgtcctcacaggatggaaagtgtaatcggaaagagccagacgaagcgtctcgcgctcgaaccgttcacgaaggaggaaacttggagctttcttgaaacaaggcgtaaaaatatcaccgatgtagaattttccacagttttcgcgcgttcgcaaggaaatgcccgcgtccttgagtacctcgtcgaaagttgggactcgcatgtgtccggcaatgcgccgcagagcgaaatatccgtcgaagaattgatcgcacaaaaatgcgtgaagatattccgggatctacatatggcaggctggcttgagatcgagattcgcgaattcttcgccgctttgtcgcttcttccaccgcccattccgttaactgaacttgctgaggctctgggctggtcagaaacgcaagtcaaaagcgcggcatccgatcttgcgccgatgcttgagctggtcaaacatggtgcgatttttcgcgacgaacccactgaaacctatatcaaggaccactatgcaagagaggctgcagcccagcagtccattgcacaaaggctcctaacgcgccagaaggattcaatgtacgctgcagaagcgcttccgcatttccttgtggtaattggcgacagcgacagagcttatcagcttgctggttccgatgagtttccttctatgaacgagactgaatatggacggcgaaaattgaaacttgcgcgtctttatgcggcattctcgcttgccatacgagacgacaacctagacagagtactgagcttgaccatgcaactctcacaggtagcctcggcaaatgcgaggggtgatcagtttatccggcgttctccggcactggcgacgatccttggagattctgatgcctctcgccgcctgttcaatgatcgatctggctggcgcggtgggcgcgatgcacgtctgatcgtcgcttacagtttcaccgatgaactggacgaagcgcgcattcatcaaaacagggccattgggtggataaattggcatcttaataatgatgatgagaccaaacggtttgaccgctcggggccggaggcatctgacgtcgcggcaattatgttcttgagtgtactgaagaacgagtactcgtcgtttaaccggaatatccagatatggagtttcaagtttgcactttccgtaattgaagaactgatcactctttgcgcacaacacgaagtctcgaatggaagtgaggctttgcagaccttggccaaattcgcagcatcgaaaaggtgcctgtctcttaccttgcaaatcggtctcctgtctaaggagtgtggcctttcgaaaagccaactcaaggctgtttcgctagcgacgagtttgctttcacagagttacaagaacaaagttccggaagataactccgactataaaatggagctgcagggggctattgctggtgcggcgatggactccttaatcgtgaattcaaggcaggccgcgaagtggttgctcaagttatgtcgacatcgtaggccatcatgctacgactatggcgaacgtcatggcattaacggggtttggatgtctgttcaatctgcttgcatcacgtcctggtcgtcaggcaaagagctgtcttttcatcatcttttgccggaggaagtgaaaacagggcgaaaggcaaaatctatagccaccgaagctgacttcagcgcgttccttgatagcctcatcatgacaagagactacaacagggggcgaaagggtcggaagccagagaagcgcaagcagttttccgggcatgaacgagaagatattgtgaagggcgtagcctgcgtcctgcagctagtcaaacctattgaggcagcccttctgtctaaggttacgctttcaaatgacgttctggccgaattcttgactgtctggaaatcttcgttgagacccgatgtccactggagagctgaaaccggaagagacaatgttgcgcgacacgtcggcattgggcttgccagactgctgcttcgccattgcgaaacggtcgaaaagaaagaggctgaagagctcatagaaatcattggcttgaaccggttttcgctgggtgacaagctaagcgtactcgctcttatcgctaggtgccctaatctgtccgatgtcgcaggagcgtactccgcgatgatttccagcgacatagtaaaggatgactacatcgaacaacgcggcgagtcctaccaggatttggctgcatcgttgctaccgatgagcattggtgaagcacaagagtactacgcacaaggtttggttcaacttgatcagatgggtggtaatgacttcgacttgatttactccgccttgcactacgccgcagaacagcctggagggtttgtgaagccggaggtctcgcaccggctcatgaacctttgtcagacgatcttccagcatgagccatcaaagttcggatggacactgttcggacgtgccgccgcttcatccatcggctttccggcgatatacaagttgatacgctgggatgatcaggatgttgtagattattcctacggacttccacagcttgcctgctacctcgcgaaagcgggacatcttgatgcgcgccgtgcggcggtgcttcttacaataagtgaagatcatggctggcatgagtggcaagtcggtaagggtttgcacgatctgctttcaattgccaatcctaaggaaaaggctgcaatcttctctcttgtggcagcgaagctcgatcaagagcacagttttggtgggtgggaagggctatgggagagcctgctgggctgtgtggatgccgttgaagagatcaatgacgagagtttgcgtgatcatctccaaggtcagtgggaagctgcgcggcgtaggcgcgttatcgaaaataccaaaagaaattatggtggcgcgagcgctgaatacggagtacaggagcgtagcaagaagcaggatgaacaggctcgaaacaaagccgtcgcggcgattgttgccaaatgtgactttacatctgcatcatcggtggatgcggcaattcaagaagttgaggccagtgatgggctgctgtttggtagcagaagtcgcctgctagaggaactccggactgtttgcccgtatgacaaaagggtcaagtttcttgaggcactttgtgagtctaccgagcttgaatttgatcgcgcactcgaccttataatcgaatgcgtggaggtttggggtaatagttcggtacatgcaacgaagagcgcacctgatctgatcaagaagctttttgcattcaagggatccgagcttttcgagctccactattcgggcatctccagacacatccttcgtctatccaaaatctgcggcgatccaaaattcgtgttgcaaactgttttagaaacggtagcgaaggagcgccttgagctcggaggagacgaatggcttcaactggcgaccagtctatctcgccacactgacccttcgacggctttagatgcttttgagaacttgctttccagttcagttgcaaaggttggtgatgaaatcggcgaaggtgagtatcgcgctgcgttcgcaggcaagagtgacgaaagtgacgtcctcgctgatatcatctggcatctgcttggtgatagtgatgcctttgtcagatggagtgccgcacgaagtctgaagggcatgcttgatatcggattgacagaagatatagggtgcttgcttgatcgttttgattcggttgacaactcatctctggcctcagataagcatcattttgcttttctgaatgcacagcaatggctgttgatgggattggcgcgcgcggctctgcataatggagaaaagctcaaacctctgagttcaaaaattgcagcgctagcaaagcgaaccgatttgcacgtgctcaacaaacttcatcttgcccgatgccttagacatatcgagggcgataaattcatgagttccgaactggagaaactgtgggtagatgttcaaacgcctctaaaaggtatcgttgaacgcgatggcttgccggtcaataaagaccgacgaactgattttgattttggatatgaatttgataaaaccgatattccaagcttggcaagactttttgatatatcgaaaaatgaagccagtgattacataaccgatgaagtgatcaaacgttggccaagtgcaaaaagcatttccgattttcccgaaacggttcgctaccgtcccgacgaacagttcgagacctatgctgaacacattcaacggcatgctcgcctttttgcagcaactacactcgtgaagaccttgcccgtggcacggcaatgctattatttggatggcctgaacccttggcaagaattcctacaagacgaagatgtttcgtttgatgatggctcatggttatcagatcataaagactgtgttccagaagaggctcgggcatatctactcggcgagcgcaaagaaaatcaagaaacgcttcttggcaaagagtcgctgtttgcaaaggtcggtttttcccaagactcggatgatcagttcctaccgctttacggttactggacttcaccggatggcgtacatgtccgtatagattccgcgctgattaaggggcgtggtgcggtcgggcaatgtacaaagttttcaaggtaccctgattacgatctttggttgccacgttttggttcagatggacgtgttgatcgctacactgcgaataatccgttcaacccattgatttgggaaccggagaaatatcccattggtattgacgagggtgaagagtgggccgctcggggagctaaagcccgtccaaaactagggctgtccctcaataagttgcttggactggcctccgatgatgatgaacggctgtggcatgatcatacaaatagactggtattgaagagcggagtctggggtgagtggaggcaagaaccaaatgctcgtagtaaatatcgggatgaggggactatcctgtgggcagaacgtgactggctcgacgaagtgctcaaatccagcaaacgaggcctcatcttcacgctcagtttctcaaaatacaaatcaagcgactcatctggcatccgagaacggtatgtaatcttgaagcgaggtggtgtttccccccgcatttggtatgccaagaaggcatctaaaagggcgtaa

SEQ ID NO: 248326 - DNA, 162 bp, Klebsiella pneumoniae
atgttcattgtccccgttgtcagtctgctcagctttaccgtcatggggaaaaccctaaaggccatgaccggttccgctgtcgtgactgccatcgcgtatttcggctcacctatacctatgaggcccgcaagcccggcgtcaaagaacaaattaccgaaatga

SEQ ID NO: 248327 - DNA, 1635 bp, Klebsiella pneumoniae
atggacgataaaaaaccatatctatatttaaacgcgtttttggtaaaaagtgagtacgcctcaataacatattcagactttcttaaagcatcgtctcaagtgaatgcttacgagttagataataaacatgagcttgacggaatgttattcataaaaataccggaagaaaaaagtccaatatggagggggtttactgaaaaacttattggttcgccacttggtgagcttgctaatcgttctagctctgcagtgcttattatcaaaacagcaaaggcaacaatggctttcacattcggctatggtcgattcttaatagatacacaatattttgtacatgattttggtatcaaaactgctcttaatacacttaaacatgatagtttgcgtagtgttgatctattcactctggaggatcaggctgttcagaaaaagtcacaagcttcaagagaatcatcgattggtgtatttggaattgatatttcaagggatgttctacgggctgttactggatcaccaaaatctggtataaatttaaaaaatatctctggtggtgactctgtatattcatttggtatcgaaataaacataagtgaaatagcatgccttgttgatttactttctggttattataataatgaatcatataaaaaagattttttgtgggttgataacattagaaaagtcaaagttagatctgaaattgaaaatttggacaaaaaattactagataatataaagttaaaaagtgaaggaataacaatcactatccctgaaattgttcaatgggatactatctatggtttcagttttacgcgtaccaaaaactcaattaaaccaataattgagaaggatgaatatcttaataatattgaaattgcaacgatttcaattgattcaattaagcgtgatcgtttatttatgtatgatgttcacgaaaatgaatttgagtatcagatatataaatgtatatattttgaatataaagagaaaagcaaaacttatatcttattttctggtgtatggtatgagattgataatgtattcatttccagagtagatgcaatacttgcgcgaataaatgtgtcgaaattaatctttccaagcgtttatgtatgggaagaaactaaagataaagagaaaaaactaaaaatagaaactgaaggtgattataacgaaagggctgctagtagccaggggtattatttactggataaaaaactgataaaaagcaatagaacaactacctctattgaactttgtgatttgatgacaaaaaataaacagtttattcatgtaaagcatagaaaaggcggttcggctggtttaagccatttatttgctcaaggtagtgtttctgctgagattttacttggtgacaaagaattcagaaaagagactagaaaagttttaaagaaagtaagcgaaggtttgcaggaaagtgttccgcttgacaactttaaaagcgatggggttgaaatcgtttttttaattttaggtgaagaatccgcgagcttaaaaaacaacttaccattttttagtaaggtaaatttatctaaggcttttgagaatctttcccaaagaggatttgatgttactattgctggtgttgatacagaggaaaaaccaagtttataa

SEQ ID NO: 248328 - DNA, 1647 bp, Klebsiella pneumoniae
ttgccgactacaaatggcttcactgactgtgccctggcatgcttatcggagtggctgcagctgctgatggtcattgagcgcattaaagcgagcaaaaatgaagcggtgaccaacctcaatgctctggttaagctcgctgaagcagtttttcacgatccactggtcattgatgacgtacagcaggacataacacgatatgcactgcggagtgacaggcactggaaccctcagcctctcgctgatacgcgtcgcctggatgtgcttcacacgctttttaccgcgatggatgcggggcagtcgcagagcatatatctgacccaaatcggtaaaagcctgcgtgaaaattggcgtgatcccaccggttcactcgggcgttatgaaaagatcgtatgtgaattgctccccgggatcatggacaacatgaattttccctggaaaaacctcaatatctggcgcctgcactatccacatgaagccattattcgagcaatgatctttcatcacgcgatgatggacgcgctgtttaatctgcatgaatggattgaaacgccattccaggaattgaaaaaacaagcgttgcttactctactgcagcgacgagaaatagacctgccggccaaggacaagacacccagtgcagctcagatcagtgtcatccgcgagaaaatgcatgagttcattgccatcgatctggttaacagaatgaacgcaatccctgccgcgattggctttagtatcaaccatccgttacagaaccctgactttccgctcgcagcatccataggccgggaaatcatcacgtttgccagatacctcaagcctgcacacgagcaggacgtcattacaatgaaattcagcgccgaagcactgaaagagtgtgttgagcgcggtgaaatttcggggttttacctgtcactggagagggagcttgaccgaatcatgtacggtgataccgtccacaagttcagttcagaggcgcgtctgcccccctccgtctgggatgcattgcacagcacattgcgttgggcccgtgatgacttatttttgctgccttttccctccggctctcgcgttaatgtaacggtaatgctggcgggagtagaattcagccactggctttggcaggaacgccgtcagggtaaactcacgacgtccctggccgcagaaaaatattccgcccaccgagcaggcataacaacaacgaactccacgataaaacagtactatgagcgtatgcgtttgtggtgcaaaaccgagttaacgtcaacggttaagcaacaactttgcagccgggcagaaaacttcacacaaattaagcgcaatcttctgtggccgatcaatatcgatttaatcagacgttataatgactttgttgccattttaagcaacttcacagagtgcaagatctctgatacctgcaacactgatgaaatacttcttatcgcagcttcgctgagaacgtttcagttgagctcccctgatgcgaacctcccgggtctgaatacatttctctgcgaacggcttaatcttgatcgtccagaaagcaattcacttttatggacggatcgcgcttatgaactcagcacgctgcaaaagctagttgagctgaatatcgacacgggctggggagagccggagaaagcgtga

SEQ ID NO: 248329 - DNA, 294 bp, Klebsiella pneumoniae
atgtcaacaacaaccaacatttatttgaaaaatctgctggcgggtatctacagcacgatgaaaatcggccgcgacagcctacgggttggcaacgatggctatcaccttctgtgcgctattcaggactatggcgaacaggaagtcgtcatcgctctggcgcgcattatcgcggatgaagagggcatcagctttattgaggcgagttcgaaggccgctcattacattcaaggtgtgctgcacgcatctgctggcaatggctacggtaaacgcgcccgcgatagcctggcgggatag

SEQ ID NO: 248330 - DNA, 801 bp, Klebsiella pneumoniae
atgccagtcaagagtgtatttattggaacccgtgttgcggacaaacgctatggtccccagagccgggatatggctgtttctgaactcatttcgttagtgcggccttataacagaccggctcagtacgtcctgcctgatttttctggtctggtacggcatctggataacaggatgcgtcagaattttgcacagcagaaagaggacaaattttgctgtgaataccgcattatatctaacctctggagtcagtccggatcaattgaaaatccatcccatctcagtcaccggttcgaaaaattgatggatagaacgatggagttcctggctcagagccatgacgtcatgcccgaatttaaccctttcagcctcaactgggatgacgataagaaagtcaataaacaagggcaaatgtactgtttggccctattgtttcatatcatcgcccgggctgcatatgaacccgtgtcactggcaaatgatacgacattaaaagcgcactgccagtggatgaaagactggataaaaaatgtattgaatgacaaatatgtcgatgatttgaagctttataccgcgttggttaggccggattatttttccgttttgcagcaccttcgaggtactgctgagagtccggatgtgcaatcgtacctggctgaccaggtcagggaggctaggaaaaaaacaagtgaaagcaccaacaactacgatcatgagtggcgcatgtcccttttttacagagaattcggcgacgccgactaccgcatactgggatgtgcttcgcgatcttcattatcgtattaa

SEQ ID NO: 248331 - DNA, 189 bp, Klebsiella pneumoniae
atggatctcttcactgatagctttaaaatttccagtagcttcgatttcccgaatgcattccgaatgttttttcctcaaatccgtcaagtggctaatatgggatttaatcagttttacctgagcctctcggtgagatttattatctatggcgaagcgtttaaactgtttgacctgctccccgttgattaa

SEQ ID NO: 248332 - DNA, 1209 bp, Klebsiella pneumoniae
atgcgcaccagcttagctctgcatgctccaggtatcctaaaatctctgatggctcaagtccgcatagattcatcacttcccgaaaattcaacctttcttgataatagtatggagctgcttaataaggggctgtcttctgcgattgaggaatttctggccaaaatagatatccgttttgttgacgctggccaattgacggtgaaaattcacaccgaaagcgaaatgacacagcaggaacttaatcctctctcagtaaaaattaccgatcaagagtcgctgaagttggcaaatgaatctcttgaaaaagaaagggaaaagcagagaaaaattatacagttgcttgaacgaagcaagtctctccaggaagaagaagatgcgaccagagactacatcaggaatgcgtacagctcactcttcggtttgtatcaagcatatatcagcgagctaagaaagccagaatacagcccgccaggagagataagcatctccgcaactatttctcttgatgaagaaaaatttgagaagtttacgggatctttcgaccggcgtggcaatattcagttcctcttgggcagtctcattgatatgaaaggaaactatcagttcaatgtgacgcaacatgttgctcgaatttccgaaattgatgaacgcttgaaaagcaatgatggaaagctacctgccacccgtcgtggagttgaggaatccgatatactgaatagcctttacgatgattgtttcaatattgatttttccgtcaggtatcgcaatgatgacatcatacagatgtcgcctgggaaacgcgggttggttctgcttaatcttattctttatctgagccactcccgtcatccgatcctcatagaccaacctgaggataatctggataaccgcaccatttacgctcagcttaatgattttgttcgtatgagaaagaatgatcgtcagatcattatggtcactcataacgccaatctggtggtgggtacagatgcagagtgcgttattgtatctaaccaacacgggcaacgttcagggatcgaaaatgcagaattccgttttgagtactatacgggggctctggaatgttccttcggtgcaactgatacttcagagaaacttgaggcgagggggataagagaacatgtttgcgaaatccttgaaggaggaatacaagcattcagggaaagagaacggaaatacggtttgtaa

SEQ ID NO: 248333 - DNA, 474 bp, Klebsiella pneumoniae; identical to SEQ ID NO: 105314

SEQ ID NO: 248334 - DNA, 1236 bp, Klebsiella pneumoniae; identical to SEQ ID NO: 96875

SEQ ID NO: 248335 - DNA, 834 bp, Klebsiella pneumoniae
atggctcaagactcacaaaacatcgattcactatttgattatttttactttgacaaggaacgagtgagtgctttaactgctcaattatttcctgcaggtgttttgaactcagtaaaaaaaacatcacatgaatctgaaaatggtcttaaagaattaaaagctggactacctctaattggagtacgaaccaatgctgctgaagcatcggcgcgtggacaggaacaagtattcgattcttcatggagtcttccattaaaccttttggataagctttcagagaccaacagaattaaaacaaaccttcatgaagctaaacttggagatatagtattaattaaaggcatgatgaaaatatttgatgcccagatggttcatctttgcatgccaataataaaaaaaattaagttaaacgagttgaaatcggcaaagaataatcaagaaaaaaacactttaaaacaagagattgctggtcttgaaaatgccgaggaaatggtaaaaatactgcctccaactacacacattgattttgccgattcttttggaaatctaagctggatgtctgtcgaaccatctaacttaacaactacactaagtgatgtatcattaaaatacggaccatttataccaggggagtggtatattctttgcatcgtcgatgcgtacgctgatgataataaggtcgataatcctgatgcgccataccccgatgttacaaatgaattaaaacgcggaatggaacctatgttattgatgatgagaggtctaatggggcgcccgttaggttcattcgggattacaccgttgataatatttcgcggggtcgctaatcattaa

SEQ ID NO: 248336 - DNA, 123 bp, Klebsiella pneumoniae
atgttcctctttgattttagttctttcctcagcaattttttgttgctgttcctctatctcgtcataaatctgctgcaactcatccatgcctgcttttggtggatcatttttgagttgttttaa

SEQ ID NO: 248337 - DNA, 414 bp, Klebsiella pneumoniae
atgtataaaccaaatatttacaatgattttatgagaaaagaagaacccaacctcgttctggtagagcgccttaccgagatcactgatcgtggcgtcactaaagcagatatggcacgtatagctggagtcacccctcaggccgtaaacggctggttcaaaaaaggcgtgattagtaaaaaatcagcactagcaatagctgacgctgttggtatttctgttgcatggctactcggtgaagacgttggcgaaaaagacggactcaagccagacgaacagcgcctactggagctctatcgccaattgccagaagaagaacaacagaacatgcttcggatcgtctctctgcgccttaaagaactcgacgtgctgtacgctaagtatatggggcgacgtatcaaaaaagatgatgtttag

SEQ ID NO: 248338 - DNA, 228 bp, Klebsiella pneumoniae
atgtccgcactagataaagcaataaaagccgctggttcagctaggaaactaagtgtcgcgcttggcgtaacgagtatgtccgttagtcactggaagaatcggaatcatgggatcgtcccgccaagctatatcttcccaattttcaacataacaggtgtcactccccacgaattgcgcccagatctctacccaaatcccacagatggcctgccgaaagaggaaggctag

SEQ ID NO: 248339 - DNA, 1722 bp, Klebsiella pneumoniae; identical to SEQ ID NO: 220582

SEQ ID NO: 248340 - DNA, 126 bp, Klebsiella pneumoniae
atggtcttcactccagcgcttgttacttacatgccattcacgggcaatggtttcgaaagtatatgcccccgaattctcggcctgagcttctttctgttcggcttttgggtcaatgccctgcactaa

SEQ ID NO: 248341 - DNA, 1122 bp, Klebsiella pneumoniae
atggccctgaaagagagcgcctttgtgctgtgggtgatttatggcctgctgggagagaaacgcctcgccgaccaggcgaccgccctgaagagcctcggctacggccgctggcagtgcctgcgctggctggtgctgcccgccctgctgcccgccctcggcatggtgctgctggccaccaccgcctggagcctgtcggcggtagacgtcgccctggtgctggggcccggcaatccgcccaccctcgccgtgctggcgtggcaatggttaagccagggcgatgagctgcagcaggccaaaggggcgctggccagcctgctgctgatggcgatcctcggcgggctggcgctggtcgcctggggcggatggcggctacagcgccagtaccagcccgatctgcacggtgttcgtcacccgcatcctcatgccctgcccggccgcctgctggcggcgctgctgccgctgagcggtctgctgggcgcgctattgctggcggggctggcgcgctcggcgccgccgcagatggatgccctcggcaacagccttgggctggcgctggcggcctgcgccctcggcgcggctgtctgcctgctgtggctggcctgcggcccggcgcgaggcgatggctgggtctggctaccgctggtcctgccggccctgccgctggccgacggccagtaccggttggcgctgtacgcctggcttgacggtgactggcggaccgtcctgtggggccatctgctgtgggtggtgccatggatgctgtttattttgcgcccggcctggcgccagcgcgatccgcgtctgacggttgtcgcccgcacgctcggctggggatccacgcgtattttctggttgctgaccctgccttcgctaactcgcccactgctgaccgccctggcggtgggcttctcagtgagcatcgcgcagtatctgccaacgctatggctgggggctggccgaattccgacgctcaccagccaggcggtggcgctcagcagcggcggcgaggcgcagacgctcgccgctcaggcgctgtggcaattactgctgccggcggtatgctttaccctgaccgctctgctggcctggctggcaggccgctatcgacgaggacttcgctag

SEQ ID NO: 248342 - DNA, 276 bp, Klebsiella pneumoniae
atgaaaaaaccgctaattgggattctgattttcgcttatggattaagctcacccctgtttgctgccgaaaccgccaacctaacgctttccgggcgggtcgtgtcagaaacctgcaatactgatattgtgaataaacaacttctgcagcgctgcggaaaaaatacctatctcattgcctcgaaaaatatagcgaatcacgcgcgtggtgtggtcactcgtacagtgaatttatccaatgatacgagtcgaaaaataattatcagcagctacgattaa

SEQ ID NO: 248343 - DNA, 765 bp, Klebsiella pneumoniae
atgagaagagtaagatactttttgctggcgctgctggtggcgatcctcgcggcgctggcgggcggctactactggctgcactctggcaacccggacgcgttgcgcaagattgttctgcagcagtgcgttccccatcagcaacagcagcaaaacccgtcgccgtgtgccgaagtgaacctcaagggcggctatgtgctgtttaaagatcgtaacggcccgctgcagtatttgctgatgccgacctaccgcattaacggcaccgaaagcccgctgctgttggatccactgacgccgaacttcttctggcaggcctggcaggggcgtgagatcatgagccagcgccacggcgcgccggttcccgataacgcggtatcgctggcgatcaactcgcgcagcggacgcacgcaaaaccatttccatattcatatctcctgcctgcgccccgatgtgcgcgcgcagttagacaaggatgcggcggcgatcagcagccgctggctgccgttgccgggtgggcttcagggccatgaatatctggcgcgccgggtgacggaggcggagctcgcccagcgcagcccgttcctgatgctggcggaagaggtgccggaggcgcgtcagcatatgggacgctacgcgctggcgatggcgcagcagagcgacggctctctggtgctgctggcgacggagcgtaacctgctgtccctgaaccgggcttcagcggaagaaattcaggatcatcgctgcgccatccttaacgcaaaccactag

SEQ ID NO: 248344 - DNA, 372 bp, Klebsiella pneumoniae
atgcgcaggccatatcttgtgccattgtcgactcaggcgttagatttactcaatgaactgaagatcatgactgggaactatcgttatgtttttccggggcggaacgatccgaacaagcctatgagtgaagtgagtataaatcaagtcattaagcgggttagttacgatggtaagcttaccgggcatgggtttaggcacatgatgtcaactctaatgcatgacaatgcctttaattcagaatggattgaaactcaattggcgcatatcgataaaaatagtattcgtggaacttacaaccacgcgcaatattttgagaagcacaaggaaatgcttcagtggtattccaatataattatattggaataccactga

SEQ ID NO: 248345 - DNA, 249 bp, Klebsiella pneumoniae; identical to SEQ ID NO: 245668

SEQ ID NO: 248346 - DNA, 459 bp, Klebsiella pneumoniae
atggccatttgggtggatgcagacgcgtgtccgaacgtgattaaagagatattgttccgcgcggcagagcggacccagacgccgctgacgctggtggcgaaccagccgctgcgcgtaccgccgtcgcgtttcatccgcaccctgcgggttgagcagggttttgacgtggcggataacgaaattgtccgtcagtgcgcggcgggggatttagtgatcaccgccgatattccgctggctgcggaggtgctggcgaagggcggggcggcgctcaatccgcgcggagagcgctacagcgaagcgacgatccgcgagcggttgacgatggggggttttatggagacattacgggccagcggcgttcagaccggcggcccggatagtttatcgcagcgcgatcggcaacagtttgccgccgagctggagaagtggttgctggcggttaaacgtcagcagggttaa

SEQ ID NO: 248347 - DNA, 231 bp, Klebsiella pneumoniae; identical to SEQ ID NO: 199859

SEQ ID NO: 248348 - DNA, 135 bp, Klebsiella pneumoniae
atgaactctgaactattcaactaccgcctgaaaacgctacaggtgctgaacgttgtcgcagatttggttttatcagtggcgctgtttggctttgggtacggccttcttaacttgcttgagtggtggcttgcatga

SEQ ID NO: 248349 - DNA, 228 bp, Klebsiella pneumoniae; identical to SEQ ID NO: 200097

SEQ ID NO: 248350 - DNA, 231 bp, Klebsiella pneumoniae; identical to SEQ ID NO: 200102

SEQ ID NO: 248351 - DNA, 174 bp, Klebsiella pneumoniae; identical to SEQ ID NO: 199871

SEQ ID NO: 248352 - DNA, 225 bp, Klebsiella pneumoniae; identical to SEQ ID NO: 199872

SEQ ID NO: 248353 - DNA, 1209 bp, Klebsiella pneumoniae; identical to SEQ ID NO: 199873

SEQ ID NO: 248354 - DNA, 432 bp, Klebsiella pneumoniae; identical to SEQ ID NO: 180584

SEQ ID NO: 248355 - DNA, 423 bp, Klebsiella pneumoniae; identical to SEQ ID NO: 199877

SEQ ID NO: 248356 - DNA, 1710 bp, Klebsiella pneumoniae; identical to SEQ ID NO: 199878

SEQ ID NO: 248357 - DNA, 396 bp, Klebsiella pneumoniae; identical to SEQ ID NO: 180578

SEQ ID NO: 248358 - DNA, 318 bp, Klebsiella pneumoniae; identical to SEQ ID NO: 180577

SEQ ID NO: 248359 - DNA, 480 bp, Klebsiella pneumoniae
atgagcgatttattattaagatcaagtcgccaaaagcgtaagcctctgcccgccttccccggcgggcgtcaggccagcatcatgcgggctctgtggctcgcagggagtcacagcctgcccctgattgaacgcccatcgcgtgggtacgctttcctgttggcgggtgacaccttgcgcctgttgggctttgccgccgtctccaggcccggaaccctttttgaccctgcggtgatccgggtggagaagataatgatcggtatcttaagcgccgacctgaccgacggcttcgggctgccggtgcgcccccatattgacaccctgcccaagcaagaagggaacggggccggtctgcccgcgactatctggttcattcccgggccgccggcgcgtatctcgctcagtgatagccttcgctgccggacactttgccgcgaaagacgtaatagctccaggcggtatacatcaggatcaccgggatga

SEQ ID NO: 248360 - DNA, 291 bp, Klebsiella pneumoniae
atgagcgatatacactcgctgctggtggcggcaatattgggtgtggttgaggggttgacagagtttttacctgtttccagtaccggtcatatgattattgttggtcacctgctggggtttgaaggtgatacggcaaatacctttgaagtggttattcagctaggctcgatactcgccgtggtggtcatgttctggcgtcgcctgttcggcctgatcggcatccatttcggcaggccgccggagcacgaaggtaaaggcagcggtcgcttatccatatccttctcggcatga

SEQ ID NO: 248361 - DNA, 528 bp, Klebsiella pneumoniae
atgatccccgcggtggtgatggggcttattttccacgacaccattaaatctttgtttaacccggtaaacgtgatgtacgccctgattgtcggcggtgtgctgttaattgcggcggaagtgctgaagccgaaacagccgcgcgcggtcgggattgacgatatgacctatcgtcaggcgttcgttatcggctgcttccagtgcctggcgctgtggccgggcttctcccgctcaggggcgaccatctccggcggcatgctgatgggcgtcagccgctacgcggcgtcggaattctcattcctgctggcggtaccgatgatgatgggcgccacggtgctggacgtctacaagagcatcggcttcctcaacatgggcgatgtcccgatgtttgccgtcggcttcgtgatggcgtttatcgtggcgctgattgcgattaaaaccttcctgcagctgatcaaacggatctcgttcattccgttcgctatctaccgctttatcgtcgcggcagcggtttacgtggtcttcttctaa

SEQ ID NO: 248362 - DNA, 264 bp, Klebsiella pneumoniae; identical to SEQ ID NO: 133514

SEQ ID NO: 248363 - DNA, 198 bp, Klebsiella pneumoniae
atgcttaccatctataacttttggatcatccgcacctgtagcttcagcatcagcaacgtcgtaaccgagctcattcagggtatccataatgacacggaaagttttccctttatcatggcttttgaggttcttgacgttctcgagtacaaagatggccggtttttttgccatgatgatacgagccacatcaaagaatag

SEQ ID NO: 248364 - DNA, 1005 bp, Klebsiella pneumoniae
ttgaaaataaactcggcgtacataatttcactttcaaaaatctacttatcaagtcttgatataaataagggggaaagtgaaattataaaactaattagaactctttccaacgatgatatagaaaaattcgaagatgaacttttccttgcttatcttcagctagctgaaattgagaaaacgaaagatgacaaaattaattatgccctgtgtctcgataaggcactagaatttaaaccttcaaacgaaagcactctattttctgcagcctatgaatccagtcagttgaactttttggattcattggctatttctaattattctcaccttgaaaatctcgctccgaaaaatgatgctgtaattaacaatctaggagttgcagccaataaattagaactgaaaattatagcgtgtgattattatagaaaagctaaagacttaaacagttcaatttcatactcgaacattggctataaattattggaggctggatgtgcaaaagaggctgaagagcttgcaagagtagcgatcacgtttgccaatcccgacaaaaataactatgaattactagcaaaaataaaaaaagacactgaagaagagcatgttaaatggcaaaaacacaaaacaaaatccaatgaaaaacaaaaatttattagaaactatgtcggtagaaaatataattcacaaaatcaatttccaacaaatcaactttggatcgatgaaaaagaaagacaagttaagatcgcaattacagaaaaaagtatagccattacatggcaagatccaattaaagatattaaattttacggttcaattagcaatacaactttaaaaggaatctacatttcatcaccgctgcaatcgcaaactctattaggcggtggcgataaaacgataaccgctcactgcgttggatattatgatgagaaactatctcaaataattatatcagcaacagagtctgacagtgacttaaaaataatactcaagaaaaatgacaatgtttga

SEQ ID NO: 248365 - DNA, 267 bp, Klebsiella pneumoniae
gtgatcagtactgaatgcgatgagatagtgctcactgtatatattcagcaaacaaaacatcaatgtgttctatttaaaatagaatctatcttgaattttttcgcaatgactaatactaaagaactatgcgatagtaataaaatgaaagataaaaactatatgatttgggtaaaattgtttttgaataactatattggaatcgtcgtgatccaagtacctatggggcaaccgctacagatacttttgattatggttggtggaggctaa

SEQ ID NO: 248366 - DNA, 924 bp, Klebsiella pneumoniae
atgtattacaaaatagagaacaagtgttactttaaggatatagaatatcaaattagaaaagagttacactcagccaaggaaagtataaggatctgtgtagcatggattaacttaaagtcatttgaggatttactcctccaaaaaagtcgtagtggtgtttgcgttaaaattttatgtaatgatgatatcttcaataacaggcatttaaatgaattatcggaagagtttttagagcatattatagtaattaagaatccaatttcacgtttttttatgcaccataagttttgcattatagatgacgctatagttataactggtagctataactggtctaagcgtgccgcattccattatgaaaacattgttatattaaaaaacgatttcaatatagcaagacaattcaaacatgaattcgcagatcttgaatatatgggatcattatctctacgcaatttccgttctattcgtgtgactcaaagaacatctaaatttgttttaggtacatatagtacccctcgtgggattttagaaactgcaaccttgcaattatgggaaatagatctatctaatactacatatggaaggttaggtgaaattgacattccacactttttcacaataatggaaattgatgattctcttcattacactatggatgttaaagagcgtgaagttgatatgtataatatggagagattgcaaatagaaaaacttcaaacattattcgattctttccaaacgccagtacatgcaattggtacagcgataatatctaactcagatgaacatattgaatatggtgaaccacctgagcgtgagatctatttaaattggatcgatatgcgactcaaaaaagttctgccatcttcttttgatgctgaaggtgattttgaaaacttatggcatgaaatttacttgtag

SEQ ID NO: 248367 - DNA, 807 bp, Klebsiella pneumoniae
atggaaaaaataactgccttggctggcagcggccaaactcaacccgaaaccagccagaaagatatttccagcgataattttgctgcgcgaatccctgtaaccatgagcaagattggcgggaaagaaacccagtctgtaagcggccgtatgcttcatacgtttctggttgtagggcgtgactttaccaactggatcaaagggcgcattaagcagtatgggttcgttgaaggggttgattatgtgattgtcgaatatttgacctcgccaaaacgggcgagctcaaaatctcgccaacaagtcgagcacgattacattgtcagcctgaatatggctaaagagctttctatggttgagcgcaacgcgcaaggcaagatggcccgccagtatttcatcgactgtgaagaacgtctgcgccgcgtagcaccagaggaacatgaggcggcgttgttgggctggcgtaaaaatcgtgtagctgcctgcgaagatcataagagtatggccgatgcaatgaagggctatatcgagcgcaccggcgacaggcagcacggctttgcctacagcaatgaatgctcgttcctgaatagccttgtgctgggtatgcacccgcgagtgtgggcgaaacagaaagaaattccggttaagcaggtgcgtgaccacatgaacgccgatcagctggcgctgctggcttatctggaaagccgtgattgtgctctgctggatcttgatacccgtacagcaacccgtaaggcgaaactcaccgaactggcgcaacgctggctggttaagcgtgttggaggtgctgagtga

SEQ ID NO: 248368 - DNA, 234 bp, Klebsiella pneumoniae
gtggcgcagctcgtcgttgcttactggctcaccttcgacggaagtaccaggcagattgcgctgatcgtcggcgacggcttcaaggcgggtgatttcaacttcaagcgcatcagcctgggcgcggagttcgtcgaactttttgccctcttcttcgttcaggctgcgcttttcggtgtcggctttgtccagcatggaacgcatctgtgttttgagtgcggctttctgctggcgtaa

SEQ ID NO: 248369 - DNA, 714 bp, Klebsiella pneumoniae
atggccgctcaaaacggtatgtcaagaagagacatgtacacgacttgtgttattattaccgtatatttatggattttcccttgttatgggtattacgaaatgaagaaggttattttattcctttgtcagggattagaagaatatgaagccagtgcatttactgatgctattggctggacaacaacttacggaatggaacccgtagaattggtaacagttggtctacgaaaaaaagttaaatgtgcctggaatttcaccatcgaaccagaatatcaactggatgaaattgatggtgatagctttgatgccattgccattcccggcggaatgagccgggctggtttttacgaggatgcatttgatgagcggctggtcagccttattcgaaaatttaacaaccaaaacaaaattatcgcttctgtctgtgttggcgctttaccagtagcaaaaagcggtgctcttcaaggtagaatgggtacgacgtatcatctgagcagtaaacgtcaaacgcagttatctgaaatgggtgtcaatgtcattgaccgcccaattgtagtggatggtaatatcattacatcgcaaagtcctgcaacagctattaatgtcgcatttactttaatagaaaagctgacgtccagagctaacgtagaaaaaattaaagagggaatgggattccccctcattgtgaatgaacaaaattcgttaaaaatgtga

SEQ ID NO: 248370 - DNA, 540 bp, Klebsiella pneumoniae
atgaacgaacctgagaaagaatattttaattgctgtctggcttaccaacccaacggctcacttatctggaaacaaagacctgaaagccatttttccagcgttgctcaggccaaaacatggaatgcacggtacgccggaaagtctgctggttgttattccaatggttacagagttgtttctgtaaataaaaaactgcaactggcgcaccgggttatctggattatgcatttcggctctatacccgccggaatggaggttgatcacattaaccatgttaaaagtgacaaccggataacgaatttgcggctggttactcatgccgtgaatcaaaagaatttatctatccagaaaaataacaccagcggcatgacaggcatacgccgtgataagcgaagcaataaatggatagtccagattaaacctcgcggacaaaaaacaaaacatattggctcgttcgatgaattagatcttgccatttcagcccggaaagctgcggaagttaagcatggctttcataaaaatcatgggagcctgaattaa

SEQ ID NO: 248371 - DNA, 297 bp, Klebsiella pneumoniae; identical to SEQ ID NO: 29355

SEQ ID NO: 248372 - DNA, 237 bp, Klebsiella pneumoniae
atggttgatgaatttcttgtaatgtatatgtacaaaaaaatccaagccgaagctcaggcaacagatatgaaaacactggaacgtttattgaagaagttccgcaaagttgttgcggagcgtcgggaagaatactatcaggagattggtgagaagaaggctcaaaagctaagggcagaaagattacaacggttgcttaagaaaatggagcgtgatcgtgtatcaccacatgagttataa

SEQ ID NO: 248373 - DNA, 468 bp, Klebsiella pneumoniae
atgaggaaagtaaaattagacaatgatgatttaattcagtacatgaacaccattaaagcattaaaaaaatatccaacgatgactgaatacagagatgaatatcgcaggataagaaccgatggttcaccgttgagtgaagccaagaaatttaaatcggcacataccgaacttctgagattagacaggaagaaaaagtcactactcgaaaaatttattgaagaactcaaccctgtaagtcacgcatcagcccttgcatcaagaaagcttgaaaaagtacaagagtccattatctaccgaaagtcattacttgagaaaagccctgatgaactcgtcgctctggtcataaaacagcgcacagaagctgctattgagttccagcgttctgttgaacagagtcttgagcaactttcagatatatcttctgattttaatgcatcagcaacaaagcgccgaaaattttctatctaa

SEQ ID NO: 248374 - DNA, 510 bp, Klebsiella pneumoniae
atgaggttacgtcaggcatgcaggagattgtcgctgagcaggacggtatttcgttatcagccggatacgcgacgggatgagccggtaattatagcgctgaccgtggcggctgaacgctatccgcgatacggatttaaaaagctttttcaggtccttcgcaggcagggcaacggctggaaccataagcgcgttcaccggatttactgcctgctgaaactgaattttcgccgtaagggaaaacagcgcctgccggtgcgcaatccggctccgctggcaacaccagaggcgatgaaccagagctggtcgatcgattttatgcacgatgcgctggtgtgtggcagacgtttcaggaccttcaacgtggcggatgattataaccgggaagcgctggcgatcgaaattgacctgaatatcccggcgcagcgggttgtcagagtgctggacaggctcgtggcaaaccgcggatatccgctgaagatgcggatggataacgattcggagctggtctag

SEQ ID NO: 248375 - DNA, 2727 bp, Klebsiella pneumoniae
atgtatatcggtttgccaaattcagacctgagtgaggaggcatataccttcactaatctggtcattaaaccattgtatgaatatacacgttggatacatcttttacctgcgtctgaaaaccatcaccacgccgggacagggggtctgttaacgcacagtttagaaacggcttttcttgctttaaaattcgcgtacagtacggaattactccccattggtctgcaggatgaagaacagacccgtaaacgtcgttatctatatgcggcctttatttgcggtctttttcatgacgcaggcaaaatatttgatgtcgacgttatttcgtccacccctggtgttaaaagcacatggcgtccgctctcctccagcctgatggactgggcaaagtccaaccgtattttttcctatgaagttatctggcgcaaaaggcaggctaacgagcattccgtgcgggcacctgtattcctggaacgctgcttaaacgatacgtgccttaattatttgagcgacgtagtcaaagaacggttgtacgataaaatgctgtcggcattgggtaattatacaaccagtgatgattttatttctcgttgcatgagaacggccgactggcattccaccggcaccgataccagctaccggtatgataaacaatccggtattcgggcctctgatactgctgcacgtgccatcgcgattctgaaagacaacatcagtactcttaatatcaatggtttcgactcatcgtcagtaagacatgacagaaactcaccgcctccggtacatattatgattatcggtggctctgtttacatcaacgaacatgcggcccttgatttcatcctgaatcagtttaaacatcttgggattaacttcccggatggcgatcttggccgcaaagcattaaccgaccttcttttaagtgggggctatatagagccatacggtgaacaacgggttgctcactttttccatcgcggtgactttacggaaaatgacatacaacgaatgtttgatgagggtatcaaaggcctgagctggttctctctcttaaaaataaaatgggttggttttctgttcaaatacgatattctgcccgaaagtacgcctggtattttcagtattaatgagactaatgactatgtttttgtcgaccgcaaggggaatgacacgctttatgtacgccctctttcgcatggtacaaaatcaatccgtcttggaataactcaaaccactgataacgcttcagtctctacggctgacacacaacgcgcagcggaaaataacagtacagtttcagatactgataatactgctgattctgaaaatgaagaggcgacttccggtgagaatcagcaggctcaggaaaacactaacaaaacatcccttacaacagatgcagctgaacctgagacagaagcacgtgattctaaaaaatctgttaaaacccgccgaaaaaaaggtgaagtgagttctgatgagtacatttccagactcctgcatcagttcaaaaataatgccattaatgctaatgaactggctttaatcgatggggttctgtatgtatcagaaactcatatacgttccatagctccgcttgaagagccgcgcttaatggagaccggtctttttgttctttctttacggtcaggaagtctcgatgaagaattcagtattccgtgcaatgacgggaaacgatatgttcagttaaatgacgaagtatcgcttgtccagttacgtcatcaacctgatattagagaggttgagatgctgcctttgctttctgcagatttatttggtggggttaagactgatgatgaaggggtgtctttcacttttccgccgcaactggctaaggtgaatcctgagccactccctccggaacgttatgaagagcaggcacctgaactgaatcgaactgaacatgaaccgactgacataccatcaacggaatatcccgatgcgcaggaagatgatgttgaacaattctgggtggattacgcttcatattcatacggtgatgactgttttaacagtgagacaggcccgataaatcaaacctgcgagagcgctgatgttgatgtagcacaggacaaaaagtcactttcagatcgtacgccggataatagtacctctgttcacgaactccctccggcagagatggagcatgatttcgagctaacggaagacgaagtgcaagaggaagattctgttgagggggtcgttgacattaacagcgattttgaagcgctgtttgcccgtcagagtcaaattatcactgatccggctgtcgtcattgcacacagccttgagcagttaaaatccagtacttcaccagatcagcagcaagttgaaaccagtaatagtgatacgctttcatccgatatcgacacgattattactctcttaaatcgtgtcaggaacaataacaattctgctcatgtaagagtattgctacgggtggttttggtaactgatataaatctttgcatccgtcttcgaattctagatgatgtcggatcctggggttttaatcaggaagaaatcggtcaactcaaactatcactgtctcatttccctgtagcctcgctaaaggtcacgataggccaaccaattcgacactacatgatccgccttagtgaccttcaacaaggtgctctgcgcaataacattttctacgaagaatttatttcgttttttaatcatcaggaagtaagccatgaaacgtag

SEQ ID NO: 248376 - DNA, 1155 bp, Klebsiella pneumoniae
atgaaaagtaaaaaaatattgatcgtaggtgctggcttctctggtgcagttatcggtcgccaacttgctgagaagggacatcaagtccacattatcgatcagcgtgatcatattgggggaaattcctatgatgcacgcgactctgaaacgaatgtgatggtacatgtttatggaccccatattttccatactgacaatgaaacagtgtggaactatgtcaataagcatgcagagatgatgccctatgtgaaccgggttaaagcgacagttaatggtcaggtattttccctacctattaatttgcatactatcaatcagtttttctcaaaaacttgttcgcctgatgaggccagagcgctcattgctgagaaaggggacagcactattgctgatccacaaacttttgaagagcaagcgttacgctttattggtaaagagttatatgaggccttttttaaaggatatacgattaaacagtgggggatgcaaccctcggaactgcccgcatctattcttaaacgtcttcctgttcgttttaactatgatgataattattttaaccacaaatttcagggcatgccgaaatgtggttatacgcagatgattaagtccattctcaatcatgagaatatcaaggttgacttacagcgggaatttatcgttgaagagcgaactcattacgatcacgtattctatagcggtccattagatgcgttttatggctaccaatatggccgtctgggctatcgaacattagattttaaaaagtttacctatcagggtgattaccagggctgcgcagtgatgaactattgttctgtggatgtgccctatactcgcatcactgaacataaatatttttctccctgggaacaacacgacggctctgtttgttataaagagtatagccgtgcttgcgaagaaaatgatattccttactatcctattcgtcagatgggagaaatggctcttcttgaaaaatatttgtcactggccgagaatgaaaccaatatcacttttgtcggtcgtcttggaacctaccgttaccttgatatggatgtgaccatcgccgaagcattgaaaacggcagaagtctatttaaattcactcactgaaaatcagccaatgcctgtgtttacggtttctgtacgatga

SEQ ID NO: 248377 - DNA, 174 bp, Klebsiella pneumoniae; identical to SEQ ID NO: 244900

SEQ ID NO: 248378 - DNA, 174 bp, Klebsiella pneumoniae; identical to SEQ ID NO: 244900

SEQ ID NO: 248379 - DNA, 561 bp, Klebsiella pneumoniae
atggccgggcttgttgttttcatcatttgtgtgatccttgcagtacttactttcaggaaagtttcaaactattccagaaataaaggtcggggaaagttccgtactttaactacgtcgttaggtatgagttttattgtctttgtcgtttcgataggcatcggttctggggttgtttcacaagataaaagtactgatgcgaaggcttcaacgtctgccagtactgaaaaggccaaaaccagtgtttataaatgtgataagttcgatgcaataacacaaactcgacaaggaaccaaacgcgattctggttactattcagataaaggaatttcaatttattatactatctccgataaagaactaatcagtcgaatgccaatccccggcgataaagatagtgtgtatactgctaaattcaacaagattgcagcagatggttcaaggaagtacgaaaattcgtcaagtaattattttgtatctgtacttaatgataatactataaaagtaattgatgttgaatttaaccataatgcaaccattacacaaatttgttctaaacaatga

SEQ ID NO: 248380 - DNA, 1107 bp, Klebsiella pneumoniae
atgatttatcatgaactgatgcaggagcatgagattgtcgacgaggaaaaggaacgatatttaacagctaaaaagaaagcagtaaaaggggatttaatgaacaaaatcgcccaagagctttctgttatagctgagaatgatattttcatcatgaacaacgattactttgtcgatccagagaaagtgcaattgagcattcttggatggaaagatctcagtaagtatctcggattacctgttactttcatgggggcgaacttcgagaattcattgatttataaggcaaatcaagggatgtttgaaaaaatcagtctggataatctgcgacaacgaaaagtacctttaactgaacgcctcaaagtatactatttctcagaaaatatcaagttatcaaagacatggaaggaaaggaatcccgaccaactccagcgtgtttatgattacctctctgaagtactcgacggtcagaagtactactggacgaacaacaataccgataaacagaagctgcatgaggcttacagaatcagccctgatgcgagggggcataacgactacaaagatcgacatacatgcgtctggttagcctgtatgcgttctgacgacacagaagcgaagctgtgtgagttgctattaaagattacaggtgaagatatccatcaggctagagaatacgagagccttcatcagttcgctttgagagggatatcacgtgatttcgacaatgatgcaacacagattgtctatgtgttcgataaatggcaggctgaatcattgagtacaaatattgaacatattcctgaagtactagaaaacgttgaaccaggtgtaccgggaaggccaaagggagccacaaacgctaagagattgcctgcattgagtgatacaaaatcaaagcgtttcagtcgctggaaaaaggataatccgaggcttgagttagaggcattcaaagcgtttcttgcaagtactgtcaactcggatctcagtcctgacgatattacggctatgtggggcagataccagaaagcagtacaaaaaagagacacaaactcagtccgatacaccgacatacaaagcaacagtatgtccaaaaataatcccttataa

SEQ ID NO: 248381 - DNA, 156 bp, Klebsiella pneumoniae
atggctctgatggctctgatggctctgatggctctgatggctctgatggctctgatggctctgatggctctgatggctctgatggctctgatgaccctgacggctctgacggttctgatggctctgatgactctgacgtctctgatggttctgtaa

SEQ ID NO: 248382 - DNA, 225 bp, Klebsiella pneumoniae
atgggcggcgaggccgctctcgccgaacaggatcccccgcacctgggcggcattgaccaccagcagcacaactgcatccagttccgcggcgaacggcaccgcgctggggcccgcgccattggcgcccgccgccagcagtgcgcgacagttgtcgggattgatgtcaacgccccaggtgttcaggcccgcctgcaggcaggcgcgggcggcgcccatgcccattga

SEQ ID NO: 248383 - DNA, 900 bp, Klebsiella pneumoniae
atgaacaaagataacgtcaaactggctatcgccccgatcggctggactaacgatgatatgccggagctcggcagcgaaaacaccttccagcagatcgtcagcgaaatggcgctggccggttttaccggtagcgaagtcggcagcaaatatccgcgcgacccggcggtcctcaagccgatgctggatattcgcggcattcagatctgcaacgcctggttcagcacctttttcgccaacggccagcgggaaaaaaccattgatgaattcgtcaatcacatgaacttccttcatgcgatgggggcgaaagtgattggctgctccgagcagagcggtagcatccaggggctggataaaccgatcctcggcgatgcgaagccgtgcttcagcgaagaagagtggcagcgggtggcagaaggctacaacaccctcggccgcctggcggcggagaaggggatgcaggtctgtctgcaccaccacatgggcaccggcattcagaccaccgcggaaatcgacaaatttatgtcgctggtggacgagcgcgtcttcctgctgttcgacaccggccacgcctggtattccgaaggcggcgaagcgccgatgctggcgatcctcaaaaagtatctgccgcgcatcaaccacgttcacctgaaagacgtccgcccgcccgtgatcgaccaggtgcgccgcgacggcctgtcgttcctcgacggcgtgaaaaaaggcaccttcaccgtcccgggcgacggggtgatcgatttccgtccggtgttcaagctgctggacgactttggctataaaggctggatggtggtggaagccgagcaggatcctgctctggccaatcctttcgaatacgccgtcaaagcgcgcaaatatatccgcgaaacggcagggatctaa

SEQ ID NO: 248384 - DNA, 1311 bp, Klebsiella pneumoniae
atgtttaaacccctcacgctagtcgcggttggcctcagccttgccctgagcggcgcggcgctggcaaaagagaaaatagacttcatgttcccggcgccggtggacggcaagctgaccatggagatgacccgcgtcattaagcaattcaacgactcgcagcaggatgttgaagtgcgcgggatcttcaccggcaactacgacaccaccaagatcaaagccgaatcggcgcagaaggccggccagccgccggcgctggtgatcatgtccgccaacttcaccaccgatctggcgctgaaggatgagatcctgccgatggatgagctgtttaaatatggcgatcaaaaggccggcgattttctgcacaaggaattctggcccgcgatgcataagaacgcccaggtgatgggcaccacctatgcgatcccgttccataactcgacgccgatcctctactacaacaagacgatgttcgatcgggccgggatcaaacagccgccgcagacttgggccgagctgctggccgatgccaaaaagctgaccgacgagagcacaggccagtgggggatcatgctgccgtcgaccaacgacgactacggcggctggatcttctcggcgctggtgcgcgccaacggcgggaaatactttaacgaagactatccgggcgaggtctattacaactcgccgaccgccatcggcgccctgcgcttctggcaggatctgatctacaaggacaaggtgatgccgtccggggtgctgaactcgaagcagatcagcgccgcgttcttctccggcaagctcgggatggcgatgctcagcaccggcgcgctgggctttatgcgcgagaacagcaaagactttgagcttggggtggcgatgctgccggccaaagagcagcgtgcggtgccgatcggcggcgccagcctggtgagctttaaaggcatcagcgaggcgcagaagaaagcggcgtatcagttcctgacctatctggtgagccccgacgtgaacggcgcgtggagccgcttcaccggctacttctcgccgcgcaaggcgtcatacgatacgccggagatgaaggcctatctgcagcaggatccgcgggcggcgatcgcccttgagcagctgaagtacgcccatccatggtactccacctgggagaccgtggcggtgcgtaaggcgatggagaaccagctggcggcggtggtcaatgatgccaaagtgacgccggaagcggcggtgcaggcggcgcagaaggaagccgacgcgctgatgaaaccttatgtggataagaccgcgctggcggaagtgaagtga

SEQ ID NO: 248385 - DNA, 825 bp, Klebsiella pneumoniae
atgctgttagcgcacatttccgatacccatttccgcagccgcggcgagaagctgtacggttttatcgacgtcaatgccgccaacgccgacgtggtctcccagcttaacgcgctgcgcgagcgcccggacgcggtggtggtgagcggggatatcgtcaactgcggccgcccggaggagtatcaggtggcccgccagatcctcggcagcctgaactatccgctgtatctgatccccggcaaccacgacgacaaagcccattttctcgagcatcttcacccgctgtgcccgcagctgggcaacgatccgcaaaatatgcgctatgcggtggatgacttcgccacccgcttgctgtttatcgactccagtcatgccggcacgtcaaaaggctggctgaccgacgagaccatcagctggctggaggcgcaactgttcgagggcggagacaaaccggcaacgatctttatgcaccacccgccgctgccgctgggcaatgcgcagatggatccgatcgcctgcgaaaacggccaccgtctgctggcgctggtggagcgtttcccgtcgctgacgcgcatcttctgcggccacaaccacagcctgaccatgacccagtatcgccaggcgctgatctccaccattcccggcaccgtccatcaggtgccgtactgccacgaagacacccggccctattacgacctctccccggcctcgtgcctgatgcaccgtcaggtcggtgagcagtgggtgagctaccagcactcgctggcccactacgccggcccgtggctgtacgacgaaaacatcagttgcccaacggaagagcgctaa

SEQ ID NO: 248386 - DNA, 888 bp, Klebsiella pneumoniae
atgagcgctgaaatctcgccgctgctggtccgcacgcccgccgctgcccgtccgctgtggctgcgcctgcgccgctcgtcgccctttacgctcacagtattaatgtgctgcctggcgctgctgtgggtcagcccgtttatctggatgctggccacttcgttcagcgccaccaccttcggcgacgatatggcgtcgctgctgccacgcctgccgctgaccctcgataacttccgcgacgcctggcagagcgccgactggctgagcctgtacgccaacacccttatcttcaccttcggcaccttcttcgtgcagctgttgaccatcaccaccgccggctacgtcttcgcctgccacgagtttcgcggcaagcagacgctgtttctcctgttcctggtgcagctgatgatcatgccggtggtgatgatggtgccgaacatgctgaccctgaaaaccttcggcctgctcaacacccttaccggggtgatgatgccctacttcacctcggcgttcggcgtgttcctgatgcgtcaggcgttcctcgccatcccgaaagagctggaagaggcggcgctgatggagggctgccgctggtggcaggtgctgttccgcgtactgctgccgatgtcctggccgtcggtgctggccttcgccaccgtcagcattacctaccactggaacgagtacctgtggccgctgatgatgctcaacgatcccgataagcaggtgctgaccgtcgggctggtctccttcgccatgggcgccgaatccggcggccagtggggcaccatcggcgccgggacgctgatggtctgcctgccgctgatgctggcgttcatcctttttcagaaacagttcctgcggagcttcggcttctccgggatcaaataa

SEQ ID NO: 248387 - DNA, 237 bp, Klebsiella pneumoniae
gtgatcaccaccgcgctgatctactccatcacccagatcgaccacgtggcggtgatgacccgcggcgggccggacaacgccaccaccgtgctgctctattacatccagaatctcgcctgggatacccacgacctcggtaaagcctccgccgccaccttcctgaccctggccgggctgttcgccttctcgctgattaacctgaaactgctggagaaaggagcccactatgagcgctga

SEQ ID NO: 248388 - DNA, 630 bp, Klebsiella pneumoniae
atgagaaagacctggcttccctggctgatcctgtcgccttccctgctgtttttactgctgtttacctggttcccgctggggcgttcggtgtatgacagcctgtttgatacccgcatggccagcgacggcgcgcagtacgtcgggctggataacttcgcccgcctgtttgccgataacgtcttctggcagtcgctgggcaataacctgctctatatcctgctgacggtggtgcccggggtgaccctcgccctgctgctggcggtcgccctgagcgagaaccatcgcgtcaaccgctggctgcgcaccgcctttttcttcccgatgattatcccgatggtcagcgccgccgcgctgtggctgtttatctttatgcccggcctcggcctgctcgaccactatctggcaaagctgttcgggccgatgaacaacaactggctggggcgcagcaacagcgcgctgctggccctggcgctgatcggcgtgtggaagttcgccggctattacatgctgtttttcctcgccgggctgcagagcattccggcctcgacgcgggaagcggcgctgatggaggggctacccgcacgcaggtcttttttaaggtcacgctaccgctgctgcgcccgaccctga

SEQ ID NO: 248389 - DNA, 564 bp, Klebsiella pneumoniae
atgcgtggcgccgaagctgccacggcgaagctgtccgggataacggtagctattcgcacgctgtggacgccgacggcatgcccggttgatttactgccgtatctggcgtgggcgctgtcggttgatcggtgggataagaactggccggcagagaaaaaaatagcgtcaatccagcaatcctactggcttcatcgccggaagggtacgcgcgcagctgtgcggcgagtgatcgaagatatgggcttttccgcgacgtttgcggaatggttcgacgtcggcgacgaacccggcactttccggcttgagatcgatgtaaatgaggttggccttacatcaaaaacactggatgaactgaatcgcttgatcgatggcgccaggccagttagtcgccacatttcacagctaactttgtcaacgagcaccagagggacggcattcgtgggggcagcaattgtcgagggcggaattattaccgtatacccggaagggtatgagcctgacgacagcattcattatgacgggcaggcaaattatgacggcaattattattactccggggattaa

SEQ ID NO: 248390 - DNA, 1992 bp, Klebsiella pneumoniae
atgagtgaaataaacgaaatacaacaatgggaagacggcattccatttattacccgcagtgataaggttgaaggtggcaatgcaggcaagattaatattcagactcgcattctggcgaatcgcacgcgctacctgaaaaatcagctagaggcttataacggactggtgaaatcaggagaactgccattttccgattttgaaacggctcaggaatttattgatgccggtaagatccccgctggcagtttgttttctgttcgctctgataacccggattattgggttgacgaatgcgttaaccgaaatggtaaggtcactgccaccggtaaacatctgctttcagaatcagctatcactgcccgtattaacatggatgataacggcaatattacgttccataaggatgcggacgggctgagcctgatagtcgttgatgatatcggcgggatgcacctcaccggcgtgaaaggaacggttcaggagcggctgaatatcgtcgggaaaaacacatcacctgccatcctccgtctgaccgatgccgaaaatgcggcttttgcctcagtggatgaatacggacatttacgcctgccgggtatgcctgacagcgttcaggaaaggcttgatgcgctgaaaaaacgcatggaagagttccgtaagcgcggcatgattctggatgcacgggaatgtaatctgaatacgaaaaccgggcaggatgctcatcgaccgctgcaacgcggttacaactggttatcagcgaatggcggtggctatttatacgtaccacccggtcattacaaaatgcctgtcccggttacaccccgatctggtgtgtcgctggttggggccggacaggacggaacaatatttttacctatggggtacctgcctgcgtttcagtatcgggggaaaccagccgaggcatcgccggaagtttacgtcgaaaatatccagttctgtgattttaccgtcgacggtgaaaaccagcagttacacccggagcgcggttatataccggatatcaaaggaatcttccttcagtactaccgcaatgcctactttgatcgcctgaccatccgcaataccggggcgaccggtttcggtgtggatatgcctgataaggttttcgtcgcgaatttcctggttgaaaactgcggcaggctggcgaaagtcggcgacctcggtgcgtcggggttcggcctgggtaccagcttcctgagcagtgaaccgattttcctgtcaaaaattgtggggcgcgggaataaaaattacggcatcttctttgagccacaacgcggcgttggtactgcgcaggatgcgattgtttcgggcgcgaccttctccggcaacttcgcgggcatggcagattgcggtattgaggggctgatagcctctgacgtcaatctgcgagggaaccagtacggatttatggcggataccggcaccaacaacggcggacgtccaggtcatcgcgggaagctgattaactttattgttaaaggcaatacaaaacacggcatgtattttgtctcggctaaagacgaaaatttaactggtgaatacgccattattggcgcgcatatcttcgggaatggtgaggacgggattaactttaagtaccctgagaaacgggcaaacaacggcctgcgtgtttcagactgcgatattaacgacaacggccgtcatggtctgaattttgaatccggcccggtcatcaacgcccatgtgacaaatacccgtttctggaataacgggaaacaggctgcgggtaacggtattaacagcagtgcgagcgtgaagaaaagccggttctccatgaacagttattatgatttgcaggcgaaacccacgcagcaatatcccgtttccatcagcggagatatggaagatgttgatatctcctttaaccacggcgcgggcaatgtgaataacaaacttaacctgaccgggaataaaacccgcgtcaccacgctttctaatccgggaattgaataa

SEQ ID NO: 248391 - DNA, 1422 bp, Klebsiella pneumoniae
atggcaacgaatattcagggcaacatgaaatataaagggcgcttaaatctgctgccgtcagcaaatgcccccttacctgagggtgcaaatcttttcgcggattttgcaggcgggcgtcacgtcattaaacatgccagcgggaatgttttacggtcatccatcctgaccgacattctgtcattctcccgcgacagtaccgcgacgcggattgctgagagcggcctgctggaatacctccagcctaacgaaccggcgattgattatcaccctatgaccggggagtgcctgggcctgcgggttgagcgcagcacgtggaaccgcctggaatggagccaggatttcagcaaaattgccacctgggcggcgtcgggtgtcgtactgacgccgggggcgacgcaggcaccagatggcaacatgacggcgaccaaactgattgaggccacggatacgcaggccgcagtgcgcaagttagtggcaaccaccacggcggaagcgactaaggattttccgtatagcttcagcatatttgcaaaagcgaacaccgccagcgtgctccagctgtcagcggtgggggcatttcctgagccgacctttgttaacttcgatctgaaaaacggcaggcttggaaaaacgtcttcaggttcaacaaagcgcgggctaatgcaggccactattgagccttaccgcaatggatggtaccgctgctcaattactatcatgccgtacagcgccgcaaatccagaatttaccctggcactgaccgaaagcgacaccagcgccggagcactgccgtcgtacctccctgcgacaccgaagtcggtgtttatctggggcgcgcaggctgagctttctgacggcgcgacgtcttatatcccgactattggcgcagaagtgcagagggggagtgatatctgtaccaccccgccggtggcctcgtttgtgtccgctgcggcgggtacggtgctggtttcggtcgtgcatcctcacagcatcaaggcgctgacagataagtacggtgcgctctcctgcgccgcagtgattgataattctgttgccgggccgcacgtgcgctttgcctaccgaaacacgaatgtggatggtgactacggcgccgtgctcggggtggtaccggatgagagcggcacagcgcagaatctggaaatacccagcatgccgccggtaccggacagcgaacaggcgtgcattttttcattcgacgcaacggcgctgactgcacgtctttttgacgggtacaactggtatgagcgcagtctgacggcaacgcctccggcactgaatcgcctgaccatcgggcggggctacctagggtcaagcaattacctaaaagggtacatcaaaaaaatcgtctactggccttctgcgctgagcgaatcagcgatggaagaaatgctctctctttaa

SEQ ID NO: 248392 - DNA, 243 bp, Klebsiella pneumoniae
atgcatgattttttcagtgccggtattgattcgtggaaagctgacccggaattaaataattttcgttatatgtggaacaccctgatgtatgtcattccgattatgttatatgcgcttgcagctggttttcttgctgcggcttctctgtcgccgttgtgcgaaataatatttgggggtgtccggatattcctgctgaaacgccgtatgcgcccgggagaacacattaagggagggcagcaataa

SEQ ID NO: 248393 - DNA, 537 bp, Klebsiella pneumoniae
gtgtttgctgttaacagcgccataggcacatcagataaacgcaagaagactaatattcgtcagatttcaggcgatgagatcgccgcattctacgaaattggaatgttggatagcgtgtggcaatggatggacaaatatcaaattgaaggggatgaggctaggttacactctgggccaaccgttcaggatgcgattgatattatgactaaccataatcttgactggactatgtattcctgtttttgtcacaccgtacaggatgaggttcctgctgtcgttgagtcatgggacgacgaataccggacgattcctgctctggctgccatctatgaggatgatggcgcaacaattagacaggaagctgaagacgaaagagttgagcttgttagggaggctggtagtcgtattatcaaagaggccgaaccagctgtagatgagtacgccttccgtaaagaggagttattgttctggataacaagggcgacaatcgcgaagcagcaggaaatattaaataggcttgatgctctggagcaataa

SEQ ID NO: 248394 - DNA, 348 bp, Klebsiella pneumoniae
  misc_feature (120)..(129): n is a, c, g, or t
gtggcccctgacgaatggacaacggaagtggcgaaactgtacaggatgcgcagcgcgggcaaaacagacaggcggagcctggcggggagtattttgtttatttctggacaggacgggcgnnnnnnnnnnggcggcaacggcatccttcgccgttgccgcccgttgataagattagtgttttttccggttgcgacgcatatcgatggttactgccgcaacgataatgatacctttaataatatcctgcacataggcatcgacgccgacaaaggtaaaaccgcttttgatcaggccaaggatcatcgcgccaatcagggtgccggtaatgcgccccactccgcccattaa

SEQ ID NO: 248395 - DNA, 411 bp, Klebsiella pneumoniae
atgatcaaatggacggcttcattcaataaaaaattgaaccgcattttgaaatttgccgtgcaagtatgttccgccgttgactggaacgaggcggaacactcccgctcattcaacctgagcgcaatttttgtcctctcattacatccgcttcttgagcagtttcatgagttcgccatttcgcggaattttgttttgcttaccctgttctgtcagccagtaaaactggccgggacgcagacttgcaggcagttcgtaatccatgccgtcccactcgtcttcccgaaatgcataaaatgcacggtgagcctgaaacttctcggctgcatccattacatcggtcaaataggcgctgcagtctggccagaggcgcatacaaccgaattcggccatcactattcgattggtgcttaa

SEQ ID NO: 248396 - DNA, 2301 bp, Klebsiella pneumoniae
ttggaaaatcatccgcaaatcaaacgtgctcatgctatggtaatggtaaaagacgatacgaaagtagagcctcctctacaattactgtttgaagcctcttctgatattccactatccgttattaaacagcccaattggttacctaatttactttcgccatcagcttcactcagtgacattattgaaaagagttggcaacgatttgaggaacgagcacggtatggcatatgtcacacactgtatcgaaatgctctttttaccgagctaaacacaccaatcaccctagctgaaatagtggctcgtttaaaagcaaagcctcagtatgagaggctacttagtcagtggctagatttattatgcctgcatcacttattaaccaaagagggtgatcagttttatgccacaacacagtttattaacttatgtttatctgccccagtatttcaacaacctgttaatgattgggaatatgtactttgggattaccttgaacaatcactaacccaacatgaattactctttagtggtaaggtttctcctctttcactactttttaattcagatgaaattaccacagcactatacgccaaacaccctgcactaaattatttaaatcaatgtgcaaaagatattgttagtgcaatggttggtgcaacatcttcactcaatattttagaaataggggcaggtacaggagctaccactcaaggtatagtcgcagtacttaagaatacgcattactcatacacctttactgatatatcacattacttccttgataaagcgcgaaaaaaattcactgctgtaggagaaatgcgctatcaactctttgatattaatgcaccaatacaattttctcatcatccagataatggctatgatctgatcattgcatctaatgtattacatgatgcatcacatatcggccacgcactaaaacggattagaagcctgttaaaacctcaaggctatttattatttatcgaagcaaccgagtgtcaaagtgctatgcaaatggcgactgttggctttattgagggattaagtgcatatcaagataagcgtatattgacgaataaagcgatgcttgatagtgaaagttggcatgatattttaatcaatactggttttgaaactattggtcaatggccccaaacagattcctcatctttgcgacaaacactctttttagcctctcccactcgtggaggaaaaccttatttaggtaaattacgtgattatttatctcattctcttgatcagaatatcgactcttttgagttgttccaatgtgaaaatattgaagcaacccttaatggcatagcaacatcatccgctcaagagctaaatgaacagatacaacctgttgcaatacctgatgtaccaaccaatatgattaatgaaatcattgcattatggtctgagttattaggtcgtgaggtcaatagtacaaatgatttcttccgttctggaggagatagtttgattgcaaccaaaatgatcagccaattacatcaacggggatatccagcaacattacaacagatttttacctatccatgcttagccgatttttgtgctcatttagagcaggaaaagcaatctcaacgagagtactcctctttgatacctctaagcgctgtatctgctccaaaaccttaccactactttatggtacatgcttctgatggtgatcccggtgtttacctacctcttgctgagtcgttaaataatacagtgtggggattaacagttacagatgcttcaaaactaactgatttggatacattgttatcattacatttatctagcataaaaacagcacaacagactggcccttatattcttattggttggtcatatggtgcttttattgccagttaccttgcagaacaactctcgcaacaaaatcattccgtattattagtattaatagatcccgtctatcgacatgattttattaaattttgtcatgatgactcagatagttcatcagatgaaaataagcagcttgcatgcactaaaagacttatgtcattcctacctgaaagtgacctaccattatctgatgatatcgcctgtttatggctggaagccaccaaccacccaacagaatggacatcacctgaaaaagagtggtaccaacgattaccgccacatacccaacatcactatttttcaggggagcactggtcaatactgcaagatcgcgctaccagcacacatctggccgaaatcattgatcagtgggtgcaacaaaaactttctaataacggatatccatccgaaggaggtaattaa

SEQ ID NO: 248397 - DNA, 528 bp, Klebsiella pneumoniae; identical to SEQ ID NO: 217218

SEQ ID NO: 248398 - DNA, 396 bp, Klebsiella pneumoniae; identical to SEQ ID NO: 100678

SEQ ID NO: 248399 - DNA, 1221 bp, Klebsiella pneumoniae
atgaatttcaaaaataatttactagcattattttttgcgcaaacttgctttgtgccttctgttcatgcatttgaaattgggatacatacacatgcgcaaaggtactcacaaaatgctcagcaaataacttctaatttgaaaaaatatggctttaatagtattcgtagtgatattacatgggagtgggtagaaaaaaaaccagggagtttttcactgagtaacgctgccaaaaaaaaccaagatttgattgacacgatggctaacaacaaccataacgccatgattgtacttgcatatggtaacggtaattacacaccatcaggatatcctgaaaatgaagaacaaataaaagcttttaaaaaatacgttagatatattgttagtttaaataaagggaaagtgaaatattatgaagtatggaatgaatgggtatacaaaacaggaataaaagataggagcgtaaatgttccttcgacagatatttacttggaacttgtgaaacaaacatacgaaactataaaagagatagatccctcagcaatagttgtgtctggaacgataaatccaaccaatgcacgggatgtaatgtggttcgatgagttactaaaaaaggggatattgaaatacttagatggtgtgtcacttcatccctactcatttatgcatggtaataaaaaattaagaaatccaaccgataatttcaatgatgtgattgaatatcaaaatcacttagctaggagaaataacggcgttaatgtgcctatatatataactgaaatgggagtccctacatatgatggtgagggcggagtgacccgtttgaatgctgctatatttgcttttaaatatacattgctagcaatgtctgataaaaatataaaaggaatttggtggtatgattactccgacgacggagttcaaagaaagaataaagagaataattttggattcttcgatcattattatcatccgaaatcttcagctgttgctatgtatgaattgatgaaactggtacagggtaaagatatatctgctagtatcattaatgacaatgtttctgtgactatgagaaacccatcagataattcgcaaagaataattttatggaatgataataaatctaagttattaagttctaaagagactgataaaatttatataaataacgatatctcaaacccaagtaaaaaaatttttattaatacaccaaacttatactga

SEQ ID NO: 248400 - DNA, 537 bp, Klebsiella pneumoniae
atgctcactccagtctttttgactaaaataatggtcaaaataatcatcattgtgtcgattttatttagttatttttacatgatcccacaattaaaatatgaaacgtatgatcctcaaaatacgcttttgatgcggatgtatagtacatggcctagagctatatcattgctcgatgatagtatatctatttttgttggtaaaggttttggtgcaataggtacaccagctcaatatttttctcctaaattttacagtccaggagataatgttttagtttacatgtatgttatttgtgggtttgttagtgtaattttggtcggtttgtttgtttttaaattcttattttcaaggttttatgatgcctctctggcaaagaaatattacatcatttgtttttgcattatggttggtggagttacatacaacctttttgaatcagttttttattcaacaagcttgggcgtattaataggttttttgtttgataaaaatgcatgtaaactttctttcaatttcaatcataaaattattagataa

SEQ ID NO: 248401 - DNA, 261 bp, Klebsiella pneumoniae
atgaaaagcattcgactgtttataggtgttgtgattataggtgctctgtcggggtgcgctgcagtccagtataatgatggtgaaaaggtcagtattcagtccgatgcttggtacggactggatagtttgcataacactgctgttaaggcgtgccagcaatatggcaaatcgaaagcagtttatctccatagcgctaatatgaacccgaacttaccgaaaggtagtggggtgcaaaatactatctggaaatgtgagccataa

SEQ ID NO: 248402 - DNA, 1248 bp, Klebsiella pneumoniae
atggcaagacaaaccaaacctctctccgttaaggaaatcgaatctgccaaacccaatgaagcggactatgtgctctatgatggcgatggccttgagctactgatcaaatccagcgggagtaaaatctggcaatttcgctacattcgccccgtcaccaagaagcgagcgaaaaagagcattggcccctacccgtcagttacgcttgccgatgctcgaagctatcgggcagaatcccgttctcttcttgcgaaacaaatcgatccccaggaacatcagcaagaacaactgcgtagttcgcttgaagccaaaactaatactttccagctcgtggcagaacgttggtggaatgtgaagaaagccagtgttaccaaggactatgcgaaagatatctggcgctctcttgaaagagatatctttcctgcgattggcgacgttagcgttaccgatattaaagctcatacactggttcaggccgtccaaccagttcaggccagaggagcactggaaaccgttcgtcgcctgtgccaacgcattaatgaggtcatgatctatgcccaaaacacagggctgattgatgctgttcccagcgttaatatcggtaaagccttcgagaagcctcagaaaaagaacatgcccagcattcgacctgatcagctacctcaactgatgcatacaatgcgaacggccagtattagcctttccacacgctgcctgttcatgtggcaacttcttactattacccgccctgccgaagcggctgaagctcgctgggaagaggtagacctagaagcacgagaatggaagattcctgccgcacgcatgaaaatgaaccgcgaccatactgttccattgtcagatgaagcaattgcgatactggggatgatgaagccgataagtgaaaatcgagaatttatctttcccagccgcatcaagccaaaccaaccgatgaatagtcagaccgttaacgcatcgctaaaacgtgcaggttttggtggtgtgctcgtttcacacggtttgcgttctatcgccagcacagcccttaatgaacaggcttttccgcctgatgttattgaagcagcattggcccatgtggataagaatgaggtgcgtcgtgcttataaccgcagtgactatctcgaacaacgtcgcccaatgatgcagtggtgggcgaattttgttcaagcggcagaccgtggaagcattattgaaggtgggtctaaaggcattaaattactatctatgccctaa

SEQ ID NO: 248403 - DNA, 513 bp, Klebsiella pneumoniae; identical to SEQ ID NO: 110059

SEQ ID NO: 248404 - DNA, 243 bp, Klebsiella pneumoniae; identical to SEQ ID NO: 110058

SEQ ID NO: 248405 - DNA, 2010 bp, Klebsiella pneumoniae; identical to SEQ ID NO: 221938

SEQ ID NO: 248406 - DNA, 432 bp, Klebsiella pneumoniae
atgaaaactgtgctgaatcttgatgttctgaaaaccatgtctaccgaagaactggaagactatcgtaacgccggtgaggattttcgtcgtgaactgagccatgcagtcatgcgcgatttaacggtaccggatggctgggcagtaaatgcggaataccgggccgaatttgggggggtctttcctgtccagctccggtttagcccgtctcatgaccatttcgatgtagcagtatgcagtccgggtgatctcagtcctgtgtggataatcgtctttattacccgtggaggccagcctttctctgtcgtttgctcgatggccagatataacccggaacggattaaccatgcgctgtcccttatcgcgcgcctcgatgaggacggatattcatttgccagcatcatcaacaccctgaaacaggagggcgaacaatga

SEQ ID NO: 248407 - DNA, 255 bp, Klebsiella pneumoniae; identical to SEQ ID NO: 230216

SEQ ID NO: 248408 - DNA, 639 bp, Klebsiella pneumoniae; identical to SEQ ID NO: 213941

SEQ ID NO: 248409 - DNA, 369 bp, Klebsiella pneumoniae; identical to SEQ ID NO: 235573

SEQ ID NO: 248410 - DNA, 762 bp, Klebsiella pneumoniae
atgcctgagtctattgccgtaagcgtcaaaaacgtctccaaacagttcgataatgtggaagtcctgcgggatattaacctgacggtggagaaggggaccgtggtgagtattctcggctcgtccgggtcgggaaaatccaccctgctgcgctgtatgaactggctggaacagccggaccgcggtgaaattcatatcggcggtcagcggctggggattgatgaacagcgcggccgggcgatgtcgcaccgccagctggccaaaatccgcgagcgggtagggatggtctttcagagttttaacctgtggccgcacctgaccgtgcagcagaacgtcagcgaggcgctgctgcgcgttaagggcatgaaacgagacgaggcgaaggccatggccatgcagcagctggagaaagtcggcatggcgcacaaagccgatgtctacccgatcactctctccggcgggcagaagcagcgggtggcgatcgcccgttcgctggcgatgtcgccggaagttatcctcttcgatgaaccgacctcggcgctggatccggagctggttaatgaggtgttgggggtaatgaaagcccttgccgccgagggctacaccatggtggtggtgacccacgagatggattttgcccgccaggtgtccaacgaggtggtgtttctggagaagggactgctgattgagaaggcgccgccggagaagttcttcactcagcctgactccgaacgcgtcaggcagtttctgcaaagcagccgttag

SEQ ID NO: 248411 - DNA, 1275 bp, Klebsiella pneumoniae
ttggaattgctttataccaccctactttaccttattcagccgctggtgtggctgcggctgctgctgcgcagtcgtaaggctcctgcctatcgcaaacgctgggcggaacgctatggcttctgtcagaacaaggtagagccggatggcattctgctgcactccgtttccgtcggcgagaccttagccgccattccgctggtccgcgccctgcgccaccgctacccttctctgccgatcactgtcaccaccatgacgccgaccggctccgagcgcgccatgtcggcgtttggcaaagatgttcatcacgtctatctgccctacgatctgcccggtgccatgaaccgcttcctgaacaccgttcagccgaagctggtgatcgttatggagaccgagctgtggccgaatatggtggccgcgctgcataagcgtaagatcccgctggtgatcgccaacgcgcgcctgtccgaacgttccgccaaaggctatgccaaactgggcggctttatgcgccgcctgttgagccgcattacgcttatcgccgcgcagaatgaagaagatggtaaccgcttcctctctctggggctgaagcgcaaccagctggcggtcaccggcagcctgaaattcgatatctccgtaacgccagagctggcggcccgggcggtgacgctgcgtcggcaatgggcaccgcaccgcaaggtctggattgccaccagcacccacgacggtgaagaacaaatcatcctccaggcgcataaaaaactgctggagactttcccgaacctgctgctgatcctggttccccgccatccggagcgcttccctgacgcccgtgagatggtacaaaaggctgggatgagctttactctgcgcagcaccggcgagatcccctcctccagtacccaggtagtcattggcgataccatgggcgaactgatgctgctctacggcattgccgacctcgccttcgtcggcggcagcctggtggagcgcggcggccataacccgctagagccggcggcgcacgccattccggtgctgatgggtccgcataccttcaacttcaaagatatctgcgccaagctgcagcaggacgatggcctgatcaccgttaccgatgccgattcgctggtcagggaggtgtccacgctcctgaccgatgaagattaccgtctgtggtatggccgtcacgcggtggaagtgctgcaccagaaccagggcgcgctgtcgcgtctgctacagttactgcaaccttacctgccgcagcggagtcattaa

SEQ ID NO: 248412 - DNA, 168 bp, Klebsiella pneumoniae
atgatgacggaatatctcgccttcttcaatggccagactggcgtctttgacgccaagcgacagccccgttttttccagtatttgcgctttgttgagtcctttctcaatatatttgaaagcacggtgtggatgctcgccaaatatcttataaagatttttgatttctaa

SEQ ID NO: 248413 - DNA, 771 bp, Klebsiella pneumoniae; identical to SEQ ID NO: 237218

SEQ ID NO: 248414 - DNA, 336 bp, Klebsiella pneumoniae; identical to SEQ ID NO: 237217

SEQ ID NO: 248415 - DNA, 207 bp, Klebsiella pneumoniae; identical to SEQ ID NO: 248078

SEQ ID NO: 248416 - DNA, 3999 bp, Klebsiella pneumoniae
atgaccttacaagaattctatgcggctcgcttcggtagcgatccgtattcattgcttgaagcagcgcgggatgagctgtcagagctggccacaatggctggcattaactgggcagcatgcgctgataacattcagttgaacccgcgcggcggggaagaacgttattcaaaatataacggtggcgcccccgaagctctggaaaagagcctcaaagggcgtgtggaaatctactcccgcaaggaacaacacaaaagcggcatcagctacccattcgtcaactttgtccagaaagggcatgacgaaggttcttggagcggcttctccttcctgttcgccgaataccgccgtgaacaacaaagaaatcatgcgaccgtggtcgcacaacctgctgaagaactggcgcgtattgaacgccaggcagaagcccgcaagcgccgcgccgaacagcaacggataaatgaacttaaaaacaaacagttagagcaagaacggttgctcggatggttggcgttccacagtgcatgggaacatgcgccagctgaggacgggtcgtggccttacgcagtgaaaaaaggcattcgtgacgtattcagcgcttgcgatattcgtcgcgtgaccagtcacgacaacgcaaaatggagccgtggaccgactacatacatggcgattccactggcccacctggacggacgcaaagacggacaaattgtcggctggcagcgtatcgaccagcgcggcggtaaattccagaccagcgcgatcaccagcggtgatttcgtcggggcgtgctttgttatcggcaatctgaacggtgcgcaaaatattgcagtggtggaaggtttcgccaccggcgcgtccgtatggctggctacccgtaaggacccgaaaaaaagctttgatgctgtcgtggtcgctgtggccgcaaacaacatgatccatgttgttgagcagctggtgaacatgtacccggcagcaaaaattacctgcgccctggataacgaccgcaaatcatcggctgaaggtaaaggcaacaccggcttacgtactggcttcgacattctcgcaaaatttagcggcatcaaatgcgtttatcccacctttgaagacgatccccagctggagtgcagcgacttcaacgacctgcacagattacgtggactccgcgagacctgtcgccagctattcgccaaagggaaccgcctgagtaacagcactgatttgctgtctctgacgctaaacaagctgaaaacggctaaacgtgacaaccgcaggacgtttgctaaagaactgctgaacgcggtagatattggcatgctgacctgcccggtaccgaatagtccggcggatctgtttaacatgttctgcatcgtgctgcgtgatatgggactggaaagcgtctatcgcgccacggttaaagaccacatcgcacgccgcctgaaccgcaaatgccgtactgcccaggcaccccgttcctttagcgagcggatcaccgacccgaacaagcgtccccagcacatcacgtataaacgctttgaaacatccgtgatgacggatgaaattctgcaatacgtgcagcagctgcagggcatcgttattgttcgcgccggtatgggatcgggtaagtcgacaggcctgctgcgcccattgatgcataacgctgatcgcggcgtttccgttgcgcaccgcgtaagcctcatcggtggcctgtgggaaatgatgacagagcagaaagggaccaaggccgatattctgcattaccaggaccccggctatcaggaaatggcgccatacgcgaataagctgaccatttgcatcaactccatcgtcaaaggctgctggcagccgctgatgcgccagcatgactatttcggctttgatgaggcaacgcagggacttcgcgccatcctttctggccgcgcaatggagaacccggtcgccgttttcaatacgctgatcgacgcgctggccagaactgaattgcaccccatcatggtagacgcagatgctaacgatctgctggtcgacctggcagaactggcgatgaagcgccgcgaagaaatgggcctgccggcatggctgcaaattcacgttatcgaattgccggtcgacgttcgcaaccgcgaaacgggcgaacctatccgcgtattttacaccgagaaagatcgcatcatgaccgaggtgattaaagcggtggaactcggtgaaaaaatcatgctggcgaccgatagctcaactttcgcagaagacgttaccgccacgctgcgccagcgctacccggagaaaaaattcctctgcgtaaaccagaagagcaagccggaacccgaggttgaagaattcaccaataaaccgaagaagatggtgaagaagtacgacggcctgatttatagcccgtcgatatcctccggcgtctccatcgagcaaaagcatttcgaccgccatttcggcatgttctgcggcgaagtggtccccagcgatgcgatccagatgctgcgccgcgaccgcacagccaaagagttcatcattggctttgacaaggttcgcgcacgacgcgaaaccgatccgcaaaaaattgagcgtgcgtttgtccaggcattgctggccactgccggcatgaacggcgaactaaccgacgttgttttcgacggcgaccgcatttctatgggtgtggccaacaccgattttacccggatgaaaatcaaggcagcagcgattgaggcctccgcgcgtaatgactacgccagcaatatgatctgcataatgcacagcgacggctacaaggttgcccccctggcatccgacgagctggcgaactgcgtcggcaaggagctgcgcaaggaagcccgcgaaattgtctgggaacaaacgctggatctccacctgaatatcgaaacgccgaacgaatctgaacgggaagccattctgaagaaacgcgccctgaccctggaagagcaggcgaagctggtccgctgggacatcgagcatgagctgaaactgccggtcaacgaggacaacctgaaattctacttcgacggcgcccgcgataaggttcgccgttatgaaaccatgctgctcgatgagatcaccgcgcggcgtttcgaccgcgaggaatccgcgatcaacttcacctacgctttcaggcaggcgggccaatggcaatactttaccgccaccgcgatgacccgcgagcaggctgatgaagcattccaggcgaaacaccctggcatcaccgagtacaaagtcaaatcgacacccgcggtcgaggtcggtatgcgcggcttctacggcctcaaatctacggtgctacgccagtacttcattgactgcggcatcgacccggaaaccatgaccggagaagccacccaggcgcgcctggcatacgccagggataaactcatgaccgccgaacggcgagacctgttaaacaacgtcctgcgcattggtggctttatgacgcccaaaggcaagccgaaggtccccgaggcactgtttaaaaccatctgcgagtcgctcggcctgaaaaccgacaagcgccgcgccagggacggagacaagcgcccgaccatacgctttgtggatcagcagtcggcggcgttcatgatggaaattctggagaaccgtaaagacgacggcctgtctctgcagttgcgtaaagccgagaaaaccaccaccgaagtggatcacggtttagatctcaatatatatatggatcataaaacgcgatccacaaacgggcaggatttggacgcccctcattcagtaataactgaggcgctggccgaactgccggtgccggaggcctgggcgatgaccgcgctgtctgatgatgagctggccacaatgacctcctggtcgccagccagcatagcgatgaccttcgcgtccctgtacctcacagagttcatggaccgcctctccagcaacgaactgcgccggctgcgtgaatacatcaccggcacggttacgggcggctacgacgcgcaggaggcgttctatggctaa

SEQ ID NO: 248417 - DNA, 609 bp, Klebsiella pneumoniae
atgattgatcgtatgaaaacacgaggcgaacgactgaaagcacgccgtttagaattgaagatgacactgaagcaagtcgcgcaaagtgtcggtatctctcttcctggcgtccaaaacttagaacgtggcgacgtaatgccgtcgctggagatcgggcttgccctggcgaaatgcctgcgcaaacctgtgcaatggatactttttggtactgaatctgatcctgaccgcgttcctgttattggcacaacagaaagtggtccggatagcgactggcagccaggagaacctgccaacacagaacgattcctgccatttgttagccaacgggaaaccgtttatgcgctcactgtcgggaaccaggttcagcacaactatcagccgggtgacgtcgtcctggttgactcagctcttacgccagttccgggtgaagatgtgttagtttgtgataaagacgggaaaatctcgatacagcggttagcgcgcttcgacgatgagcgctactacttagatggcgttaactctcaacgagttatccatgagaaaagtgatcttcaatttgtgcaccaaatagtcggtacgatcaaatcgttcatgatagagggtagatga

SEQ ID NO: 248418 - DNA, 609 bp, Klebsiella pneumoniae
atgcttacctaccatcaatcaatttttaaaatgattatggcaaattggctgaacagcgatcatgtcatcatcgatactgagaccaccgggcttatggcttctgatgaaattatcgagatcacgataattaatatgcgtggtgagattctgttaaacaccttggtgaagccgagccgccctattccgccagaagttaccaaaattaataacatcaccaacgaaatggtcgctgatgcgccagcatggcgcgaggttttcccggctgcgctgaaaattattcgtaagcataaatggctggcatggaactccagttttgatgcccgcctgatggtgcagacctgcctgcagagcggattttttgatgacctaaagcctcacctcatcacctccatcatcatggccattgagacgcgccacattgacgccaaagcggtttatgaccagtggtatggggagttcgacgagaagcgcaaaaacttcaaaaggcagagcctggctacagcagctgcgcgccacggcatttcaaccgctggcgcccatcgcgcgcttgctgattgcctgatgatcctcggcgtgctgaaacaggtttgccagccggaggtcgcatga

SEQ ID NO: 248419 - DNA, 477 bp, Klebsiella pneumoniae
atgacagatatcgcccggctgattaacagcattaagcgccgcacgtcctcagcaagagagcttggctacgatgtcctgttcgtggcactcgatgatttggatgtcctggctgattcgctggagacggcgctgcgcgcaaacgccgcccaggccgctcacatcgagcagctgcaggacaagtttaacaaacttgcagcggagaatgtggcgctgaaaagagttccggaaacagacagcgtggcaatgttgcttgctctggattcgttccgcagcgagccattgccggatgtcggtttgcaaaaggcgtttgaaagcttgatgtatcaccggatgactcccgccaccgacgcctacctggccgggattaaggctgatggggtggaggagtgggtttccagcagagatggccgctggaatggcacgacagaagaggcgcttaatttcgccaagcagctgcgcgaaggagggaaagtatga

SEQ ID NO: 248420 - DNA, 246 bp, Klebsiella pneumoniae; identical to SEQ ID NO: 180600

SEQ ID NO: 248421 - DNA, 225 bp, Klebsiella pneumoniae; identical to SEQ ID NO: 247850

SEQ ID NO: 248422 - DNA, 1062 bp, Klebsiella pneumoniae; identical to SEQ ID NO: 248079

SEQ ID NO: 248423 - DNA, 312 bp, Klebsiella pneumoniae
atgaacacagctatcgaatatggaaatcctgatctctggctggtcttgctcatgctggccgccggggtggtatcaagcgccctgctttccgaaacccctatcaacccgcgccgcctcatcggagacgttctgagaggcgtaatcgtggccatcatcctctgggcttacggtgctatgggcaacatctcaattttgaacgtaatcactctcgccggtttatcggctgtggcatggccacacaccgtcaacgaaatcaccggctttgcaaaacgaactatcagccgaattatcggcgggagaaaagaacgatga

SEQ ID NO: 248424 - DNA, 477 bp, Klebsiella pneumoniae; identical to SEQ ID NO: 229136

SEQ ID NO: 248425 - DNA, 909 bp, Klebsiella pneumoniae; identical to SEQ ID NO: 248080

SEQ ID NO: 248426 - DNA, 1164 bp, Klebsiella pneumoniae
atgtcgcttattaatttactgcatgaatgtatcagccgcgggcaggagatgacgcaggccattgctatagctcaatttggtgatgatagccccgaggctcgccgtatcactcgtcgctgggggataaccgaggttgctgatttaatcggcgtttcgccgcaagcaattagggatgctgaaaaaaatgggcgactaccaccacctgattttgagttacgcggtcgcgttgaacgtcgcgccggctataccatcgaccagattagccatatgcgcagcattttcggcaatccgaatcaacggcctgcagacaaaaatccagctgtgttagctgttatgtcgcacaaaggcggcgtttataaaacctcatctgcagtgcatgaagctcaatggttagctctgcaaggtcaccgagtgctactcattgaaggtaacgatccgcaagggaccgcctcgatgtatcacggctatgtaccggatttacacatccatgccgaggatactttgctcccgttttaccttggtgagcgtgataatgcggaatacgctataaaaccgacctgctggccaggtctggacattatccccagctgcctggcgctacaccgtatcgaaacggatctgatgcaataccatgcccaaggaaaactacctcatcctccgcatctgatgctacgggccgctatcgaatccgtatgggataactatgacatcatcgtcattgatagcgctccaaacttagggacaggtacgattaatgttgtttgcgcagccgatattatcgtcgtggctacccctgcagagctatttgattattcatccgttctgcagttcttcaccatgcttctggaccttcttaaaaccgttgatttaggtggttttgagcctgttgtacggctgttactaacgaaatacagtctgaccactggtaaccaatcgcgctggatggaagagcaaatcagaaatacatggggatctatggtcctgcgtcaggttgtccgagtgacggatgaggtaggaaagggccaaataaaaatgcgcacagtatttgaacaggccgcgaaccagcgttcaacgcttaatgcatggcgaaatgcagtctctatttgggagcctgtttgccaagaaattttcgatgacttgattaaacctcgttgggaggactaa

SEQ ID NO: 248427 - DNA, 1500 bp, Klebsiella pneumoniae
atggcgatgtatgaagtcggcaccgtcacgggtgcagcgtcgcaggcacgggtgacaggtgcgacaacaaaatggtcacaggtggcgctggggatactgcccgggtcgattctggtggtctaccgcagcggtagtgctgacctgtatgcgatcaaatccgtggacagcgacacgcaactgacgctgaccaggaatatcaccaccgcattttccggtgccagttacggcattattaccgctgaaaccgccagcacctcgtcgtttgctaaccagctggccagcgcgtttgcattctggcgtagtgtagtggagggctggtcgatggccctgaccggcagcggcaatatcaccctgactgacccgatcacaggaaagcaggtgaccgtgccggcgatagccgggatggcgaaggcctcggatcttaacgcgctggcaaaactcaccggaggaaacaaactcgacggctcgcaggttataaccagcgataatgccggttttatactcggtaagaactcagatctggctctgctcaaaaaacaggggcaaggcgggacaattgccgttggctcgggaacaccgttcagggttcagcgttcaagagcgaccactgtatcaccggcagacacctttgatgacatcctcgttattgatgccaataaccaaacgacactgcctggcgcgctgtctgccggcggcaatatcgataacacgtcgaagggtaaagtgttgacgcaggcgattgagctctcatttagcacgccatacatcgactttcattttaactacagcaccgacgacttcaccgggcggattatggccactgccgccgatcaaattagtgtgcaaggtagtcattggcgagttgacagggatcttcgtgttggtggcatggcagatattggaggctggacgcaatgccgcgacgacctttcggccaacaaaacagactttggatcccctgctattggttcgttggtttcaggcggaaggattcgatctcgaatgctcgggcgcggcggtaacgttgacacctccggggcgtggggcggtttctatcttgaagagtacgtgggaaccgaacacaggattgtcatgtatatggacggcttcgggagaacggacgcatggtcattccgcgcaggggggacaatctctacacctaaaggcgacgtcctgaccactggttccgacgtgcgcctgaaaacagacttcacacaagcgtctgaaaacgcctcagagcgcattgagcgcttaggggtgtgtgagtaccggatgaagggggaaacgcgccggaggcgtggttttatcgctcagcaggctgaaaaagctgatgatctgtatactttcctcggcatcgagcaggagattgatggcgaaaaatttaaggtgatgaatgtggattacacggcaatcattgctgacctggttacggtggcgcagggtttactggttaaaaatcaggaactggaaaggcgtatatctgtactggaggggatctga

SEQ ID NO: 248428 - DNA, 12546 bp, Klebsiella pneumoniae
atggcaaataacataattaaagggcgcaagggtggcggctcaaagcagcgtacaccgacggaacagccggatgatttacagtccgttgcgaaagccaaaattctgctcgcattaggtgagggtgaatttgcaggtggtttaaccgggaaagatatttatcttgatggcaccccgcttgaaaatgctgatggttcgcaaaacttcagtggcgtgtcctgggaatttcgacccggcacgcaggctcagacttatattcagggtattcccggcactgaaaatgaaatcagtgtgggaacggaagtttccagcaagacagcctggacccatacctttactaatacccagctttctgccgttcgtgtccgcctgaaatggccgtccctgatgaaacaggaagatgacggcgacgtggtgggcaataccgtcaagtatgcgattgacctgcagaccgacggtggcgcctggcagacggtgctggaaaccgctgtcacgggtaaaaccacctccggttatgagcggagccatcgtattgatctgccccaggccggcagtacctggacgctacgcctgcgtaaaatctctccggatgcaaacagtgtcaaagttggtgacgtgatgacgctgcagagctataccgaagtgattgacgcgaagctgcgttatcccaacaccgcgctgctttatatcgagttcgactccagccagtttaatggctccattccgcaaatttcctgtgagccgcgtgggcgcgtgattcgtgtgccggataactacaatccggaaacccgcgaatataccggcgtctggaccggcgggtttaaatgggcctggacggataacccggcctggatctattacgacattgttatagcagaccgttttggtctcggtaatcgtctgagcagcgccaatatttcgaaatggacgttgtaccagattgcacagtactgcgatcagctggttcctgacgggcgcggtggtgacggcatggagccgcgctatacctgtaacgtctatgtccaggaacgcaacgatgcttacaccgtgctgcgagactttgccgccattttccggggcatgacctgctggaacggtgagcagattgttgtgcaggctgatatgccgcgtgatgtcgattttacctatacgcgcgccaatattatcggcaaaccccgttattcgagcagcagcagccaggttcggtacaccaacgccctggtttcctggtctgatccggataatgcttatgctgatgcaatggagccggcatttatcccggaactggtttcccgctacagttttaaccagctcgaaatgacggcgattggctgtacgcgccagagcgaagcccaccgtaaggggctgtggggcatactgaccaacaataaggaccgcatggtcgaaattgatgtcgggctggacggtcgcattcctcaacccggttatatcattgccctggcggatgagttgctggccggacgggtcaacggcgggcgaatcagcgcggtgaatggccgggtgattacgctggatcgtgatgtggatgccaaacctggcgaccgcctccagctaaacctgccatccgggatctcacagagccggacaattcaggctgttaacggacgtcggcagattacggtcacaacggcgtacagtgagacaccagaacgggaatgcgtctgggccattgaatccgatgacctcttcctgcagcagtaccgggttacaggggtaaaagagaacagcgatgccaccctcacgatcaccggcgtggcacatgacccggataaattcccccgcatcgataccggcgctattatcgaccagcgcccggttagcgtattgccggcgggcaaccagtcacctcctgacgatattgtcatcacatcccgctcggtcgtgaatcaggggatcagcgtcgaaacgatgcaggttaactggtcagcggtcagcggcgctattgcctacgaggcacagtggcgccgtaacgacgggaactggattaatgtgccgcgcagctcgaccacctcgtttgaggtcagcggcatttatgccggtcgttacctggttcgcgtccgtgcgatcaatgcggcggagatctcgagcggctgggcgtattccgaagagaaaaccctgaccggcaaggtcggcgagccgctggcaccgctggcgctggcaacccgttcgctggttcatggggtccaggttagctgggagttcccgaccggctccggggatacgctgcgcacggaactgcagtacagcaaaaaccaggacggcagtgcgccaatgccgttatcagacgtggcctatccggggaaaagctatcagcagatgggcctcagtatgggcgcagaattctggtaccgggcgcgccttgtggatcgtcttggcaatgaaagcccgtggaccggctgggtccaggggatggccagcgataactttgatgactactacgaaaacctgaccgacgcgatcaaggatacggttgcctgggaggaaacgcagcgcaccattagcgaaacgcaggaaggtatccgcaatacgcagcaggaactggagcagaccgctgaagctctgcgtaaggaagccgaagaccaggcgaagcaggtcagccaggatattgatgcatcggcgaaaagcatcactgctgatgttgacgggaagatctccgccgtgaataaaaccatcacggatgagatcacctcggtcaatgaggctctcgattctggtctggctcaggcaaacaaaggcgttcaggaggcaaaatccgccgttgcagatgcgaacaagcagatcgcaactgtgaacaagtcgttgaccgacagcatcacccaggtaagacagtcagtcaccgatacggctgcggaaatcaacgccaccatcgacctggagattgccagggtcagcaaaacgctggccgacggcgatgccgcattgaatgcgcagataaagactgccgaaaatggcctgaagcagtcgctgtctcaggttaacaccacgctgaccaatgcagtgaagcaggagaccgcggatcgtatcgccgatgttaacgcgaaggcggcacaggccgctgatgaactgctggcggcaacgcaggggattgaggcgagtatcgagagcctgtctgaggccgtgacctctggtgacgaaaatctggcacgccagatctcacagattgccgctggcacaggggagcagtttgactctctggaaatctggtatttcgacaaagatgccgaaggctggacggaagacgacaacggctacacgccaatgagcgtcaccagcgatggctggctgaaagccaacaattcgacttcaacctgtcgatcccctaacggcctgacgatcgatgcccatgcttatcgtttcattaagatgcgcattaaaaaggttggtagcccaacctggaatgccaaaatgttctggatcggcgctgatgaaaccggctggaatgctggtcgctccgtggttatcagtgagccggaatacgatgacaagggtattgcgattctgaccctgcacgacattgagtggcgggattcgacaacgattcgtcgtttccgcttcgatttcacaacgggccaggatgcggacaactatctgttatttgactggatcgccgttggccggccagcacccggcgccagtacggcggctctgcaggatgtgcgcagtacgctgagcaacgcgctgactgccgaagcgcaggcacgcagcacgctggcggcgcagatgcgtggctcctatgagggcagcgatctggataaagtcacctccgggctgctgtaccaggaaaaaaccgcgcgcgttaccgccatctcggcggaagttaaggccagagagtccctgcagacgcagtttaacgacaacaaagctgctgtttctggtgaactgagttctctgacgacagagcagagcgcgcaggcgagccgtatcggtggcctggaaaccagcctcgggaaaaaagccgatgcggccgcgctgacgtccctgacgcagaaagttgagcaacagggcgccacgctgacatcgcagggcgccgcgttaacatcgctcactaaccgggttggccagacggaaacgggcctggctggtacgaatgaggcgctgagcgggctgcagtctgttgttacccagcagggcgacaggataaccagccagggtcagtccatcacgaaactgacgagcgatttgggcacgacaaatgccgcgctggcgaagaaagccgaagcggctgcggtcactgccttaacgcagcaggtagagcaaaacgggcgggatattcgcagcaatactgacagcatcaccagcctgtcgaatcaactggtcaatggccagccgaatcgctggtcccgtcgactctatccggtgcagctggctaacgccgggacagtcccgtcattcagcgatgttcgcgccgtggcgccaacgatcgtggatgaggtggccgacgcggccaaactggactttacgtccgccggcagctatctgatcgcgctgtattcctgccaggtgaaagtggccgcagataccaccatcacactggcgcccggcgccagggtttttgatgataccggcgccatatttgtgaatggggttcaggtcgcctggggtaacgccagctggaataccgtcagttttgaactgaaagccggctggaacaccgttgagtttctggtgaatcagtggaccggccaggcgtatatcaacctgggcctgaagctgtcagacaaggttgctgagatgtactccggtctcggggtttccgcgctggcaaacgcagccggcgtgctcagctcgaatgtcagccagattggcaacgaggtggtcagcaattcgcagagtatcacccagctccggaatgcgctgacgcagacagacgcgaacgtggccagcaaagcggatcagacggcgatgaactcgctaaccggacgagtggagaagacggaatccgggctgacggctgctaacgccaacattacctcgctgaaatccgctgtacgggccggaaacgcatcaggcggagatttaattcccaacccgacatttgacccggcttacgaccagatggggtttagcgtcgtatccacgacggctgaggaggtccctcctggctgcccgtatggttatgcggccagaattgccagccgggatcaccatcctaactttgccgcgttcccggccacgcttaacgatgtgattgagatcagcgcactggttgcctgcggcgccggcacggcgaattttaatctgtatgttggcaccgccgttaggccagatacgagcaccggtgcgccactcatggcggggggcggaaaatcaccttccgcgacctggcagagaaccacctggcgcttcaaggtcacgcaggcgatggtagacaggggttatatccgcccgttcctgcagatctcgcagaacagcccgtatggcaccgtatggttcgttacggactggcatatgcgaaatgtgacagcggcgcaaaaggttcaggatactgcggatgccacggcggtggcggttgactccctgaccactaccgtgacgcaacagggtaatcagctgacctcgaccggcaaccggacaacccagctggaaaacgggctggcaaccaccaatgctgcagtggccaaaaaggctgatgcgacagcggtgcaggatttgaccaataccgtcacacagctgggcaatgacctgacggctgcgaacagcgccatcacgagactgaccggaaatctggctaataccgataaagcgctggcgcagaaagccgatgcgactgcgttggccacgctagacacgaaagtgacgcagcaaggtaaaacgctggagagccagagtaattcgctgacgaatctgtcgaacagcctctcgcaggtcacggcagatatcgatgccagcggtcagataccgggtaacctggtcgtgaatccctcgtttgaacgcgggctggctggttataccgggcaatcaagcgcgaccagtgtggtggaactttccgttcctcacagcgggactcgggcgctgaaggttgatccgggcaatgtgactccggggcaattaatcccgtttgttcagggacgaacctatgaaatcggggtgtgggtcaaggaacccggagcgacgacggataatggcgcggggaacaataagctgcggatcggcaactctgccggtcagccggtttttgagcgtccgtacaacagcggtacggtggggacaaactggaccctgatttccggtcgctggaaagcgacagagacaggcagtctaccagtaacgctgaataactatctgaaaagcggcagtcgctacttcgatgatttttacgtcactgacgttactgaccgggtggacatcgatgccaccgccggcgccgttaccggtctgacgagccggatcagtacagcggaagggaccatcacctcgcaaagccagcagctgacgaacctgcagaacagcctgaacacgaccaacagcaatgtgtcgaagaaggccgatgcaacggcactgacctcggtcgataaccgggtgaaagaggcggaagggaaactgaccacgcagagccagcagctgacaaatctggcgaatgtgctgacggccacccgcaacgccggcgacaacctgatcccgaactttgattttctgcagggcagcactgcctgggatattcagtatccagccggtgtgacctttggcgatttcggggacgggaaagcgggggtccggctgaaccggacgaccactatcagcccaggaattttctccaacaacaacaagccggtgccgctgaatggccagcgcaagtaccgggtggtggtgaaggccaaaggtgtttccggagcgatgagtctgctgatccgtcgccagaacaaaattggccagacggatagcacgtatgaggataaaacggtcacgctgaccactgactggcaaaccatcacctgggaaaccggattgacggctgccggcgcggacgggcagaacttcaaactttattctcatccgacaaacggtgaaatctggctcgattccgtccgggtttttgatatcaccgatgaaaccaacatcaaggcgaccagcgatgctgtttcgtctctgaccgggacggtgacgaaccaggggaacaccctgacatcacaggggcaatccatcacggcgctgaataacgcgctggaaggggtcaaaggcgatgtggcgaagaaggctgatgcgtcggcggtcagttcactgaccaaccgggttacccagactgaaaaggatatccgtagccaggccgacagcctgaccagcctgaatacatcgctgaagcagcaggcgacacggggagccaacgtactgccggacggcagttttgaatcctatgccgtcggcgatgttctcagtaatgcccgcgccgttatcaccagtgaagctgcgcacagcgggaccaaaagcctgcgtgttacgcgcagtacggagtacaacccgaacgcgacggataataacgatacccatatcttttcaggcatgcaggttcgcgataacgcggtttattacgtggaggcgtgggttaagttgccggctggctcgaccgccgatccgaccgtttatatggtgctggggttttccttccaggattctgccaatggctggtcgtggcctggcctgaacgtgaaagtctccgagttgtcggtggacaactggacaaaagtcagtggctatctaaccaacaaccgaaccgcgctgaaacaggcaatggtgaggatctccatcccgaatacaccaaaagttcgcctgggtgacgccttcctgattgatgatctgatcatcactgacgtgaccgatgcgaaagcggcgctcgatgccgccgatgcgaatgcgcaggcgctttccagtctgtccgcgtcagtcacgcagaacgggcagaacattacgtctcagggcagcgcgatcacgaaactgcagtcggatgtgacgcaacttggtaaggatatcagcggcaaggccgatgccagcgcgctgacgaatctgaccacccgcgtgacggctaccgaaggcagcctgaaatcgcagggggacagcctgaccaacctgaagaacagcctgaacacgaccaacagcaatgtggcgaagaaggctgatgcaacggcgttgcagagcctgcagaacaccgttgagcagcaaggaaaagacctgaccgcgcaaagcaacgcgctgacgaatcttcagaacagcctgagcatcaccaacgggaatgtggctaagaaagccgacagtgcggccgtaagtatgcttagtgaccgtgtcagcgctagtgaaggaatgctgacatcacaaggtaaccttttgaccatgctgaaaggatcgctgtcttccggcagtctcatcggcaatggtggaatggaatcagatttatcgctgtgggtagattcggggactggctctggatttacgtacaacgatgctgaaaaagctttgcaaacaactacagcctccatccggacggcaaacatcacgaaagtacccgtagaggcagggaccgtcttgacgcttagtcttgaggtgcgaagctcggttacgatgacaaacgtatctaccgatacggttggtgttattgcagatttgtcggatccggtgaactggcttagctcttccacgaaatggttgagcggtgtaaccaccgactggcagaccaaaacttttaccctgaacattccggctacttttatcggtaattacgtgtatctgagactggccgctgggacactgacaccatcaacagctcgcttgttgatccgtaacgtaacgctgttttcctcgaatggtgtatcacaaaaggccagcgcgcagtcggtaagtgacctcactaaccgggtcaccagtgcagaagggaagatcacctcccaggggcaggctatcacgaagctgcagggcgatttgagcagcactaccgataaggtcaacaccaaagcggatcagacggctcttaacgcgctgactggccgggtggaaaaaaccgaggcaggcctcacggcagccaacagcaatatagtcagcctgacagcggcagtgaccgccgggaaggctgctggggatgattacattccgaacccgtcacttgatccagcctatgaccgcatggggtatgacgtggtggagaccactgctgcaggtgtgccggctgattgcccgttcacgtatgctattcggttggccgggcgagaccatgtgccaaaaatcaacaatatcgccgtgacaccgggcgacgtttttgaaatgtctgctctggtagcgtgtggtgccggcagcgccgactttaatttttatattggtcgtgccaccaccgccaccgatggcatcaaggcgagaacttccgggggaaacaccaagaccaccaccgcgtggaaacgagccacctggcgctttactgtgccggcagacacgaacttcctgcgaccgttcctgcaggttaatcagagcagcccgttcggcactgtctggtacgctgccgactggcatatgcgtaacgtgacggcggcgaacagtgcgcagaaaaccgcagatgcgaccgcaaaagcggtggattcactgaccaccacggttagccagcagggcgatacgctcagcagcatcggcacacggaccacctcgctggagaacagcctccggtcgacaaacgatacggtgagtaaaaaggctgacacgacagcggtgacgcagctgcagggcacggtgacgcagcaggggaatgacatcgcggcagccaacagcgcgctgacaaaactcagcagcgatctggccacgacgaatgcgaatgtgaacaaaaaagcggacgcaagcgcgatgaacaccctgcagaaccaggtcactgagcagggcaaaacactcagtgcgcaaggggattctctaacgcaactgagtaacagcctgagccagacggcagcggatattgacgccagcgggaaaatgccgggcaacctcattgtcaacggcagttttgagcgcggcgcggcgggctttaccggctggagcagtaccgcgacggtggccgatttacaggttccgcactcgggtaacaaggcactgaaaatgtccgccggccagtctaacctggtcggacaggaaatcagtatcacccagggtcgtacctaccgcatgggggtatgggcgaagcaggatccggggaccacgattaaagatgcgggtaacacgaagtttcgtgtggctgacagcactggcctgctggtcggctcaaactacggaccgtttagttctggctggcaactggtaacgtttgactggaaagccacgaagaccacgacggccagtttccagctgacgacctccctcagcgcgggggcaatgtatttcgatgatttccatgtcctcgatgttacggatgaaaaggatatcgcagctaatgccggggccatttctcagatgaatacccgcgtcaccgctgctgaaggggctatcaccacccaggcgcagcagctgacgaaactcagcggcgatctggccgtcacgaatgcggcggtcagtaagaaggccgagcaaagcgctgtcaccgggttgaccacccggatgacgtctgccgagggtaaactggattcgcagtcgcagcagctcaccagtctgcagaacagcctgaccacgatgaatactgagctgggtaaaaaggctgacacgtccgcggtgagttcactgaccggtcgcgtaagccaggtggaaaacaccatcaccagccagtcgcagagcatcacgtcgctgaccagcaccatcaataccatccgcactcagggagctaatccgtgggttgacggtacgtttgaaagctacagcgatggccaggtgctgggcgggaacggcacagccgttgtggtggcgtctcagaaattcaccggcggtaagagcctgaagttgagacgggatgagaacaacagcggcaacagtgataaacagcttggcacctggcagtcagtccgtgaggacgcgaagttccggtttgagttctgggccatgatgccggcggatcaggcgccctcctccgggtggacaacgctggtcggtatccagtcgcagaatgctgccgggcaaaatgcgtggcaggcggcggtcactgtcagcgaagcctctctgggcgcgcgcgataagtgggtgaaattcacgggtatcgccagtaacaacggggcaggcagaacacgcgcggtggtctggatctccactcgtggcgccaccggcaacggtacccctggctattcactgtatatcgacgatctggtcatcacggatgttaccgatgcgaaagcggcacaggatgcctctgacgcgacggcgagcgccgtgagcggcctgacggcgcgcgtaacggatgccgaagggaaaatcactgcccaggcgcagcagcagacagcactggcctcgaaagtggataacgccaactcccgcgtcgataacatggcgaagacgctgagcgacagccagagcacacaggccagcctgaatacctcgcttcagtcgcagattgacgcgcaggcggccgccaacatcaaaaaccagacgacgctggacaacacgattaaatcggtggccagtatcaccagtacccagcagacgcatgcaacggcactggaggcgctggcaacgcagcagacgaccctgacatccagtgtcggggatctcagcgcttccgttcagaacaccgccaaaaccgtggcggatgtgaatggtacggtgagttcgctgtggtcgatgaaggttgagacggttaacgggaagaatgttggcgcggggattacgctgggcagcaatggtgaaacgagcgatatgatcctctacgctgaccgcttctcgctgtttaaccgtaataatgcgacggctgttccggtgatggttgccgaaggcaatgagctgtatatcgatacggcacgtatcaaaaacagttccctgacctctgccaaaatcgcggacggttccattacgaacgcgaagatcggtaacgagatccgctcgaataactttgttgatggctcgcaaggctggcgtatcgccaaggatggctcttcgcagttcaataacgtgatcgtccgtggcagggttgaagcgaatagcggcgtgttccgtggcactgtccaggcggattcgttcattggtgacattgcggtggccaaaagttacgacagcctgactttccgccgcaaccagacggtacagcggaacggtgcgtatcagaacagggggtatagcatgacagtggttctggcctgcaccctggtgtgccagacctatgggacgggcagtggcctggggtatacctctgatattacgttcaacattggtgggcaggaggtaacccgccgtatcttcgtcgatgccggtaatatcacaggcggcaccacggcctttgaattgcggtttgccgcgcgcctggatgctgactacaacaatgtcggcttctttatcagagcgtcaggtcgtactgccgcgattgattacacctgcacagtcgagaacatcaccgcaaccgcatttcggacggacagcagttcatttagctaa

SEQ ID NO: 248429 - DNA, 711 bp, Klebsiella pneumoniae; identical to SEQ ID NO: 246016

SEQ ID NO: 248430 - DNA, 339 bp, Klebsiella pneumoniae
atggctattgagatattcacctggagtccgcgggttaatccccagcagaccgttaactttcgtgtccggaaggcgcagttcggtgacgggtatacgcaggtatccggcgatggtattaacacccgatcacaggattgggagctgagttttgtcggtacggaggactatatccgtccgattaagcagttcttcgaccgtcatgcaggcacccgcgcgtttcagtggaccccgcctctggaagaggtggggcttttccgctgcgaacaatataaaccggtgccgctgggcggcggaaattactcactttcagccacttttattcaggcatttaaaccatga

SEQ ID NO: 248431 - DNA, 402 bp, Klebsiella pneumoniae
gtgatccgaatggaagttaaagggctggatgagctggagcggcagttaatggccctgggcgaaaaagtggcgacgaaggtattgcgggatgccgggcgcgaagcgctaaaggtcgtcgaggaagatatgaagcagcatgccggctttgacgaaacgtctgccgggccgcacatgcgggactcaatcaaaatccgctcttccacccgcaagggtaaagggaacgcggttgtaacgctccgtgttggccccagcaagcagcaccatatgaaggcgctggcgcaggagtttggcacgattaaacaggttgcagacccctttatccgacccgccctggattacaacctccagaccgttttgcgcgtgttaaccgtggaaatccgaaacggcattgaaaacaggtag

SEQ ID NO: 248432 - DNA, 318 bp, Klebsiella pneumoniae
ttgatactgaaattggatgatgtgaaaacccagctacgcctggaactggatttcatggagcatgacgccatgctcacgcaaatggtgaacgccgcgcagcggagcatcgagcgtgattattactgcaagctggtcaccagtgatgaagagctgcaggcactcccggagaccgtccgcggatttatcgcggatgaagatatccggctggccattcagtttctggtcagcgatgcgtatctgaatggccataccggacagtggctggaaaccgctgcggtgaggcatcttcttttccccctgcaggagcatacgctatga

SEQ ID NO: 248433 - DNA, 288 bp, Klebsiella pneumoniae
atggctgcgaaaaataaagcagtggagccggaagaaacggtcgtacaggacaaccatgcgaccgagaccgcacaggataaccgtgcgaccgtggtcgcacaggcagaacgtaaatccgttgtgttcctcggtccgcatagccgttattcccgtggtgatatcgcgtggtttgaaggatcgcacgccgaagagctggttaagcgccgtatcgcggtatggccgaaggatgccgaacgtgcgctgaaaccgaagccgggagacagcgattttgatactgaaattggatga

SEQ ID NO: 248434 - DNA, 852 bp, Klebsiella pneumoniae
atgaaaaaatcattggcatcaatgtgtctgagcgctgtattaacggtcgctttttcttatcacgccgtcgcggccgatcttccggaaatagaaaagtccggcaccttgaaagtggcgacggaagatgattatgcgccatttaactttatgaataatggccaggctgatggctttaacaaagatatgcttgaggaattacgtaagtacgccaaattccatgtcgaccagagcatattaccgtggaccggattattagcggctgtctccaccgggcaatacgatatggccttaaccggggcggttattaccgatgagcggctgaaggtctttgatttcaccccaccgtgggcctccgcgcagcactatttcgtcaaacgcgctggcgatacctcgctaaataccattgccgatctcagcggcaaaaaagtgggggtacaggccgggagcgcgctgctggcgcgtttgccggagctgaaggcgatgctggagaagaccggcggcaagctgggaccggtggtggagtatccctcctatccggaagcctacgccgacctggcgaataagcgactggattacgtgattaacgtggtgatctcggtaaacgacctggcgaaagccaaaccgaaggtcttcgccaaagggctggccgtctccggaccggggtatatggcgtggccgatcccgaaaaactcgccgcagctgctggcctatatgaccaggtttatgaaccacatgaaggagaccggcaagctcgccgagctgcagaaaaaatggttcggcgaaacctatgacaacctgccgaccgaggcgatcaccagcccggaacagtttcacaaactcgccggactgtaa

SEQ ID NO: 248435 - DNA, 1335 bp, Klebsiella pneumoniae
atgaaagcccgatataaagccgttgtcgaccgatatgcgcaggcgatccgcagcgggcagctgcccgcaggcagccgactgccgacgcaccgtacccttgccgccggggagcgcatctcgctggccaccgccacgcgcgtctatcgtgaactggaagagatggggctggtcagcggcgaaaccggccgcggcaccttcgtgcgcgacctctcgctgccgccggggcacggggtcgatcagcagatggtcgccgccgatgtcgtggatctcaatttcaactacccttcgctgccggagcagggcgatgcgctgcgcgaggcgctcaggcagctggcgatggcgggcgatattgactcgcatctgcgctatcagcctcatgcagggcggctcgccgagcgggacattatcgcccgccatttgacctgccagcactttgcgccggacgcggaaaatgtcctgatcgtcaacggcgcacagcacgggctggcggtgaccgtcatggggctgttacgtccgggggatgtggtggcggtggatgcgctgacctattcgggcttcaaagttctggcggcgctgtatcatctggagctggcggcgatcccctgtcgaccggagggaccggacctgcaggcgcttcagacgctgtgccagcagcggcgggtgcgggcggtgtataccatgccgacgctgcacaatccgctgggctgggtgctcaacaccgggcagcgacaggcgctggccgatctcgcgcgccagcacgatctgctgattattgaagatgcggcctatgcccggctggtgagccatccgccgcggccggtggtcagctatgcgccggaaagaacggtgtatgtcaccggattttcaaaaaatatcgccaccggactgcgcgtgggggtggtgatttctccgccgcgctatcggccggagattgagcgcgccatccgggccacgacgtggaatacgccgacgctgataagttcgctgatctgcgcctggattgaagatggcacggtggcgcgctttgaaacgcagaaacgccaggatgcgcgacagcggcagcaggtggcccgcgaggtgctttgcgggcttcccgtcgtcagtcatcccgattcgtacttcgtctggctgccgctgggtgaagagagccgggccgatcggctggcgaatgcgctgatggaacgccgcatttcggtatcgaccgccgagccgttctgcgtctccgccacgatcccgcaggcgctgcgcattgcgctcggatcggtgcctttcgacagcctgcgcccggcgctgctcagcgtgcgcgacgccgttgagtatgaacaataccgctaa

SEQ ID NO: 248436 - DNA, 375 bp, Klebsiella pneumoniae
atgaggtactggttgctcgttatcttaatgaacgtgctgttctattttatcgtgaagcatgttgctccggaatggtatggttccccttgttattatgcaggccaaatcatctgcacactaatagctgcggtcatcacatggcgtgatccgcctgactggttagatggaatcctgctcggcgtaataaaattcggcgttctgattgccgggattatattctttgtctggggcatcgggtacaagctggcattctgggggcaacatgatcctaataccatatatgcaagtgcaaacgatgttattttgcctaatcttgcgctgggcacgggcgtcttgatcgcgggatgggtatacattagatatttaaagcgctaa

SEQ ID NO: 248437 - DNA, 1974 bp, Klebsiella pneumoniae; identical to SEQ ID NO: 74966

SEQ ID NO: 248438 - DNA, 267 bp, Klebsiella pneumoniae
atgcacaccgctttttcttccccgtcttctgctcctgtcgcaccgctgatgccggtctctgacgccgttcaggagcgctttatccgcctgcccgaagtgatgcatttgtgcgggctgtcccgctccacgatttacgacctcatcagccgggaggctttcccgaaacaaatctccctcggcggaaaaaacgtggcgtgggcgcagtcggaaatcaccggatggatggccgaccgtatcgccgaacgcaaccggagttacgacgcatga

SEQ ID NO: 248439 - DNA, 195 bp, Klebsiella pneumoniae
atggctacgaccctcaccccgtcacacccgcagtttgtctttgtgtttgccgctgttcgccgcgcagaccgtcagccccgtatctgtatgctccgcgccgtcgccggggatgaacacgccgcacgcctttccctcgtccgcgattacgtcctctcgtttgccgggcgtctgccggtggcggaggtgcgcgcatga

SEQ ID NO: 248440 - DNA, 246 bp, Klebsiella pneumoniae
atgatgcactgtccgttctgcaaaaagtcggcgcatgcccgcacctcccgctatctgtcggagaacgtcaaacagcgctatcaccagtgcaccaatattgagtgctcggcgacgttccgcaccactgaagccatcgacgaggttatccggcccccggcggagaaaacgccgcctgtcgcggagccggtcacacccccggcaccccgtaaagttcagggctgctacagctcgccataccgtcattaa

SEQ ID NO: 248441 - DNA, 360 bp, Klebsiella pneumoniae
atgcgccgaacggtcgagcgcatggccggtcaggagcgcaggctgctgactgagtcccatcagctccggggcgagcgtggccgccagttcagcgccgtgtgtctgcataaagtcattcagccggttgcggatactgatgcgctgtaccgcgtcatgggagcggatatagcgtccggcggcctgatttatctcccattttttgacgtcgataatatcgcgcagtgtctgcattctgcccggtatacggtcatccccggccagcacctgttcctgatattcctgctctgcggccgccagttcggctttacggttcagccaggctgtttcgttcttctgacaggcttcaaaggcctgctgtag

SEQ ID NO: 248442 - DNA, 246 bp, Klebsiella pneumoniae
atgatgcactgtccgttctgcaaaaagtcggcgcatgcccgcacctcccgctatctgtcggagaacgtcaaacagcgctatcaccagtgcaccaatattgagtgctcggcgacgttccgcaccatcgaagccatcgacgaggttatccggcccccggcggagaaaacgccacctgtcgcggagccggtcacacctccggcaccccgtaaagtacagggctgctacagctcgccataccgtcattaa

SEQ ID NO: 248443 - DNA, 564 bp, Klebsiella pneumoniae
atgcatgacctctttctccggctcggtgtacccctgatggccgatggtgttggcgagcgggtttgccatcacatccgctttcagcaccatcgcccggaccagtggcccgagggtgtcgttcagcgcgcggtcgagctcttccttggcgtattcagacagtacggcatgatgcgcctggcggaatgcacgcgcggtgctgttgcaggtggctttcaactggtcacgttcaaaggccagcacttcggtcaggttgtcacattcctgcgccagctcccggcgggccacgcgttcgatatggccgcttttcagctcatcggtcagcatggcacccccggcacggaaagcggcgcgccaggtgcgggtatcgctcccgttgtcctcctccagctccgctttctgctcctccgcgcggctgatggccgtcagggtgtcctccatccggcgggcctgttcaagatgggccgctctggcggcggccagtcgctccagcgccggtttcaggtaatcagggataaagggggtgtcggtcatggcaggtttcctcgtggtttcaacttgaggtga

SEQ ID NO: 248444 - DNA, 246 bp, Klebsiella pneumoniae; identical to SEQ ID NO: 248442

SEQ ID NO: 248445 - DNA, 213 bp, Klebsiella pneumoniae; identical to SEQ ID NO: 230494

SEQ ID NO: 248446 - DNA, 1341 bp, Klebsiella pneumoniae
atgacgatgccatttttacagaatatccccccgtttatcttcttcaccggcaaaggcggcgtggggaaaacctctctggcctgcgcgacggcggtatggctggctgaccagggccggagaacgcttctggtcagtaccgatccggcctccaatgtcggtcaggtcttcagccagactgtgggccaccggatcactggtatccgcaccgtggaaaaccttgcggcaatggaagttgacccgatggcggccgcgcaggcttaccgcgatcgcgtgctcgatcctgttcgtgaactgatgcctgccgatgtcatcagcaacattgaagaacagctttccggttcatgtaccacggagatcgcggcgtttgatgaatttaccgcgctgctgaccagtcatgaactgcgcgaaaaatatgatcatatcgtctttgatactgcaccaaccggacacaccatccgtatgcttgagctgccgggcgcctggagcgggtacctcgatgcacatcctgatgctgcggcgaacctcggccctctggtggggctggagaaacaacaggaccagtacgctgacgcagtgaaagccctctctgatacggcactcacgcgactggttctggttgcccgcgcacaggcgtcgaccctgaaagaggtctcccatacccacgaggagctgtcggctatcggtctgcagcatcagcaccttgccatcaatggcgtgctgcctccctttgccggtgaacaggatccgctggcgcacagtattctggcgcgggaggaacgggccttacgggccatgcctgaaaacctcgcgcatcttccccggtcgatgctgtatctgaagccttttaatctggttggtctggaagccctgagggcgctgtttacagagagcacacttgttctgccggatccgggagccacgctcacgacggtcgatttaccggagcttgcctccctggtggaggacctcagccgagcgggaaaagggctggtcatgacgatgggaaaagggggcgtggggaaaaccacggtggcggctgcggtcgcggtctcgctggccagacgcggtcataaagtccacctgaccacctccgatccggcagccacctgtcttacaccctggatggctcgctgccaggccttcaggtcagccgtttcgatccaaaagcagagactgagcgctatcgtcgctttgtgctggaaaatcagggaaaaggtctggatgaagagggactggcggtactggaggaagatctccgttccccctgcaccgaagagattgccgtgtttcaggcattctcccggatcatcaaagaggccaacgaccattttgtcattatag

SEQ ID NO: 248447 - DNA, 837 bp, Klebsiella pneumoniae; identical to SEQ ID NO: 137381

SEQ ID NO: 248448 - DNA, 507 bp, Klebsiella pneumoniae; identical to SEQ ID NO: 211393

SEQ ID NO: 248449 - DNA, 993 bp, Klebsiella pneumoniae
atgttaataaaaatgcagctaataaacgaattagagcatgacttttcagttttaaccagttatataacttctcaaaacagcagggggctcactgatatcaataaggaaatggaagaatacttactccctatccttaatgttgtatataaagctaacctcatcaaccttaataaatttaaatataactacccagcaatagatcttggtgatataaaaagcaaacgttgtgtacagataacatctactagtggaaagacgaaatttgataaaaccatcgaaaaattcatatcacacaatattaactcaacctataaccatatatcatttgtaattataaacacaggaggaataaaaaaacagaagcaccccacattatccacagattacattaacttaacagatctacttaaagaaatatcaaacctcgacattgaagaaataaaaaaaatattaaaccactcaagaaaaaatatatttagacatgaaaatacaaatgataaaactcatgaattattaattgagatatgtgataaaattattgaaaacaatatttttaaaacatggagtcattggacatcatatattcaaggttgttacatacccaaactacatgaaaatacagtaaactccatcgattacctatcaaaaactatacaacttactcgattccctaacacatccgtttcgattaaattaaaaaaagagattgaaaatgtaagcgacgcattggttaaattgaaaataaaaattttatgtaattcacaaaagttagcagacaactcttttcaaataattaaatatcactctgaatattattttaatgaaaattatggccaagattatcaaaaatacctcactctacttagtgaaatatattcactgctaaatgacgtgtcagaatcattaaattcatttagtgattatataattgaaaatattgatcaaaaatatataaaattattaccaaattttaacttaaatattcatgaataa

SEQ ID NO: 248450 - DNA, 363 bp, Klebsiella pneumoniae
gtgaaaaaaacgctgttagttgtaaccctgttaggtgttatggctactgcttcggcggctcccacccaagagcaatatgatgcgcgagttagagccgtgaagctattcaaaaacgaagcaaaatcaatcaaaggcttggctgagagtgatgctgagaaacttagcgatcaagtgctggatagtttaaaaacaatcaataaagaacagctatctaaagggatgaattgcgaggagataaaagaatttatacatgcctcgctatcaaaaaagaaaactgaaacagatggtataaacgctcttatgttcaaggctgataagttccaacagactgattgtgcaatacagcaggcgtggatgaagtaa

SEQ ID NO: 248451 - DNA, 447 bp, Klebsiella pneumoniae
atgaacggatatgaaaatctttactcagcaatgattcctgaacttgctaagcactaccaaattactgaatttgattacagaaataatcctcacacaaccagcgtatcccattgcagaagtcatctttataaattgattcttatagaactttacctgcatgagcatcgtctaaaatataaaaattcattaattcttcttgatggaattaactctctgcatcacttggtttttctaaagacgaactggagccttgagcaaattaacagcttgagtctttatgcaaagttgtttgttcttcttgatgagattgtgccgagcaaattgagcgataaagctcagagttacttagaagtaattttaaagagtcagaatcttttgccagttgatctagcgagctacgcaggctgggtgataggttcaggtgaccagtttttaaaatacaattaa

SEQ ID NO: 248452 - DNA, 561 bp, Klebsiella pneumoniae
gtgacccatttaatgatcgacctggaaactatgggcaacaaacctaacgcccctatcgtctccatcggtgctgtgttctttgagccctcgactggtgaacttggcaaggaatttcatcgtgtcgtcagcctgaaaagttcaatggatggcggtgccgttcctgaccctgacaccattatgtggtggatgcagcaaagcgaagaagccagagcggctatctgcgataaagatacggtcaccagtctggttaccgcattaagtgatctgaactgcttcataagggataacgcagaccctgacaaagtacaggtatggggtaatggcgctacgttcgataacgtaatcattcgggccagctatgaccgtgagtttatgccctgcatatggaaattttggaatgatcgcgatgtccgcacaatcgttgaattaggccgagcgattggcatcaaccctcgccgcgacataccgtttgaaggtgatgtacataacgcgctggccgatgccagacaccaggctaaatacatttccgttatctggcagcgattaattcctgcacaatga

SEQ ID NO: 248453 - DNA, 375 bp, Klebsiella pneumoniae
atgaacgagaaccgattgcccgattatctcgaacacatacaacaggcagcaatcgatgcacgcagtttcgtggacgggttggccaaagaagacttcttggctgacaagcgtactcaacaggccgtcatcatgagccttattatcatcggtgaggctgccacaaagataatggatggctataccgcgtttacccaagcacacagcgaagtaccgtggcgcagcatgcggaatatgcggaaccgcatggctcatggctattttgacattaacctcgatattgtctgggacacagttcaggaatggttgccagaactgctcaaacagctgccctcggtgcttcaagattcagatcaagcgagaaatgaatcatgctga

SEQ ID NO: 248454 - DNA, 291 bp, Klebsiella pneumoniae
atgaggccatccgttgcgctcgatcttaaacgaagcattattcgtgagacgacaagccgtttccgtgttgccaatccacgagtttttggttcagtgctgtatggcaccgacctagatggcagtgaccttgacctgttggtcgatgcgctacctggtgcaacgctattagatttgggtgatttggaggacgaactgaaatcgttactcggtgttgaagtcgatttgctgacccctggcgatcttccgccgaagttccgggccaaagtgcttgcggaggccaagccggtatga

SEQ ID NO: 248455 - DNA, 999 bp, Klebsiella pneumoniae; identical to SEQ ID NO: 152288

SEQ ID NO: 248456 - DNA, 282 bp, Klebsiella pneumoniae; identical to SEQ ID NO: 152287

SEQ ID NO: 248457 - DNA, 555 bp, Klebsiella pneumoniae; identical to SEQ ID NO: 204409

SEQ ID NO: 248458 - DNA, 780 bp, Klebsiella pneumoniae; identical to SEQ ID NO: 15299

SEQ ID NO: 248459 - DNA, 165 bp, Klebsiella pneumoniae
atgacccagatcgaacgcatcgacgcctgcttcgatgaactcgaagccccgtacaaggaccgcctgtctccacgcgatgaattcatcttggcaggcatggagcggatccggcgccggatgaaggacaacagccgctccggcgagcgcaacgaggaggccgcgtga

SEQ ID NO: 248460 - DNA, 276 bp, Klebsiella pneumoniae
atgtccgggatcgtgtacgccgcactgggtgacgatctatgggcagactgcgtcgatgcattcgacggctcgctcaactcggcagtcgccctcaaggacgcgctgctgccggggtggatgatgcagatcatcgacacctacgacggcgaagtgatggttaatctcaagcagaaatgcacgcagcacaccatcgacaacacgtttgggccgtcctcagcccgcgccttgctgctggcgacgctcagggcggtgaagggaggggcggatgcggcgtga

SEQ ID NO: 248461 - DNA, 276 bp, Klebsiella pneumoniae
gtggcctttgtcgtcaacacgggcgaggtggcgggctccgggtcctttggcgtgacgcttcaggaaagcgataccggcaccagcggctggtcgaatgtggcggccgacgagatggacagcagcgcgcccgccgtgctggcggcgtcgagcgtctaccggctcggctatcgcggctacaagcggttcgtgcgcctgtcgctgacccgggcgagcggcaccagcatcgcggccggggccacggcgatcatctcgccctactcgaagcccgtggcctga

SEQ ID NO: 248462 - DNA, 132 bp, Klebsiella pneumoniae
atgtcgcagcaagagttcttcgacatgctcaaggctggcggtttggtccgcgacgacaagacgtatgaggagcacgccgaggaaacccttggcatgggggatgcgccgctagatggcaacgaacccgaatga

SEQ ID NO: 248463 - DNA, 207 bp, Klebsiella pneumoniae
atgtccgcccccggcgacggcgatgccgatacgctgatcttccgagaaggccatgggcacgacacggtgctcgcttttgacgtgggcgtggatgtgctagacttgggtggtcgggactataccgccaccgacactgcatccggcactctgctgaccgccggagacgacacgatcctgctggccggtatccacgatttcgaggtgtag

SEQ ID NO: 248464 - DNA, 1317 bp, Klebsiella pneumoniae
gtgcgggaagctgcgaagcagcggaagaaagaacggtttacagcattgttccacctgctgacagtcgaagcactggaagccgcattcctctccctgagcaggaaagcggccgccggagtggatggcatcaggtggatggactacgccggaaacatgaagaacaacataacagatctgcaccggaggctacatcagggcagctacagggcgcagcccggcaggcgtcactacatcccaaaagcggatggaaaacaacgcccgctcggcatcgcctcgctggaggacaagatcgtccagtatgcgctggtgaaaatcctgaacgcagtctatgaaaacgactttatggggttctcatacgggttcagacccgggcgaagccagcacgatgcactggacgcactggccacagggctggtacgcactaacgtaaactgggtactggatgccgacatcagtcagttctttgacagggtgagccacgaatggctgatcaggttcacagagcatcggatcggcgaccggagggtaatcaggctcatacgtaagtggctcacagccgggacgtcggaggagggtcaatggcgagcaacggaggaaggcaccccacagggtgcggtcatctcaccgctgctggcaaacatatacctccactacgtcttcgatctgtgggcgcatcagtggcgacgtcgctatgccacaggcaatgtggtaatggtcagatacgccgatgacatcgtcatcgggttcgacaaacgatacgatgcccggcgcttccgtatagccatgcagcgcagactgagggagttcggactcacggttcacccggagaaaacccgtctgatggagttcggccgcttcgctgccgaaaaccgtgccatcaggggaaaaggcaaaccagaaacgttcaacttcctcgggttcacgcacatcagcgggaaagatcgcaacggcaggttcatgctgatacgaaagacccgccgggatcggatgacggcaactctgaaagccatcaaagacggtctgcgaaggcgctggcattactcaatccccgaacagggaaaatggctcaggagagtggttcagggatacctgaactatcactcggtaccgggcaacttccccaccatgcagaagttcaggacacacgtaacaaacctctggcgccgggcgctcaggcgcaggagccagaaggatgatacgacctggacgaaagcaaacaaactggcagccgcatggctaccaagggttcgggttcttcatccatggcctgtggagcggttcaccgccagacacccgaggcaggagcccggtgcgtaa

SEQ ID NO: 248465 - DNA, 654 bp, Klebsiella pneumoniae
atgcaaatacccaccgggcgccgctgccgcgtgggaatcggcccaccttgccaggcgctgctgccgtgtggaaatccgcccatcttgccgggcgccgctgccgtgtggaaatccgcccatcttgccgggcgccgctgccgcgtgggaatcggcccaccttgccaggcgccgctgccgtgtggaaatccgcccatcttgccgggcgccgctgccgtgtggaaatccgcccatcttgccgggcgccgctgccgcgtgggaatcggcccaccttgccaggcgccgctgccacgtgggaatcggcccaccttgccgggcgccgctgccgtgtggaaatccgcccaccttgccaggcgccgctgccacgtgggaatcggcccaccttgccgggcgccgctgccgtgtggaaatccgcccatcttgccgggcgccgctgccgcgtgggaatcggcccaccttgccaggcgccgctgccacgtgggaatcggcccaccttgccgggcgccgctgccgtgtgggaatgcacccaccttcctgacggaaattaaaaaaacctgtcaaatgacaggctcaaaggtgctggtttatgtcagacgggattttgcttatcgagtattgagaacaaaaacttccctgaatcatcaatacggtacttag

SEQ ID NO: 248466 - DNA, 417 bp, Klebsiella pneumoniae
atgagcgaagcacttaaaattttgaacaacatccgtactcttcgtgcgcaggcaagagaatgcaccctggaaacgctcgaagaaatgctggaaaaattagaagtcgtcgttaacgagcgccgtgaagaagaaaacgctgccgcggcagaaattgaagagcgtacgcgtaagctgcagcaataccgtgaaatgctgattgctgacggtattgatccgaatgaactgctgagcaccatggctgccgttaaagccggtaccaaaaccaagcgtgctgcacgtccggctaaatatagctatgttgacgaaaatggtgaaaccaaaacctggaccggtcagggccgtaccccggctgtgatcaaaaaagcaatggatgagcaaggtaaatcactggacgatttcctgggctttgttgaataa

SEQ ID NO: 248467 - DNA, 780 bp, Klebsiella pneumoniae; identical to SEQ ID NO: 15299

SEQ ID NO: 248468 - DNA, 1155 bp, Klebsiella pneumoniae
atgtcgcaggatattagtgttggtattgtagctgattggctagtaacttatgctggcgcagagcgagttattaaagaattcattgaactctatccgagttctgaattatacgctcttgtcgaatatctttcagatgaagatagaattttttttcaaggaaaaaaagctaccactagcttcgtccaaaatttaccctttgcaaaaaagaaatatcaaaaatatttaccattcatgccttttgcggtagaacaattagacgtgaccaagcacaatgttgttatttcaagtagtcatgccgttgcaaaaggcgtattgacggggccagatcagttgcatattagttacgtacactcgccaattagatatgcttgggatatgcagtttcagtatctaaaagagtctggtcttgataaaggtatcaaaggattgttagctaaatggattcttcataaaatacgcatgtgggattatcgaacttctaatggcgtagatcattttattgctaactctcattttattgcccgtcgtatcatgaaggtatatggaaggcaagctgatgtaatttatcctcctgttgatgttcatcgttttgagttagtagatcagaaagaagatttttatctcacagcatcgcgattagttccttacaaaagaatcgacttgattgttgaggcatttagcaaaatgcccaacaagaaattagttgttattggtgatggtagtgaaatgatgaaaataaaaaataaagccaaaggtaacgtggagatattaggatatcagccgaatagtgtcatggaggattatatgaaaaaagcgaaagcttttgtttttgctgcagaagaggattttggaattactccagtcgaagctcaagcatgtggtactcctgtaattgcttttggtaaaggcggttcactggaaactgtcaggccgtatggtgtagctcaagcaactggtttcttttttgaacaacaaacaataagttctttgatcaatgccgtaaatagtttcgaagaaaattctcataatattaaccctagtgattgccgaaataacgccttaaaattttctgcagaaagatttcgcgacgagtttaattcttatgtatcagcaaaatggttggattttaatacctcaaaaagtattgagtattaa

SEQ ID NO: 248469 - DNA, 1083 bp, Klebsiella pneumoniae
atggctaatgatattggctttaacaaaaactctagaatccaaacactgcgcggcatagctgcgctttcagttgttgtggatcatacattaactcaatttaatatatattaccatcttgaaggaataaccgggggaatattacgtaatttgcaagggattggtactattggtgtttatgtgttctttattgttagtggatatataatgtccttaacgacttttaataaaacatgggataaaaaggcttcttctgtttttttaaagaaaagaattattcgtatctatcctatttattggttttggctgacattacttctcgtggcttggtatgcaggcttagctttgaaacaacatcattattcctttgaaaaaatagtttcatcttatttgcttttaccatattccgatgaagaacccagcaaaataaatccagtccttggccaagggtggactcttatatatgaaatgtttttttacattttcttttctatattgattctaacaaatatacctaagcgtaaggtattaattgtttcctttttgtttttttctttagtaatagtactaggtaaaggttcgataacaggaattccatatatcgatttttttatatcttcaaagttattttatttttttgttttcggtatttttatttataattattgcgataagattatcaatctgttttcttctgttatttccatgtatttaagtatatcaatttgttttgtattgttttttgttatcgctttgggtattgtccccgaagagtttagtaaagtagcaatggttttttttgctattattttctttcttgtatggttttccaaaggttcatgcaataagtacttagttatcttaggagactcctcttactctctatatctatgccatacttttattgttatgggattcggtgttgtttgtaagaaatttgacctttcaatgatgatgctttctataataggaatgttaactataatattatcggtcattgtagggttgtgtagttacttcttgcttgaaaagaaattacatgcaatttttatacaaaaaaaaaccacatcaaataatgccttctaa

SEQ ID NO: 248470 - DNA, 1437 bp, Klebsiella pneumoniae
ttgaacgtcacctccgccgtacgccaggccgtcgaacggacatcctggtttaaaaaacgtcagcgttatcgtgtgctgtactggcgcgaaatcagccccctcgctgtgcccattctgctggaaaatgcctgcgtattgttgatgggggtgttgagcaccttccttgtcagctggctgggaaaagaggccatggccggggtgggtctggccgatagctttaacatggtgatcatgtcgttctttgccgccatcgatctgggtaccacggtggtggtggcctttagcctcggcaagcgagatcggcggcgagcgagagcggccgcgcgccagtcgctggccattatgaccctgttttccattgtgctggcgggggtgatccacgcctttggtcaggaaattattaattttgtcgccggcgatgccaccccgcaggtcaaggacctggcgctgacctatctcgagctgacggtgctgagctatccggcggcggcgattgcgctgatcggcagcggggcgctgcgcggggccggtaccactaaaatcccgctgttgatcaatggcgggatgaacatcctcaatatcctaatcagcagcgtgctcatctatggcctcttctcatggccggggctgggctttgtcggcgccggtctcgggctgaccattgcccgctatattggcgccatcgccactgtctgggtgctgatggtgggcctcaatcccgcgttacggctgtcgctgaaaggctacttcaaaccctttaacttctccattatctgggaggtgatggggatcggcatcccggccagtatcgaatcggttctgttcaatggcggtaagctgctgacccagatgttcgtcgccgggatgggcaccaacgttatcgccggcaacttcattgctttttcggtggcgtcgctgattaacctgccgggcaacgccctcggctccgcctcgacgatcatcaccggcaagcggctggggaaagggcagattggtcaggcggaattccaggcctggcatgtgttctggctgtcgaccattattctgacgctgattgcctggggcagtgccccgttcgcgggctttatcgcctctttctatacccatgaagaggatgtaaaagaggtggtgaagcagctgctgtggctcaacgccctatttatgccgatctggtcgctgtcgtggactttaccctgcgccttcaaaggcgcccgtgacgtacgctataccatgtgggtgtcgatgctcggtatgtggggctgtcgggtggtggcgggctatacgctgggcatcgtgctggggatgggggtgatcggcgtctggttagggatggtgctcgactgggccgtgcgcggcgcgctgttttacttccgcatggtgagcggtcgctggctgtggaagtacccgcgggttaaggcctcaacgccggaaacctga

SEQ ID NO: 248471 - DNA, 753 bp, Klebsiella pneumoniae
atggctgagcaatttgagttaataccaagagttgaagagggagcaattatcccgcaacgaatgagtgatggttatattaacgccacggcgttatgccaatcagtggggaaaacattttctggctataaagcaaccaagcttgcctctgattttattacagaaatgacaaatcagacgggattatctgaggcgcagttaatccactctatagtcggaggaaatcccaagttacaaggcacatgggtgcacccacaactcgctattaatttagctcagtggctttctcctaaatttgcagtaaaagtgtctcaatgggtttatgaatggtctcaggggcaggttaaatttgcaacacctactcacctgcaacgttatactcataacagacataaagttccacatactcatttttcgatgttaaatgagataacattgagtctcattgcaccgcttgaaattgctggttatgtcctacccgataggatgattcccgatatatcagaaggacgtatgttttgcgcttggttaaggaaaaatagagggatagaacctaatgatttcccgacctataagcacgaatatattgatggtcgtgtggtagatgcgaaattatatccaattgaattatatgctgattttcgtaggcattttcacgaaatatggttgccacagaaagctccagagtattttcaacaaagagatcgtactgctttagagtaccttgaagtgctaatgcttccggctcctcgttaa

SEQ ID NO: 248472 - DNA, 1992 bp, Klebsiella pneumoniae
atggcgaagaaaatcattcagggaacgactgaaataaatagctctggtattaagaagcatttcagatctattgaaccggttcaagctatcattgaacttgtatggaatggtcttgatgctggtgccaataatgtcataattaatatcgcctacgacgattttggtacggcgcaatcaataactatctttgatgatggagatggtattgattttcataatttagatagtaacttcaatcgattcaatgattctctaaaaaaaacgagtattgatcaacatggttctcaaggtcgaggacgactttcatttcataagctttgttatcaggccatctggtttactaagtttgggaaaaagaatgcgtgtataaaaattacagatgagaatattaaagattatgaagctcaaattgatataccttctaatgaacaacatggccttctacttaatacaaataatggaacgtgcgttgagctttctcagatccatacaaatttacctgatattgataatatcaaatctattctttcgaatgaattttgctgtaaattagctttagacagaacaaaaaaaataatactaaatggttcagaaattttaataccagaaaatgaaataaaattttcagttactgattttgataatcatgagtttaatattcgggctattcgttgggctaataaacctgcaacagaaaaatcttttatctatttaattaatagtgatggtaaaattgtacataaagaaaccagcaagtttaacaaaaaaagagatttttatttaagcgtatttatttcatctccatgggctgatacattcagtatgcatggcgatgatattttttcatctgcaaaaagtaactcggattctaaggcttggaagtatgtactgaagcatgcgcacgatttttctcaagagatttatgaagattatcttaggattcttgtcgaaaaagccatcttgaaattcgaagaggaaggagtatttccaacttataaggaatatgaaaaagattacgcagaatggaagttgaataatattaaaagagtcgttcgtgatatatatattgctgaccctcagattttggttaatttaactacaaaacagaaaaagatatttataaggttattggacaatattcttgtctcaaataaaaatgaagatttattctctattttggaaagtgttcttgacttagatagtgatgacctttcgcgatttgctgcacaattaaaaagaacacgactggataatattataagtgctatagaagaattgcaaaaaagaagatttgctgttgaaaaacttaagcttattatgaatgagcattacagagatgtacttgaaacacctgatttacagaaaataatagagaataatacgtggttatttggtgaaaggtacgagactttaggagcagaggaagatacgtttactaaaatagctaaatcactacgtgacagcgtaaggggaattaacgagattgactcttatgatgttgatgcagaagaagatattccgggggcttctcgacaaaccgacctctttttagcccgaagaattccaacccttgattcaaatgggaataaaatatttcgctgtattattattgaaataaaaaagccaagtatttcactaaacgtgaagcatttaaggcaattagaagattacgcagcaattattaaacggcatcctgaattttcaagtcaaaatttacattttgaattgatactcatcggtaggaccatatccagtcgagatattgaaatcccgacgcgattagcaaattactctaatcgaggtgatgtgggcttggtttctgaagatgctaatatgaaacgctatgttaaaaattggtatacaattttcgatacatttgaattgacaaatagtttcatgttagagcgacttaagatggaaagaaatttaattgaaagaaattcaagagaggaactcgttagagaattgcaagaggaaagtgtttctggatga

SEQ ID NO: 248473 - DNA, 537 bp, Klebsiella pneumoniae
atgaagcatgttttacgccactggcgaacgtctggcgccgttattggctcactgttaaaaaaagggatcgttgcggtgctggcgctgctggtggtgtttctcgccggacggatctatgagtcccagcgcggccccgcgctgcattcctggcatacctggcatggcaacgagatgacggccaaagagatcgaccaggcgacctttgcccagtatctggcgcgggagaaaacgattttcgccgatcttcagcgtgaggtgacagaggccttgccggaagaagataaaaccccagtcaaccgcttttatcgccacagccgggtctggccgggacagtttacgcaggactggaatcgctcttttgtactattgccgcagggcaaaccgcgcggcagcgtggtgctgctccatggcctgaccgattcgccctacagcgtgcgctatctggcgcaactctggcggcagcggggctatgtggcggtggcgccgcgtttgccgggccatggcaccgcgccgggggcgttaaccgccgttgactga

SEQ ID NO: 248474 - DNA, 189 bp, Klebsiella pneumoniae
atgctggccgatgacggctatcagtggttcgtggagcagggcggtttgacccgtgagaacggtcagcgcttccgggaagcaattctgtcgcgcggcaatagcactgatttagctgaactttatcgccagtggcgcggacacgatccacagattgagccgatgctggaaaaccgtgggctgagtgcgtag

SEQ ID NO: 248475 - DNA, 234 bp, Klebsiella pneumoniae
atgtgcggacgctttgctcaatcacaaacccgtgaagaatatctggcctatcttgccgaagaggccgagcgggatatcgcctttgatcccgagccaatcggccggtacaacgtggcgccagggactaaagttttgctcctgagcgtacgtaatgaagagccacatccaacgccgttcatggcactatgtgcagtggttaagggaaaaaccggtgctcatataagcccatgttga

SEQ ID NO: 248476 - DNA, 792 bp, Klebsiella pneumoniae
atgactgtagccattgattttttgaaaaacgaattcaaacgaaacgtaaaagccggcaatctgcagctgggtataggtcttgaaatcccgtcagctgatgttgcggaggttttagcgaccagcaatttcgactggttatttattgatggtgagcatggccctcattccctggaaagtattgtcgctgctgcacgagctattttaccattcggaatgacacctgttgttcgtgtcggtgggccgagcactggactgataaagcagctaatggaccagggtatcaataatattatattccctaaggtcgagaccagagaggaagcagaacagattatgtactggtcatcctttgctccgcgaggtaacagagggatgggggctcaggtagtacgagctggtttatatggccgtattccagattatctagagagaattaacgatgaatcaatgatgattatccagatagaaagtcgaaaaggcatggataacctggatgagattttttctgtagacggtatcggagctgtctttttaggccctattgatttagctgttgatatgggacatgggttaaatatatttcaccccgaagtaatgactgcaatggacaatatgattaagcgagttaaatcctttggtatcccggtaggaacaatagccgtaacaccagaccaggcaaaacattacaaggcattaggtgctactttcttagctctttgcgcagatacattccttttatcttccggagcagataaaatacataatgactattctgaagcattgcaaaagtaa

SEQ ID NO: 248477 - DNA, 1194 bp, Klebsiella pneumoniae
gtgctgcgtcgtttcgctatcctagaagatcgcgccgaactaggtaataacactggcgctcgtctcaaatcaaagctgatagacctgcgaaaggggactccggccagctatattgcaaagcacgtcagtaaaaacatcgatgggcgtgggctgggtgacacagtaagtaaggagacaaggaaatcactacgctatagcgtcgagtttgtcgctgcgtgggcatcgctgcaccgtgttcaacaattccgtttttttggggttccaggccgccaggcctatcgcgagttacgattgttcacatcgcaggcatctcgtgcaacgaaaaccagcaaaccggatgctccggtacttatggatccaaaactggacgctgtgtttgctgctgatgttggctgttttgcagcttacatcatgaagcagggcggtgtacttgttccccgcaaaaattacctcattcataccgcctacgagccgacagtcgaaccaggaacctatggcgatcacgggattcgtatttatggcatttggtcgccaatcaccggtaaggaaaacaaaatatgcacgcatgtccatacctggaggatggtgaagaaggctcccgctaacccaggcgctgaaagcgccgcccagggcgaccccgtcgccccttggactcgtggcaataactgtcccccaaaccaaaaaatccgcaaaaaagagatagtaactgacgttgctatactcgagataatgacccttggtgaaggaacgggatcgcttgatgtgagtaaactacccgcaaaagagcgccgggctgtactgagaaggattacagcggagatctataacaagaagaaagcgctgggccacgtagaatcacgcaattactccccgcttgaggtcttgttgagcgattttgcttcatctattggcatcgaacttagagaatcccaagtaaatcatttacttaatggtaaacgcatacgttatggtgatcgcatttactgcgcgacttatgatggggcgctgcgcagtatggaaccagagaattcagatgttcagattcggaatgtgtggaagctgttgaaaaaacacaataaagtagatgtaggtcacatcacagataatccagtagggcattattccgacatgctcaggaagctggaccctagaggatggattgtactctttgggggagataagagcagggggtga

SEQ ID NO: 248478 - DNA, 249 bp, Klebsiella pneumoniae
atgaatgacgattatgatcagcgagaggcgaatattgccagcttcctgtcgaacaaaataaaacgatgcattaaatgtgagcatgagctggactacaaagagaagttttataacacagatcgaatttgcaaactttgccgcgggcttcaaccattcgatagtgaggacgttccggaggtagaatcggaggggaagtcactttttcttattattaatctcaccttatcaaagtatgagcataaaggatag

SEQ ID NO: 248479 - DNA, 1179 bp, Klebsiella pneumoniae
atgagtaccagaagtattgatgatgttgaaattaacgagtggtttgacgaagaagctgaggatgctgaaataaatgaaactccttcagcccttagtatcgaggagaagttctcgatatctcagcttaaagtcatccgaacttcaatggattttactcttcatcatttaaaacaatcattagaagagggcgattatataaatgcttcacctaaatatcaacgtaggcatcgctgggatatcaagaaaagatcgcagttaattgaatcatttttaatgaatattccagtgccaccaatttttttatacgagaacgactataaccagtatgaaataatggatggtaaacaacgtatcgatacacttagaagctttatgaacaatgagttcgcattgcgggggcttgaattttggagtgagcttgatggtaaaagatataaagatttgccattgattattcaaagaggtcttgcgcggaggacaataaacgctgtggtgctgctcgctgagactaatgcttattctgatgatgaagttgatatacgcaaaatactttttaaacgacttaatacgggtggtgtgcaattaaatcctcaagagctaaggaatgcactttatccagggaaatttaacgaactattgtccaaattgtctcgtaataaaatgttcactgatgcatggggaatcccagggaagactaagaatgaagatatagacccttctccagaccttttgaaaaatacattatttaggagcatggcagattgcgagcttattttacgcttctttggtatcagaaaacttataacagagggcacaaccggatcaatccgcagagttttagataaaacagcaaaggcatatcagtccgctgatgaaaatcaaattgaaattcttgaaaagtattttttagatagtttaagtggattgcatgctatttttggagcggatttatttgtaatgccatcgacgggaaaattaagccgacctttatatgattcttttatggtggcttatagtttagtcgattcagcacaaatcgccttacctgcaaaaataataaattctcttaacggagttaaacctgataccattgaatataatatattaatcggtagggggaatactactgaagcgattagagaacgtgtcgagttagcaaaaaacatattaacttgctag

SEQ ID NO: 248480 - DNA, 963 bp, Klebsiella pneumoniae
atgtacacaactttacaagacttccattcggacctagacaaagttttacatttgcttaaactgacagcgcagattaaggaattttctggattgcaaaatctccttaacactttaccctcagtagcggagcaacaagaggttgatgctgagcaagtggatactgttgtcagcggagagttagaacgcgctggagaaggaaatagtatttctcaacttgttgctgttgattccgttacacacactgattcttcaaatagagatgaagttaatgagcaagatatatcacgtgtacatgtaaataatttagttactgaacttcattcaacctctagaagtaatcattcaaatctagttatattaaacggtaccttattattgtttattacagggcggtttgagtcattcgtaagggaaacatttgaagaatattgtaaaaaccttacggaaagagttcagagatatgcggagttacccaaggaaatgagggagggattaataaaatatacatcagaagtcatatcaaatcctagaaggtatggccatgctgaaaacggtgtgaaatcatttgttaggatcatgcataataatctgcatgatgaaaccccggttgaaataaattataagtgtttatctattacttcggagaatatgaggccggaagtactgtcagacctttttaaaagggctggtgttaaaaatttatgggataaactagcccagcaatcaaaattccaattgttttgggggtcaaatgatatatcctcagttcgtagacagtccgaaacatacttgaattctttaatggaaactaggaactctatagcgcatccttcaacatctatcacttggccagattcagacgctattgaaaaggcactaaaattttttataacattcggtactgttctcattgatgtcctcccagtctatgaactggatgttggtaatgtaacgcctaactaa

SEQ ID NO: 248481 - DNA, 792 bp, Klebsiella pneumoniae
atgatcagacctgcaaaacctttgctatatgggatgctagatggcaaagctacacatatatcagatgtttctacagacaaagcttgtcgctacctgtgccctggttgtaatgtgcgattgatacctaaaaaaggcaaactgaaacagcatcactttgctcatgctgctggcgctgactgcggtatgggtgtagaaacggcacttcatcttgctgctaaagagattattgaaactaagaaacacatctatcttccaccggttgaagtaaagatttctcgcaggggtaatccttcggtacttgatgtgcttgctcctgaacaaaaatacagcttggacacagttgtattggaaagacgaattgactctatcattcccgatgttatcgcctatgtacgtaataggactcttgctatagaaatcaaagtgtcccacgctgttagtgaatgtaaagcagttcattttcaggctcttggaatgtcagctatagagatagatttatctaatgtcgccagagcatttacccccgagatgcttgagagttttgttatcgggcctggtaaacataagtcttggatattcaatgccgcagctgcccggcgatgtgaggagatgctttctagaggtgttcggcgcagtactgtttatcgtgggtttgcctgccatgtggatggctgtcctattccagctcgcacgtggaaagggagagcatacgctaatctaactgatgactgtttttgttgtacacaccttcttgattttgatgaagattacataatttgcgggatggtttag

SEQ ID NO: 248482 - DNA, 918 bp, Klebsiella pneumoniae
atggacataataaagccaaaaccagcgaaagaaataaagtcagtgtctcaatttatagattatattatgagatggaggcgtgcaggagagaaaccaactgcattcagaggacaaagtttttatggatggccaatgaagccaaagatctttagaaaaggatttaatatttatgaaaacgaagggcaagcgataagagatgttatttctttacatccaaaagagtttgatgatgataagacaatgtttgatcgtttggtaagaatgcaacattttggtctgcctactaggctattggatgtaactattaatcctttagtcgcgctatggtttgcatcagagaaatatacttacgacggagacaataccaacatcagacgagtcgctcaggggggcagattaacagcatattttgtacctgtggaaaggcaaaagtattatgatagtgatactgtaagttgcttagcaaatcttgctaacttacgtattgaacagaaggatgaaatatttaaaattgcgacctcatctaccgaagtggatttatttaataaacaagttgtagttgattatcttttctatcatatagggatggagaaaccacatttcagaaaattgatcaagcctgaggatttactgtttcctttatatgtaaaaccaaaattaaataacaaaagaattattgctcagtctggcgcatttcttatttatggtgctagagactacacaccaagtacgaatccaactccgataccggccagaagtgtttttataccctcatctgcgaaagaacgcataagacaggaacttgaaaccttgggtgtacatgaaagcacaatttttccagatattgaaagaacgtccaaatttgtgaccctaaggtatcaaaatgctcttaatgatagagctaatgcattgatttga

SEQ ID NO: 248483 - DNA, 135 bp, Klebsiella pneumoniae
atgaaaaaccccggtcgcgtctggcgtgaccggggttttctttggcgtgaattcagcgcggatgacgctgccactacttttctgcgccatgttacccgtcgcgggatgcgtctttccagagtgctgcccggctga

SEQ ID NO: 248484 - DNA, 321 bp, Klebsiella pneumoniae
atgacgatggaaaagcggcccagttgggtgaccagaaacatcaaaaacatcgtgctggtcatcaccctctatccctgggcactgttgctgataacgataatggcgggtagcggagggccctcatccggcgccatggcggccgggctgatggtggtattgttgtttatcgtcatgtcgatagccaacctgattatttcactggttgttatcgtcattgccgatctctcaacgtcatcactccccatgcgctatggggtctatttttgcgccatgaactcgatctcggcgctctggctcatccccatatgcatcagctactga

SEQ ID NO: 248485 - DNA, 1314 bp, Klebsiella pneumoniae
atgaaatttttagaagaattcttctcttcaatagcaggaaatgcaagaacaagaatcaatgatcccttcgttggtacttttatatgctcttggttagtatgtaattggaatcatcttgcattacttttctggggagaaggtaaggtagctgaacgaattagtggctttactaattatttagaaaaaactccattgattggttggaatcaactttttgttattccattacttattgcatctttttatcttttcctttttccttggttttcattatttattaaatttctacaacactgggctaaggaaaagcttcataaacaagcaattgcggaagagttgatacaaattgatcatcagaaaaagttaaatatggaaaagcttaaagctaatcctaataaaaagtttttggagcaattagtccaacatgatatagataaacgcaatttgatattggaccatatgacactgagaacttctcgtttagaggctaaaaaggcagagtcaacacttaaaactcaagagcagttgtttaaaacgcaagaagcagaaaataatgaaaaaatatcaaagctggaacttgttaaaaaagagaagaaaacagaattagaaattctgcgatttgagaatgagggtgctaaagtaagagccactcttgcctctaatagatttccatctgctttttttcttatgcaaatactagcagatagttttaaggaagatgatgtatatatttctattaaatccttaagttcaattattgcagtactgtttggttatgccgattttgattcactacttaacgataaaaatttcaataatgaaactttagggaaggtggagtatatatattatgatgaagaacttgcaaaggaactgcaccagatagtgttagatgaaaattcagataatgaagattttacagctgatttcattttcagtcatcttgatatgttatttgaagaaaatccttttagattaataacaggagacagcttggcagaaatatgcaaagaatcctttgaaaataaccccaacgatatttttgatggtagtggagtatcaggagcaattgcgatgtccgatacaatttttgattcggtagaggatattacactagaaaattataggtttgatagtgggttttatgcggatctttctgctaatgcaagcggagaacattataaagaggcaggagtccctgggcgggatatgagtgtttctataacaatgaaatgccctgtattaattggtaggtttggtctggggtctgtagaacaaggagaagttaacgggacgctggatgattttgaataa

SEQ ID NO: 248486 - DNA, 486 bp, Klebsiella pneumoniae
atgcatattacctttaaggatattcagcagcgatataaagaattgcagaccaaattcaataatcgtaaatctgaattgcaagaatcggcgagaaagttagtttctgaatataaagactctctatccctgccatcagattcatggattgatgccaataaagtacctcacccatatgtttgcgtgggtacatttaacgaaaaaaggttgttccagcagatgcctattgctggatttgatctcgataacgagtacagattgaacttcaaaatttcgaccgtcgttgacgactcggagtatggtggcggctcacatcatttagtttccgtttcaatgtggaaatccaatgggcgattgaatgttgagttagctgaaggtaaaaaatcattcttggtttccgatccaaatgataacaatgcattctttgaagtttgtcgtggtatcaaggagttagtagtttcaggtgttactgactctcgcttagattga

SEQ ID NO: 248487 - DNA, 453 bp, Klebsiella pneumoniae
atgcaaggaacatttattggatttaataccgcaggtattacctttgaagatcgatttctggcgctgttattaaaaataaagcagcaaaatgggctctgtcagcaatattatctgcaagcgcccatactactcgatcttcttctcatacttcaaaatcgtctgcttgtgacgtataagcgattacacgaacagggggaaacctataaagaagagcttatcgcttataatgaatcgctgatcgctaacatccctgccgtagagatggcggagattcagcagccgaatcctgagcggcgtattatgtcgattactcttaaaccaggcgaaactgaatcggccctcattctggttctgcagaatgagcaaatttgcacattatgcattgaagaccggcaggtagaggcattacttacaggcattcagcaagcgttaaaaactattgatgatcaatag

SEQ ID NO: 248488 - DNA, 366 bp, Klebsiella pneumoniae
atgaaacaactaaccgtttttgaaatggaagaaatctcgggtggctactcttgggatttttcatctctcggttctgcactcacctcaattgtatcaaatggagctgagctcactctcagcgctttattaggtggcgccgtttatgctatgacagggtccgtcattggtggcgcccatggcggcaatggcggtggttccttaggttttggtactctcggtatgatggtcgggggggtttggggactgttagcgggtgcgatcggtggtgcgattaccgccgccatgctagggtgggacaaaactgtggaactgaccacgggattgctggaaggttggaataacggtaccttcacaccttgggcttaa

SEQ ID NO: 248489 - DNA, 357 bp, Klebsiella pneumoniae
atgagcaaacccgttgaaaaacatacagctaacgcaagcctgatagcatctaccgatgatgcatgggactctcgtgagcttggttgcagcgaagctcacgtaaaagtgtcagacgaccaactggacatggagatcaatgacgccctagagttacatccaatctcaattaggttaaataaatcgctgattgaagaccttaaaatgattgcggatctacatggcttgggctatcaacccttgattaggcaggtcctgacacgtttcgctgactgcgagaaaaagcgaattctgcaggaagttcactctaaagaagtgtctaaacctcaaaaagaacctcgccagaaaaaagttgcgtaa

SEQ ID NO: 248490 - DNA, 183 bp, Klebsiella pneumoniae
atgcttcgcatagtgggcaaatacctgcggatggctggcccagtgttcgaagatttgcgacgggaactcgacaaaatcccgcggggtattggtgccggagaggctggcataacgctgattggcgaacagcccgtgcagggcgtggccaaactcatggaacagggtgatcacctcatcccatga

SEQ ID NO: 248491 - DNA, 876 bp, Klebsiella pneumoniae
gtggtcgaagatctcccagacccgcacatccgggtggtacaccgggatgtcaaagcgctccacgaagcggagcccaaagagctgcgatgccgtccagaagacgccgtcctgcagcacgcgctcgagggcaaaatagggtttaagctgcgcgtcatcaatggcataggcatcccgccgcacctgctcgctgtagtagagccagtcccatgcctgcgcgcgaaacgccccgccttcgttgtcgatcacctgctggatgtccgccagctcacgttccgccctcgcccgcgccgccggcgcgatctgacgcataaagcccaatgcctccgccggggaagccgccatttgatcggtcagcgcccagctggcgtaatctgccgcccccagcagttccgcctgctgcgcgcggatcgccgccagccgcagcaccagacaacgggtatcatgctcatcgccctgctgattgcgcgtccagccggcggcgaaaagattttcccgcgtttgccggtcgcgcagcgcaagcagctgcggctgctgggtggtgttggtcagcgtcagcagccagcgatcgctgagccctttttcgcgcgccgcctcggcagccgccgctatctcctcatcgttcaggccatccagttgatgccggtcatcgaccaccaggccgccgcttttcgccgcccccagcagccgctgctggaactgactttgcaaagtggccgcttcagtgttcagcgcgcgcagcaccgccttctgcgccgggtccagcgttgccccggcgtgaacaaaacgttgccatgtcagggtcaggagacgcagggattcgccgtcaagcgcgagcgtctcgcgctgttcgtagacgctgttcacccgctggaataa

SEQ ID NO: 248492 - DNA, 279 bp, Klebsiella pneumoniae
atgggcgccggccatggcgaaaaagacccgcgtcacccgcgccagcagctgtccgctctgctccagcgcctcgagcgtgttggcgaaactggccggctgcggattgtcgataatggcgcggatctcctcgcgctgctgccgaacgccctcatcaaacgccggccgatagtgactgtcttcgatcaggtcaaaccgcggcgcctggtaaggcaacagactgacgctaaaaaaggggttttgttcggacatctttctctcctgcacaggctaatcctgtaa

SEQ ID NO: 248493 - DNA, 966 bp, Klebsiella pneumoniae
atgaagatccctctttcaatcaaggaactttatgactcgaaggttcagctttttgaggcattaaaagaatttgttgatacatgggttgaaggcgaaaaacaaacaaaatggcattatgagagcagagttaaagagttagaaagttttgctctgaaatttgaaacaggcagatttaattctgcctccatttttgatgatttttttggcggtatgattgttgtgccaacccatgctgaaatcacaaaagttgaaaatattttgcgtgataaatttacattagtcagtaaaaaacctagtgacaaatcattcgcaacatattctcctgagcattttgtatttgatgatttaagattgtatttaaggtttgataaagagcgttttctctcaccaaaagttgaaattttggatcagttagtttttgaagttcagattaaaacctttttacagcatgcttgggctttatctacacatgatttagtttataagagcgaaaacatatcttggtctaagcatcgtgtagcataccaagtaaaagccatgcttgaaaacatagagctctcaatctcgagcgcagagactttatcttgtaatgaaataattaataaagaggataagaggtttaagaaacttggtaagattgtgactttagtcgattctaaatgggataaagaaagcctcccgagagatagaaaaagactagctgaaaatatattttcatgtattgataaactaggtgttacggtaccggaactttcttctcttattgatgaaagtcgctgtaatactcttaaaagtatttctccctatcaatcaattttgatggctttaattaatgataaaatagatttatttttaaaggataaccctcgaaatctgaagcttttaattagtgaggaattagaggaaattttgaatgaagaaaatttaaaatatttgcgcaataatcagtacgtaataaacctctaa

SEQ ID NO: 248494 - DNA, 1038 bp, Klebsiella pneumoniae
atgatgagtgaacgtagaactactacacaagatattacatggtttttagatctctttgattcacaaaaaatagatcttgatcctccttatcaaagacgtagtgtatggacaaggaaagataagcaatacttcctcgataccatcttcaagaaatatccttgcccagcagtttttcttcataaaactcaagatgagcgaggaagagcaacttatcatgttgtggatggtaaacagcgtctacagactatcattgaatttttccaaaacaaaatccctcttgggcaagatattggggatgaacgtctaaatggcaaacgctggaaacaaattgaagatcctgaactgaaaaaaggattttgggattatgtaattccagtggacttgttgacaactattgataaaactattgttgatgaaatatttgacagattgaaccgtaactcaagaaaacttgagcgacaagagttaagacatgctaaatatgatggatggtttatagaattagttgagcgcactgcagaaataccttggcttaaagatatgggaattgtgacaacaggtcgtgcgaaaagaatgaaggatgttcaatttatatctgagttggcattatcgttgattaaaaatgatgtttgtggttttgatcaagatgatttggatgaggtttatgctaagtatgacaatccagaggatgaatactttaactttgattcagaagagtttgaagagaaatttctggagctatttgcagtgctaaaaagcatgaatgaatttaataatgtcattcgtgaaaattccaagttaaatattttatatagtatctttaattatctgagtttaacaaaaattgacagcattatggataaaacattcccatgtgaggccacagcaataaaattaaaagatttcttagatgctgtaaatggtgattctcaggacgagaatgttgttcaattccgtaataatttggtgggagctaacaccgagtatcagcaaagagcgaataggcttggagcattggtaaaatttatggacaactaa

SEQ ID NO: 248495 - DNA, 1452 bp, Klebsiella pneumoniae
atgaacaaattgagaataaacagtaggatgaaagagcttgagctaatcgacaacgttagactattggcgtcaatgaatgttcgcaacaagcgacaaaaactcaacgagcaatactttactccgggttttgtcacgaactttgtcgcacataacttgatcgatttggcaaggaaatctcataaaattcttgatgttgcggctggggttggcaacattggcgctgccgttgggatcgttgtttcgcaacatactgcatcagcagacaatgaattatatgcagtagaaatcgatcctgaattagtaaaagaatgtgaaacgctgttaagttccattctcagagacacttcagttgaacataaagtttacaattgtgattttcttgaattattttttgagtttaagtcaaataatattaatttcacgtcaattgtaatgaatccgccttataaaaaatttcaaaggaaagattttgatgcattaagattgactgactatgatatagaatactctccaaatttatattctatcatgatgtcatgtgcattagacttactcgctgacaacggtgagttaattgctattgttcctagaagtttttgcagtggaactctttttcatgcctttagaaagaaaattgtaaagaatttcgaaataaaattcattcatctatttgaatcaagaagcaaagttttcgcttttgatggagtgcagcaagaaacaatagttattaaaatttcaaaaaaaacactgcttaaagaaactatcacaattagttatggcgacgattttgagaatgccgttatttctgatcgtgactacgataccgttattttcccgaatgattctcagcatgtaattcatattccttacagtgaaattgatgagtacttacttagtaaaatattgtccttcaaatcatcattagatgatttaggattaaaaatatcaaccgggaaggtggtagattttcgaaatgaacctcatctgacgaaagacaagaaagatagcgctttgctcttttgtaaagaaaatcttggccgtgattgcttcaactttgcgaatgataagattaacaattacattaaacttaataaattcacagaaaataaaattcttgataaccaatgccatgttgtaatgaacagaatgttttttaaagaaagcgaaaatgtcatcacggcacaaattgttgaatgtggtttaaatgacaatataaaaatagcagttgaaaaccatttgaattacatctcaggcttgaataataaccttttagactataatttagctatggggattaaggtatatttagaatcaaaaattgttagtgattactttaaaagattcctaggcagtactcaaattaatgcagctgatattaagtcattaccatttccttgtaaagagcaactaattcaaatgggtcaaaaaggagtatttgaatatgatgagtga

SEQ ID NO: 248496 - DNA, 1572 bp, Klebsiella pneumoniae
atggcaactatttttaaaagaacactcgaacaattgtctgaaaggcggattgatccttggcactatcaaccgcgatttgaaagacaaattaataagataaaagacaacctaggtgctttgcccctggaagcggtaattgattcaaagcgcggggtggctagtggcgcaacacctttaggagcaaattatttagaaaaaggccgtgttaagttttatcgcacttctgaagttgaagaaatgttcttgcaagctgaagaagctgtttttattaacgatgaagatgatgaaaaattaaagcgcagccgattagtggatggcgacgttttacttacgattactggtgcaaaatttggtaaatcggctgttgtgtcagctaaacatctaccggccaacattagtcagcactcagtcagattcaagcccgatcccaaaaaagttgacgcctatttcttggtggcatatttgaatagcaaaaccggacaagtagcgatctggaaggaggcatatggcgcaactcgccccgcaattgactttccaagtgtccgctcgctagcggttcctaaagttttacctatagcccaaaaatacattggggataaagttcgccaagccgagcagttgcgcgctttggcgaagcggctgaattcggttttacagtcacaaattcactctgtatttaaaggtgatcctaagccagaaaaaagaattggtaaggttatatcaattcaacaactatcctccctgaggctggaggctgaatactatggtgatttagagctttgggcggaactcgaaattaagaactctccttttccgaataaaccactcggggagttatcttcaagaattaaagatggtcctggcggatgggcggtgtctacaagcgactatagaccatcaggcgttccagttataagaagtgttaatttaatcgacggtcgctgcgaattagaggactgcgttttcatctctaaggaaaagcataatgatctgagatcgcatcaagtaaagcctggtggtcttttgctttctgttcgaggaacaatcggccgcgctgctgtatttgacagcgagaaatacagtactgctagcctgaatgcggcggttgtaactattgactgcaaaccaactataaacccgtactatttagcagcatttttaaactctgaagttggaaggattcaatcgaaccgaattgcaaacggcgcagttcaattaaatatgaatttaaaagaaacagcatcaaacttaattgttataccgcctattaatttacaagaaactatagcggcaactttcctatccaaaaaccgagctattatcttggctaatttattaactcagtccgccaaaaccctggtcgaagccctcatcgaaggccaactgaccgagcaacaactaatccaggcccaacaagccctggaagatggcgacaacagcttagatcaggcgattttaagcaaactaagtgctgagggttatgccatagaaggcgccacatcgctatttagcgatgtggatgagttatacagtttgctggaagaggcggcgcaagcggaggctgaagggtaa

SEQ ID NO: 248497 - DNA, 933 bp, Klebsiella pneumoniae
atgaaaaataaaatcgacgttagcatcattatccctgcttacaacgccgctgcgaccgttggttgtctggtcaataaaatcctcagcgaaacccacgtagcgattgaacttatcgttgtcgacgacggttctaccgatggtaccggcaacattatccgccaaatccacgatgaccggctcattctcattgagcaggccaatcaaggtgtctatgctgcccgaaatgctgctctagccttgcaccagggagaatgggttttattccttgatgcagacgatgatattgccgacgggttcattgaaaaacgatggcaagcagctactgcgtcgcaagccgacgtcatgatctttaatggctggcattctggtgctgaccaccatcgaagagcagtccaccgaaagcagccatatggggcaacgctgtcaggacatgaatggataaggcactgtgtaacacgccgcgaatggccacattacctgtggctgcaaatggtcagatcatcctatgtcaggcagcattcactgcgcttccagcccggcaggagccataaagacattctttggacggttcatcttgcagcaagcaatggccggttctgcgtgttggatgttaaggactatatctatatcagtactaagacctctatcacgcaccgaccggattactatgatgttcgtgctataagctatgttgaagtgatcgctgaaatcatccagttagcggaacaaaacaaaaaaataaaggtatttttgtaccggcatgtgctggtggaggctcgtcactttttggggctttaccgcaatcgcgttggggataaatcgggcatgaaggactacttcaaagcgaacatattcgcagcccatttattcagaggtatcagcagttttagcgatgtgtttttctttattaagctgctgggcaagctattctga

SEQ ID NO: 248498 - DNA, 207 bp, Klebsiella pneumoniae
atgacaaccgattacaacgttcttaacgaccaactggtgacgatggagtttatcacccggctcacaggcctgacggataaatggttttatttccttataaaaaacggcgagttcccgaaacccattaagctgggcagaagctcccgttggctgcaaagtgaagtagaaacctggctacagcagcgtatcgaccaatcccgccagtga

SEQ ID NO: 248499 - DNA, 588 bp, Klebsiella pneumoniae
atgtcataccgcgacattaacgatatcaatcttagctacgttcagcacccgaccctgaaccgaaagctgcgacgtcatcaggaccaattatttgagcgttattccaagctgctgatgctacgggtggacttctcgtatctacaggacagtgattcccatggtgagggagatattcactctacggtggccgatatcaccttactgattcaacgtagccaggatatcaaggggctggtgggctacgcatgggtactggagcatactgagcgacatggttttcacatccacgctgcgttttacctcaatggtcagaaacaccgccgtgcatggaccgtctatgaaacgctcagggatacctggaaatacgtgacatggggagaagggcatacacatcggtgcgagcccagggaggagtacagagcacggggtgaatgggtaacggcctacgacgacattaagggccgcaagagcatgcagtacatcttgagctatctcagcaagcaggagcagaagactttgggcgttatctgccagttaagtgacatccctgctccaccggcagcgggcagacggcggaagctcagttaa

SEQ ID NO: 248500 - DNA, 705 bp, Klebsiella pneumoniae
atgtatgttaatttacataacttgtatgttttgaaaatgaacagctactactcagctcgccaagccaaaagcatcggtaaatcctttacgacattattccagaatatttctgctgacggctcggtcagggccctaaaattctcttttgtgataacacctctggatggaaaggccgcttatcctgacgacagaggtgctgaacatgcaaagaaggttcatcttgcactaaagctctttttgaaccacatgcgggtgcttaaatacgggaagtgtgttgccgggtattcatggttaatgtgcaacgaaaagcgcgcaaatcgaccctatatttatatgctgttttacataaccgggagcactagtgccgataaagttgcggaatgcctgcgcgatttatgggtacgttcggttgaaaaagcgagcctgaaagaaggctggtacggttatccggtggtgttcaactataatcttgaattgggcaacaaggttttttgcaaaggtaatcatgcactgctggatggtcatgtcgagtgtcagagcggagcattcattttcgatgacctttgtggcggtacggctaattttaaaatttgctcggacaatccgaaattgttcctgagttacctgggttcactcagattgagcatgcgctcaatttccggcgtgagagcatggggctgctcgcagctaaaagataaaaactaa

SEQ ID NO: 248501 - DNA, 264 bp, Klebsiella pneumoniae
atgatcgcgcagaaagaaaagggccagagcctgcttccgtccggaccttttacccgccagcaggcggagtacgtcaccgcggcataccaaaacatcttcatcgaggatgaccagggaagccattttcggctggtcctgcgcgatgcggatggccggatgctgtggcgggcctggaactttgaaccggaggccgggaccgggcttaatgcgtacatccgggactacggcatcctgcatggccctcttagccgcctgccttattaa

SEQ ID NO: 248502 - DNA, 438 bp, Klebsiella pneumoniae
atgactgacaccacaactgaactcaccatttccgccgctgttgttgccgacgagcagcgtatccacttctggccgcagcactttggcagcatcccgcaatggatagcgcttgagccccaaatcttcgcctggatggaccgtctgtgttccgattatcacggcggcatctggatcttttatacgcttaacagcgggggcgagtttatagccccggaggctgatgaagacaacgaagagaaatggacgctgtttaacagcatgaacggtaacgaggctgaactcacccgcgaagcggcggggctcgtctcctgtctgatgacatacagccaccatgcctgtcgtaccgaatgtgacgcgatgactgagcactattatcgcttacgcgactacgcgctgaaccatccggaatgtagcgccattatgtatctcattgactga

SEQ ID NO: 248503 - DNA, 342 bp, Klebsiella pneumoniae
atgaaacctcaatctgcaacaacttcgcaggcggtaaagccctgtctgtcgcccgtggcagtctggcaaatgttactgacacgcctgctggaacagcactatggcctgacgctaaacgacacaccgttcagtgatgaaactgtgattcaggaacacattgatgccggtatcacgctggctgatgccgtgaattttctggtggaaaaatatgaactggttcgtatcgatcgcagagggtttaactggcaggagcaatccccttatcttcgggcgctagatatcctgcgagcacggcaggcaactggtctgttgcagcgaagtcgtaataccactgatatgtga

SEQ ID NO: 248504 - DNA, 1083 bp, Klebsiella pneumoniae
atgcttaaaagaatgaaagtaaaaaacctaacggtttttcctgaggctgatttcaaattttcacctgatttaaatgttattatcggtgaaaatggttgtggaaaatcacatttgttgaagactgcatatgcactaattgcagcgagtgcagaggaaggaagaaagcctaatgctggagaaccgaccaaaactttgctgcaaaaaaattacgcagataaactcatcaatgtccttcgccctgagacgctggggcgtttagctcgtcgaaagcaggggcgggaaagatgcgaacttagttttgaatttgatgaaaaatatttgaacttttcgttgggatttgccacctcaagcaagtctgaagtgcaaattgaactgctgaataaaacttggcaacccaagtcacctgttttcctaccaacacgtgagatgctcacgctctaccccggatttgtgtcagtatatgacagtcattatctggaatttgacgaaacatatcgagatgtttgcctattattgggagccccagcgctaaaaggtcccagagagaaaaaagctgccgagcaccttaagccgctagaagaggctatgggggggaaagttgttttggataacaatggtcgattctatctgtctgtacctggtcaaggcaaaatggaaatgccacttgtggctgaaggcctacgtaagcttgctatgctttcaaggctgatttctactggttcgcttttggataaaggataccttttttgggatgagccagaaacaaatctcaatccgaaattaatcaaacttgttgctaagtcaattctttatttatgcctgagtggtattcaggttttcatctcaacacactcactgtttctgctacgtgaattagatgttttgtatgaagatgaagggtttaagtgtctaaaacatagatatttttcgctaaagaatggggataacggtgttgaagttgaacaaggcgattcgatcgaagatctaacgacacttgtacttcttgacgaagaactgcaacagtccgatcgttatatgtcttatggagaagaaagtggctaccattcaaaacccgataattga

SEQ ID NO: 248505 - DNA, 540 bp, Klebsiella pneumoniae
atggagaagaaagtggctaccattcaaaacccgataattgaaggacaattaactttcacattcccagaaggagcaatgtcgacaaaatacgatgattggtctttctaccgaaatcagtttaatagcgcgttcggtggaacgaaggctgttgatatcatttacttggaaaatgatatttgctggttcattgaaataaaagattaccgtttttctccgaggacaaaaacaatggatcttggggaggaggttgctattaaggtccgtgatgctatagctgggatttacgctgctggatgtaatgcgaatgaacaaaccgagaaattatttgcatgcgatacgagaagaaaaaataggattcgcgtggtactacatcttgagcagcctctaaaacattcgaaactatttcccaaggttatcaatccggtaaatgtaactatgaaattgaagcaattgctgaaaggaattgatgcgcatccagtagtggtagacagagagacgttgcgcagagacatgaactggcgagttaatcaaacatcatag

SEQ ID NO: 248506 - DNA, 768 bp, Klebsiella pneumoniae
atgaatcttgattatcaactcgacggaccggaaggtgcgccggttatcgttctctccaactcgctgggcaccacccgggcgatgtggcagccgcagattgaggcgctaaccgcccatttccgggtgctgcgctacgacacccacggccacggtaaaacgacgaaaaatggcaaagtgaccctcgcccagctgggggaagatgtaattgcgctgctcgatcatctgaatatcgaccgggcctggttctgcgggatttcgatgggcggtctgaccggtctgtggctgggccgctttgcgccagagcgtttttatggtctggccgtcgccaacaccgcggcgcgcatcggcgatcaggccagctggctgtcgcgggcgcgggcggtacgccaggaaggaatggcggtggtggccgccggggcggcggaccgctggttcacccacgcgtttcgccagaaggcgccggaggtggtggaggccctgtgtcaccagctgacccatactgatgccgaaggttatgccgcctgctgtgaggcgctggccgccgccgacctgcggggcgaagtggggcagatcccgctgccgacgttaatcatcgccggggaaagtgaccctgtcaccacggtcgctgacgccaattttctgcatcagcagatccccgcttcccaggtggtggttctgccggcatcgcatctgtcaaacattgaggcggcgaaaagctttacttcagcgctgctgagctttttccagggagaacgccatggaggataa

SEQ ID NO: 248507 - DNA, 1023 bp, Klebsiella pneumoniae
atgctatctttaattccatcaatacacgctactatattaagtattatggttgctgtggttgctgtagttgctccaatagcttatcaaaaaattttaaaggaaaggaataagctctccgaaaatatcaggatgataagagaggtgtttagtgggcctatatcaggtggtggtgactttgaagagtattttaaaaatgataatgatgaacagttcgtagagcatttcagaactactataaaaaatatcgtaattcatttgcgtagtgaaaggggagtggggttcattcagatgtttgaacgtgagtttatgcttctaagatgtttctcatcaagattcatggatagaactccatttatagggtatgacgatggctttgatgattttatatcatctgacatagttagatatcataagataagaagctttttcgatgatacgtactggatgcttattaatagaagaggtatttttgatgatatgataaacaggtattatgatactgaattgccaagattgaaagctgattgtttgaggatggctgaaggtaaaataccaaccccggaccttgatggtgcagaagtatatctcaataatgcctcgctgtggcgtggtacaagcgttgatgacataaataggaaaaaagctgatttcatttttacttcaatagttggccggactgggagtaaaaaagaactgttatcttttttggatgaattgactgaaagatttgaatacactttaagccgcattctccccatcctcattgaaaataaaatagaatatgataaagccaatattttatttaaagcaaaggatgaattatcactgttctacaggtttgtttattcaacgattacattcggtattttcattccccttgttttaaatgagttttatgatttctttaatttaaacggattttatttctttaaagtaatttcacttgcttttgttcttacatttattccatattatattgctcttaataaactacattcggtaataaatcttataaaactgtaa

SEQ ID NO: 248508 - DNA, 189 bp, Klebsiella pneumoniae
atgctggccgatgacggctatcagtggttcgtggagcagggcggtttgacccgtgaaaacggtcagcgcttccgggaagcgattctgtcgcgcggcaatagcactgatttagctgaactttatcgccagtggcgcgggcacgatccacagattgagccgatgctggaaaatcgcgggttgaatgcgtag

SEQ ID NO: 248509 - DNA, 1686 bp, Klebsiella pneumoniae
gtgaatataaacgtcgcagatttgttaaacgggaattacatcctgttattattcgttgtacttgcattaggactatgcctgggaaaactgcgtctcggctcagtacaacttggtaattccattggcgttttagtcgtttctctattattaggccagcagcatttcgcgattaacaccgatgcccttaatctcggctttatgctgtttattttttgcgttggcgtagaagccgggcccaactttttttctatttttttccgcgacgggaaaaactacctgatgctggcgctggtgatggtcggcagcgcgatgctgatcgccatggcgctgggtaaagtgttcggctgggatatcgggctcaccgccggtatgctggcaggcgccatgacctccaccccggtgctggtgggcgcgggcgacaccctgcgccatttcggcctgcccagcgatcagctggcgcagtcgcttgaccatctgagcctcggctatgccctgacctatctggttggtctggtgagcctgatcgtcggcgcccgctatatgcccaagctgcagcatcaggatctgcagaccagcgcccagcaaatcgcccgcgagcgcggcctcgataccgattccaaacgtaaagtctacctgccggtgatccgcgcctaccgcgtcggcccggagctggtggcctgggcggatggcaaaaatctgcgcgaactgggtatttaccgccagaccggctgctatattgaacgcattcgtcgcaacggcattctggccaacccggacggcgacgcggtgctgcagatgggtgacgatattgcgctggtgggttacccggacgcccacgcccgcctcgacccgagcttccgcaacggtaaagaggtgttcgaccgcgatctgctcgacatgcgcatcgtcactgaagagatagtggtcaaaaaccacaacgccgtcggccgccgcctggcgcagctcaagcttaccgaccacggctgcttcttaaaccgggttattcgcagccagatcgagatgcctatcgacgataacgtcgtactgaacaaaggcgacgtgctgcaggtcagcggcgacgcccgccgcgtaaaaaccgtggccgaccgcatcggctttatctccattcacagccaggtgaccgatctgctggccttctgcgccttctttatcgttggcctgatgatcggcatgatcaccttccagttcagctccttcagcttcggcatcggcaacgccgccggcctgctgttcgccggcatcatgcttggcttcctgcgcgccaaccacccaaccttcggctatatcccgcagggggcgctgaacatggtgaaagagtttggtctgatggtgtttatggccggggtcggtctcagcgccggggccgggatcaataacgggctgggcgccgtcggcggccagatgctggcggcagggcttatcgtcagcctggtgccggtggtgatctgcttcctgttcggcgcctacgtgctgcgcatgaaccgggcgatgctgttcggcgccatgatgggggcccgcacctgcgccccggcgatggagatcatcagtgataccgcgcgcagcaatattccagcgctcggctacgcaggcacctacgccatcgccaacgtgctgcttacccttgccgggacgctcatcgtgatcatctggccagggctacaataa

SEQ ID NO: 248510 - DNA, 984 bp, Klebsiella pneumoniae
ttgtctctgaataaggtcgccgagcagtttccgttaaccggccatattaccgacttcacgctcacttacgccgacgatacgctgatcacgaccagtaaaccgtccccggatatcagcgatgatgagtggcaggcgtttctgcgctcctcgattagcgcggattcagaaaacggcaaagtcagctttacccttatcgacctcgacggcgacggcaaacgcgacctgatcatcgacagctacgtgggcggcaccgggctcttcagctacaccggggtgctcaagcgaggtgatgatgattttgccgccgtcaacggcagcgacagtgataatggtgatgatttcgatgccggggtgcccggcgccctcttttccattaatggccgcggggctaaccagtggaaccactgggtcaaaatcaacggccaggtgtatgccctgtggtacaacggccagtttggcgaagataacctctacctgcttcgcccgttcagcaccaccagccagacgcccgcggtgacggttcgctatcgctatacgctgaacagcatccgctccccggagaaagaccagccgctgacccccagcctgagcgacggcgataaagcggacctgctgcgctcgctggaggtaatgcagggcagcctgctgaaagacagacccgccagcgacaacgacgcgccgatctgccccatcccgccgggcacctccgctgacgaggcggataactactacagcggcgtcgccgttaactatatctatgagacggtggcctatattccggtctggctgaacgggaagtgttatatcggcaccattttcagccatcatggcgcctatcgccacggcgtggatgcggaaattaccctgagctcgccgcgtgaggacgaggaggtcattggcgattatctcatctccggactacgccacgttatcgccattaccagcggctggaaaacccgcgagggcgataacggcatgcagtga

SEQ ID NO: 248511 - DNA, 411 bp, Klebsiella pneumoniae
atggggtttgatctgctgcagatccgcaaagagcgcgacccacattttcgccagcaggtgctgcgcgcctataactatgagtgcgcgatctgcggcttcaatatgcgccatgataatacctccgtcgctctggaagcggcccatatcaaatggaagcagcacggcggcccctgcgaaatccctaacggcctggcgctctgcgcgattcaccataaggcttttgataaaggatccattggtctggatgaggatatgcgcatccaggtttcgccagcggtgaacggcgggggcattgttggcaggctgttctgggattttgatggtaagccgattaccttgccgcaggggaaagaatgctatccgcaggaagggtttgtggcatggcaccggcgggaggtgttcaggggatga

SEQ ID NO: 248512 - DNA, 306 bp, Klebsiella pneumoniae
gtgaggcctgctctggtggctgccgggctcagttccgatcgcagaaccattgcagatgctgtgtatgaattgatgattaccgatttgcgccccgaacttggccgcattagagcaccgattgagatcgtttatgcgtatgacgccttattcggggtgcctgcatccggcgtggatgaaatgtaccgtcgagcctataccaatacgcccgatatccatttcacacgaatcgatgacagttttcactttatcatgcttgatcagccagaacggttttccagcgcggttcagtcattcttaaataaataa

SEQ ID NO: 248513 - DNA, 2109 bp, Klebsiella pneumoniae; identical to SEQ ID NO: 217789

SEQ ID NO: 248514 - DNA, 636 bp, Klebsiella pneumoniae; identical to SEQ ID NO: 217788

SEQ ID NO: 248515 - DNA, 552 bp, Klebsiella pneumoniae; identical to SEQ ID NO: 218316

SEQ ID NO: 248516 - DNA, 1296 bp, Klebsiella pneumoniae
gtggatatcaacgtcggtcgtcagatagccagtgcgcagcagcagatggccagggaggccgatgtccaggccgaaagcgcactgcatggttataacagcagcgtcaccagtgcctggaatagtctgcagcaatttggcaccaataaagggaacagtgcatcaacaacgaccggggccgatactaccgagtcttcgcaggattcgatggccagaagcaaaatgtggaatgcggttgttgctaatgcgaaagccaacaacattagcaatgagcagtctttccagaatttaatggatgagtcaagaaaaagaacaatatcgggtgagttgtatggcggtgctaaaattgattcttctgatgcagctcttgggaaaatagggagctgggttaccggaggcagtatatttggtggtgttaaagtggcagccagtggtgccgccagtacggggtcaacggatactgttggacgatcaggtaggcattctgaagataatcgccatgataccagcactcaggcggcgaaagactttaaggaagcatccgattactttaccagccataaaacaaccacatcaggcaataacaccgataacaatgccagttcgcgtgttgaccagtttgccgcgtcactctccagtgccaaaaacagctatgaccagtatacaagcagccggacacgcagccacgagtacagtgagatggcttcgcgtacagagagcatgactggccagatgagcgagaatctcactcagcagtttgcgaactttgttcagcatcgtgcacctcaggacgctgaaactattctgaccaacaccagttctcctgaagttgcggcgcagcgtgaagccctggcgcgtgaattcgtcaaagagcaggttgaacccagggttgatggtgcgtatcaacagggtcgcgaaagcatcggtcagaatatgtctggggtgtcaggcggtggcgacaatggttcggtcatggcggactacggacataatgccggccgtattgatgccatgaccaaagaggcgggtattaaggatgatgtggggcaaaaagtggatgggatgattgcagagaataaacaacagcatcaggaagcccgagaaaaaatacaacagcaaggtgttgaggtgaaaaaagagaatgctgaactggaaaaagaccacaaaacaaaagaaaatgatttcaaaaattcttataatgataagaaagaacatcaaaccagactgcctggcgcggactcaaccaaagagctactggataaggcaacaaaattagaaaacgataaatcaaagagatag

SEQ ID NO: 248517 - DNA, 414 bp, Klebsiella pneumoniae
atgaccggcgggcgggtatgggctgatccggcgccggtgggtccggtaccgcaggccggggctgacattatcctcccgccagaggttctggcgcagcgggcggcagaagaacagcagcgccgcgaaatggaaaaacaggcggaacagactgcccgggaagtggccggggaggcgcgtaaagccggcgagccggcggaccgggtgaaagaggttatcggggacgtcattcgcggactggagcgtgaccggccgggtacggagaaaacgacgctaccggatgatcctcagttccggcgccaggaggcggcgattcagcaggtggcctcagaaactctgcagcgtgagcgtttgcaggctgtggagcgggacatggtgcgtgacctgaaccgcgagaaaaccctcgggggcgactga

SEQ ID NO: 248518 - DNA, 414 bp, Klebsiella pneumoniae
atgaccggtgggcgggtatgggctgaaccggcgccggtggctccggtaccgcaggccggggctgacattatcctcccgccagaggtactggcacagcgggcggcagaagagcagcagcgccgggaaatggaaaaaaaggcggaacagactgcccgggaaatggccggggaggcgcgtaaagccggcgagccggcggaccgggtgaaagaggttatcggggacgtcattcgcggactggagcgtgaccggccgggtacggagaaaacgacgctaccggatgatcctcagttccggcgccaggaggaggcgattcaacaggtggcctcagaacgtctgcagcgtgagcgtctgcaggctgtggagcgggacatggttcgtgaccttaaccgcgagaaaaccctcgggggcgactga

SEQ ID NO: 248519 - DNA, 336 bp, Klebsiella pneumoniae
atgccggcgcgccgtccggtagcccttctcgataaaggtccccaccttttcgtttttgaagtccagcagtcgccagccttcatcgataacgttgagttttttcaggctgcgcggggactggtacatccggttttcgatatagatgatgagcgagaacatcaccgcgaccagcagggactggcgcgactccagcccgcccagctcaaggaccaccatccgggcatcgtcgtgcagggacggctcatcagagttgaagtactccccgtacagcccgttcaccgtgtactggtcgagcaggataatcatgtcatcaagacggctgcgcacccccggtga

SEQ ID NO: 248520 - DNA, 171 bp, Klebsiella pneumoniae; identical to SEQ ID NO: 241443

SEQ ID NO: 248521 - DNA, 489 bp, Klebsiella pneumoniae
atgaggttcgtttgggatccaagtgacctcaatcctgaacaggcggcagcagtgacagagccatcgagcatttttctgatcgcttgcccgggtagcggaaaaacgcgcaccctgacctacaaaattgcctatgaactctctcgtcgaactgataagcggatggttgttgccattacctacacccaccgtgcagccgatgagatccaagaacgtattgaggatttgggcgttgatacttctggactatggattggtactatccatgccttttgcctggagtggatccttaagccatatggcatttattcgcctgaactagcgcgtggttaccgcgttatcgacccgtacgatcgtgagcgtctgctggagaggctgtgcgctcagtataaaggtatcactcactgggattgtgactactacgttactgaaacgggttatcaacttggctgtgtcgatacgagaaaacatcctattggctttgttgaataa

SEQ ID NO: 248522 - DNA, 2655 bp, Klebsiella pneumoniae
atgagtacattaccagtggataatcccggtatcgcttcggtaccggtcagtagcgtcggggatgtggcgcggctaattaattccggcaaggaacatgcgaaatatgcgcggatgattgtcttcctcgcgctggggggcgtttttctcgacgcatatgacttaaccacgctctcctacggtattgatgacgttgtacgtgaatttcagctctcactgctgctgaccggcctggtgacttcgtccattatggtcgggactatcgtcggcaatattatcggcggctggttgaccgataaatatggtcgctattcggtttttatggccgatatgttctttttcgtgatttcggctatcgccgccgggctggcgccgaacgtctgggtgttgattggcgcccgtttcctgatgggcatcggcgttggcatcgacctgccggtagcgatgtcctatctggccgagttttcccgctttgccggcaaaggcaacaaagcggctcgcctcgcggcgtggtgcccgatgtggtacgccgcctcaaccgtctgctttctcattatcttcggcctctatttcctgctgccgcaggagcatcttgactggctatggcgcgcctccctgctgttcggcgccgtgccggcactgctgattattgccgtccgcagtcgatttatgaatgaatccccgctgtgggcggcgaaccagggcgatctgacctctgcagtgcgtattttacgcgactcctgggggatccatgcccatgaggtcccggcggcgaagcccgcgccagcgccgaaagtgagcttccgcgtgctgttcgaaaaaccctaccgcgagcggactatcgtcgccggggtgatgaatatctgtatctccttcgagtacacggcgattgcctttttcctgccgtcaattcttgcccagttcctcggggctggcgtcttcgaaactatttcggcatcgctggggctgaacgccctgtttgcttttaccggtgggctgctcggtatgcatctggcgtggaaatatccttcgcgtcatgtggcgatagccggcttcgccctgcagtttgtggcgctgattgtgctggcgctggtggggcaaccgcacgcgacggcaggtatcgtgctggctatcgcgatgctggggctgtggctgttcgccgaagggtttggcccgggggcgcagctgatgatctacccggcgctctcctatcctactgccattcgcgccaccggggtcggtttcagccgggcactctccgggatcggcagcgcgctggcgttgtttattctgccgctgctgcaggcctccctcggcacgcagatgttctgggtgtctcgcttgccgccattattcccattttcttcctgctggcggtccgtcatgaaccgacgcgagaagatatcgacgcacttcatgaataaggaactgacaatgaccctgctctccactggcaccgattatgacgcgctggcggccgccttccgcccgatatttacccgtatcgcccagggcgctgcggagcgcgaacagcagcgcattctgcccgatgagccgatccgctggctgaaagaagcgggcttcggcacgctgcgtatcccgcgcgagaagggcggctggggcgcttcgctgccgcagctcagcgcgctgctgatcgagctggcgcaagcggactctaacctgccgcaggccctgcgcgcgcactttgcctttgtggaagatcagctgaatcagccggattccgccgggcgcgaccgctggtttcgtcgcttcctcgacggtgagctggtgggcagcggctggacggagatcggcgcggttaagctgggagaggtgaacaccagagtgacgccggcagagggcggctggcgactcgacggcgagaagttttacagcaccggcgcgctgtacgccgactggatcgatgtgtttgcccggcgcagtgataccgccagcgatgtgatagccctggtcagcacccagcagaccggcgtggtgcgggaagatgactgggatggctttggccagcggttgaccggcagcgggaccacccgctttaccggcgctcgggtggaaaccgaacatgtctatgattttgcccagcgctttcgctatcagaccgccttctaccagcatgtgctgctggcgaccctcgcgggcattggcctggcggttgagcgggatgccgcgcagggcgtcaaacatcgctcccggatgtacagccacggcaacgccgccgtgccgcgcgatgacgcccaggttctgcaggtcgttgggcagatcagcagctgggcatgggcgacccgggccacggtcctgcaggccgcggaatcgctgcagcaggcctatgtggcgcacgtcagcgacgacgaagcattgattgcccggcgtaaccagctggcggaagtggaagcggcgcaggcgcaggtgatcgccagcgactggatcccgcgggcggcgacggagctgtttaatgccctcggggcgtcggatacgcgaactcgccttgcgctggatcgccactggcgcaatgcgcggacggttgcctcgcataatccggtgatttataaggcacgtaatatcggtaactggctggtgaacggtgaagcgcccacctttatctggcagataggcaatggtgagaaaacggcggggtaa

SEQ ID NO: 248523 - DNA, 288 bp, Klebsiella pneumoniae
atgggtgtaattggattagtgaatcaggcggtggcgtggtatgccgccagcgccgtactggcctttctgtttgccatgcgcaaaccgctcagcggcgccattgccgggatcggcggcgcggtggccagcgccatgctggtggtcgccggcggcgccgcgctgctgatgccggagcggatccacggcggcatgctgcagtttctccacctgacgatacgggtgggggggcgtcaacgcgctgtggctgctggccatcggcctgtcggcgctgccggtgtcgctgtttaa

SEQ ID NO: 248524 - DNA, 1068 bp, Klebsiella pneumoniae
atgaccgccgtgaagcacgcttttactgaactcccgaccatcgatatccgcgatctggccggcgacgacctcgccaggcgtcaggcggtggccgacgccatcggccgcgcggcgcgcgaggtgggttttttctacatcaccggccacggcatcgacccggcgctgatcgccggcgtccgcgaggcggcgaagcagatcttcgccctgccgatggaggagaagatgaactattacatcggccactccaaaagccataagggctacgttccggaaggagaagagatctacggctccggcaagccggaccataaagaggctttcgatatcggcttccaggcagcggatgaccatccgctggtgctcgccggtacgccgctgatcggcgccaacgagtggcccgatctgccggatttccgcgcgcgggtgctggcctactacgacgcggttttcgccctcggccaccgtctgttcgacgctttcgccctcgcgctcggcctgccggaagggtatttcaaaccgatggtgacctgcccgccggctaagctgcggctgatccattacccgttcgacgccagcgtcgaagatgttcccggaattggtgcacacaccgactatgagtgcttcaccctgctgctcgccgaccagcccggccttgaagttctcaatgaagaaagcgtgtggatcgatgcacctcccgtcaagaacgccgccggagaagaggcgttcgtgatcaatatcggcgacatgctggaagtgctcagcgctggcacatttgttgctacagcccaccgggtgcgcaaagtgccgcaggagcggtactccttcccgctgtttttcgcctgcgattaccacacgctgatccgcccgctgccgacctttctcgccgccggcgaagccggtgaatatcaggagctcagcatcggggagcatatgtggagccaggccctgcaaacctatcgctacctgcgcgaaaaggtcaatcgcggtgaacttcagctaccggagcgcgcgcgcggcaccaatacgtttggccatttgaaaaaacaggctcagcaaaaaaacccctaa

SEQ ID NO: 248525 - DNA, 1200 bp, Klebsiella pneumoniae
atgtctttggacctcgacacactcggcttatcggcaacggtaaccgctgaggggataagtgcgcccgactatcagaccgtgctggacaccatcaccggttattttcagcagatttatggcagtgatgcctacctcgatcctgacagcaaagatggccagatggtggcgctggtggctctggctattcacgatgccaataacacggccatttctgtttaccggtctttttcaccatcgacggcgctgtccgatgcattaaccagtaacgtcaaaattaacggcatcgctcgccgggctgcgacaaactctacggtcgatgagttgatcgaaggtgatgccggaacgttaatcacaaacggctctgtgaaagatgccaacggcatcatctggaatcttcctgctcaggtggctattggtattgatggaaccgtcattgcgactgcaacgtgttctgtttccggtgctgttgcggcccctgctggatcagtcaacaagataaataccccgacacgtggctgggtatcagcaactaacccgcaagcggccacagtaggcgtagcggcagaaaccgacgcagaacttcgcgtaaggcagtcgcaaagcgtcgcgctggcgtctctcacaccgtttgatgcagtagatggagcgattgccaatgttgaaggcgtgactcgtcataagctgtttgagaatgatactgaggtaatggatgcgaacgggttgcccgcgcactctatttcagctgttgtggagggaggggatgcaacagtgattgccaataccatccgaagcgtaaagggacagggagtttctaccttcggcatgaccgccgtggttgtcacagataggtatggaaatccttataccattcgattttctcgccccgtagatgttccggtgttcgcgtcaatcaccctgagggcgttaaccggatacacttctgatgttggtgatgaaatgaaagcggcagtggcctcttacattaactctctcgctattggtgatagtgtgttgttgagtcgtgtttattctcctgcaaacctcggtgtagtcagtggtgggaatgcgcgatattacgatatcatggagttattgataggtcggtcagctgactctgtagcagcagcgaatttaaccgtcttatatgacgaggctgtatcatgtagcgtggaaaatatagaaataacggtgatgacatga

SEQ ID NO: 248526 - DNA, 1422 bp, Klebsiella pneumoniae
atgacgacatccttagtcaacgtggcggtgatcggcagcggcaccatgggggccggcatcgccgaagtggctgccgccgccgggcatccggtgcgtatttttgatattaaccctaaggctgtagacctggcgatagagggtatcgccgggcgtctggcgtcacgcgttgcgcggggcaaactggcgtcagagcaggccgatgcgctgctggcgcgcctgcatccggcccacgatttagccgcacttgccgatgcagatttagtgatcgaagcggcctctgaacggttggaggtcaaaacggcgctgttcacgcagctggcggcgatctgcgcgccgtcaacgctgttgaccagtaatacctcgtctatttcgattaccgctatcgccgccggggtcaaaaacccggagcgggtggccggactgcacttttttaatccggcgccggtgatgaagctggtcgaggtggtgagtggtcttgcgacctccacagaagtggtggagcagctgtgccagtgcgtaagcggctgggggaaacagccggtgcgctgccgctcaacgcccggttttatcgttaaccgcgtagcgcgtccgttctacgctgaggcctggcgggcgctggaagagcaggtcgccgccccggaggttatcgatgccgctttgcgtgacggcggcggttttccgatgggaccgctggcgctgactgacctgattggccaggacgtcaacttcgccgtgacctgttcggtgtttaacgccttctggcaggaccgccgctacctgccatcgctcctccagcaagagctggcgctggccgggcggctaggtaaaaagagcggccacggcgtctatcgctggcccgctgagacactgccggacgcggcgctgccgccggtaatgatgggtgctgaatccgttaccgtcagaagtgacaatgtcactgaattagacgatgtcttgctgctggagactgaaggcgagaccgccctggcgctaagcgttaagcatcaccgcccggtggtggtgtatgacctgtgcgccagcgatacggtggtgctggccgcagcggcaaccaacgcgcctgcggccactgataaggccgtgcatcacttccagcagcagggcaagaaagtgctgcgtattgccgattatcccggcctgctggtgtggcgcacggtggcgatgctgattaacgaagcgctggatgcggtacaaaaaggcgtcgccagcccgcaggatatcgataccgcgatgcgccttggcgtgaactatccgcatggcccgctggcatggggagaacgccttggctggcggcgggtgctgcaactgctggagaacctgcaacaccattatggcgaggagcgctatcgccccagttccctgctgcgccagaaggcgctgatggagaagcaccatgagcaatga

SEQ ID NO: 248527 - DNA, 804 bp, Klebsiella pneumoniae
atgacccttgttctcagcgcttttgtcatgagcgctcacgcggcgctggatctgcgcgccaatgagcagccattgccggtcacccgcgacccgcaggcgatagcgaaaattccgccgggctatcgcttcgtcgagccggggacgctaacggtggcgatctcggcgctcaattcgccgccgctggccctgctggccagcgacaaccgcacgcggatcggtagcgacccggatatagcccgcctgctggccggaagccttggcctgaagctcaggctggtgcccaccgcgtgggaggactggccgctgggcatcgcctccggccgctacgatgtggcgctgatcaatatcgcggtaaccgagaagcgcaaagagaagttcgattttgcgacttaccgggtggactccctggccttctcggtgaaatccaccagcgatatcgccgcggtaaacggacccgccgatctcgcggggcgcaaagtgatcgtcgggtccggcaccaatcaggagcggatcctgctgggctggaacgaggacaaccgcgccgccggacggccgcaggcccagccggtctacctgaccgatgatgcctccggcaatctctatatccagtccgggcgggcggatatctttttcggcccgcagtcggtggcagcctataaagcggcgcttaacggccagacccgggtggtgggcctggggccgaaaaaagcgtgggtggcgacaaccaccaaaaaaggcaacggtctggtctatgccctgcaggcagcctggactgaccccataaagttggatggttcatattaa

SEQ ID NO: 248528 - DNA, 237 bp, Klebsiella pneumoniae
atgacaggtaatgacttcgaaaatctgttccgttttttgcgcgtcaaactgcgtccagccggtgcgcagcaggatagtttcacgcccgagacggaaagcgagcacctcgcccagcagggcgtgggtatggaggatcatttgcgtatcactggcttcgcagccggtccaggcggcaatcagccgggtgagataatggtgcaggggggggcaatcacctgctggtggatcagatggtag

SEQ ID NO: 248529 - DNA, 261 bp, Klebsiella pneumoniae
atgaccgttgcgccggattcactgctgggctatgagctgacggtgctggcggcggtggtgctgggcggcaccagcctgattggcgggcgcggaactctcaccggtacgctgctgggggtgattttactggcggtgatgcagaacggcctgaacctgctaggggtctcctcctactggcagaccctgatcactggggcgatcatcgtcgtcagcatcagcgtaacggcatggagccagcatcagaaccggagcttgttatga

SEQ ID NO: 248530 - DNA, 717 bp, Klebsiella pneumoniae
atggctaatctgttgaaacgacatgaattctggttaggcatgttcattattgcgctgtgcctgctgctgggctggcgcagtgaggaatttttcactttcggcaatctttacgacctcgctaataactatgcgatgctgaccattctcgcctgtggtctgttcgtggtgctgatcgccggcgggattgatatctccttcccggctatgaccattatcgcccagtacggcatggtggtgatgctgcaaaaagtaggcggcaacttcgcggtggcttttgtgcttgccggcggcatcggcgtgctgctggggctggtgaacgcgctgttggttaatcgtctgcgggtgccctcgatcattatcaccatttctacgctcaacattttctacggtttgctgctgtggttaagcaaaggtgtctggctctacgacttccctccgtggtttgaaaagggggttatgctgttcaaatataccgatgccgctgctgacgatgatcgccgtggtgctgttgaccgcgtttatcatgaatttcaccaccgttggccgcaagatctatgccatgggcggcaaccgggaatccgccagccgcgtcggcttcagcgtgctccgcctgcagctgttcgtttatggctatatgggactaatgtcgggggccgcaggtgtcgtgcaggcgtggacagtgatgaccgttgcgccggattcactgctgggctatga

SEQ ID NO: 248531 - DNA, 1650 bp, Klebsiella pneumoniae
gtgccggttatgccggacttacccccgccggtgagcggcacggccgcgccggaggtcattcctgtcgctccggtctggggaggcgatctgaatctggcgcagatggggatgccggacgggattatcctcagcggcggccagcgacagggtggggtcagctttaccctgcctgccgatcaggtggtgatccattcgcagctcagccttgccgttcgcgtatcgccggagatggcgagccgcaacgccaccctgcagctgatgctcaacggtcaaccgctcggcacgctgccgctgggcgccgatggcgaggatgtctcccattatcagctggatattccgcccgcgctgatggtctccagcaataacctgagcgtgaagatcaacgatggcgataccctgcagtgccagcgtgacattcatgacacgtcgcgggtgacggtgctgcccacgtcgcatttcagctgggaaagccagcagctgaacatcagcgacgacctgagccacttcccgcggcccttctttgacagcatgcagatgaccccggcggacattgcggtcgcctatggggccaagccgtcggcggacgtcttcagcgccgcggcgctgatctcctcctggctgggtatccaggcggactatcgcggcattgccttcagcgctctgcgcgaccgtctgccggaacgccacggcatcgttattggccatccgggggagcaggtgggcggcatgatgctgccggaaaccgataagccgctgctgcgcatcatcgccaaccccgccaatccggcctataaactgctgctgattgtcggtaaaaacgatacggcgctgcgcatggccgcctggcggttaacccgcggcaactttgcgccgcaaaccgcgacgctggatgtcgaaccgcagaccatcccggttggcaaagcatatgatgccccgcgctggatccccaccgatcgtccggtcaagctcagcgagctgctgcgtaaggatcaaagcccgaccgtcagcggcgtctggcacgaacctttacgtatcgccttccgcgccgcgcccgatctctatctgtgggatggggaaaccattccgctacaggttggctaccgcttcccgtcggaaagctggattaatgaggacaagtccttgctgagcgtcacgctcaacggcaccttcctcaacaacctgccgatgaacaagcaggggccgctggagaaagtctggcgctacctcgggggcgatgcgcgccaggagcgctttaccatcccgctggcgccctacctgatttacggcgataaccagctgtcgatgtacttcaatgtggtgccaaaggacgatgttccgtgttcggtgctgctgaataacaatatcaagagccggatcactgacgactcctggatcgatttgagcaagacgcgtcacttctcgctgttgcccaatctctcctactttgtcggcgcctcgttccccttctcgcggctggcggactattcgcagacgactcttctgctgccggcggacccgtctgaaacccaggtggcgaccctgctgaatctggcggcacgctccgggaacgcgaccggcaccgcgctggcgaataaccgcgtcgtgctcgggatgcccaccggcggggggggatttgcagtcgctgcgtga

SEQ ID NO: 248532 - DNA, 582 bp, Klebsiella pneumoniae
ttgcagtcgctgcgtgaacgtgacgtgctggcggtcaccgctctcgatcagcaggcctttaaccagagcctgctggccgactcaccctatcgcccggtagataatgtgctgagcgtccgcgagccagacctgtggcaaaaagtccagcgccggctcaccggcgactggacttccgccagcctcgacgccgatcgctacttttcgtcgagcagcgcctggcgcgggttcatcagctatcgctcgccgtggaattccacccgcctggtggtggtggcgctggccagcaatgatgaccagctggcgcgactgaagaccgatctggaatcgccgcgcattaacgccgggatccgcggcgataccgcggtgatcaccagcgataacggggtgcgcagcttccaggtgagtacgccgttccccagcggtcagatgccgtggtacatgatggcggtctggtatgccagccagcactcaggtttcctggcggtgctggggctgattgccacctcgataatgggactggcgctgaccgcgatgtttaaacgtcacgcccgtaagcgtctgggttcgggggataaccaatga

SEQ ID NO: 248533 - DNA, 840 bp, Klebsiella pneumoniae
gtggtcgaactttatattaatggccagccgcagccattaagcgaaaaacagaatacgcgcacccagcgcgaaacgctgcccactttctcgctacaacaggcttacgaatttattaatagcgtcgactttaatgatattcgctttattctcgacgccgcgcgcttaaactccgcgctggcggcagaaggcaaaacaaaaaaatatggcctgaacattaacggtaccttttctgacgcagtgaaaaacggcctgatgagcaacgatctgttaagcaaggtgatcatcaacaccgtcgccgcttcagatgcccgcatgggcggcgcgccggtggtagcgatgtctaacttcggttcaggcaatcagggcattacagcaaccatgccggtagtggtggttgcagagcatctcggcgccgatgaagagaccctggctcgcgctttgtctctctctcatctcaccgccatctcaattcattctcgttatacgcgcttatctgcgctatgcgcagcctcaaccgccgctatgggcgccgccgccggtatggcctggctgtttacccgcgacatcaacaccattaataccgcgattattaatatggtcagcgatattaccggcatgatttgtgatggcgcttccaacagctgcgcgatgaaagtctcgtcagtggtctccagcgcctttaaggcggtactaatggccatgcaaaatagctgcgctggcgccaatgacggtattgtctgcgccgatgtcgagcagactattaataacctgtgccgtctggtgattaaaccaatgactctcaccgataaagaaattatcagcattatggtcgctaaataa

SEQ ID NO: 248534 - DNA, 273 bp, Klebsiella pneumoniae
atgccgattcaggttctgccgccgcagctcgccaaccagattgccgccggcgaggtggtggagcggcccgcgtcggtggtgaaagagctggttgagaacagtcttgatgcgggcgctacgcggattgacattgatatcgaacgcggcggcgcgaagctcattcgcatccgcgataacggcagcggcatcaaaaaagacgagctggcgctggccctggctcgtcatgcgaccagcaagatcgcctcgcttgacgatctggagggccattattag

SEQ ID NO: 248535 - DNA, 222 bp, Klebsiella pneumoniae
atgcataccgttatttttctggtgatgattataaatcctggtgtccacagcagctggaccattacacccatgcccaatactgatgtatgcctgaaaatgctaaaagtcattgaagccaggggagggcgtggggggggatacaataccggagagtgtattgaaatcaaaaccagcgaacctttgagcagtgcgatggaaacactgaaaggaggcggacaatga

SEQ ID NO: 248536 - DNA, 1530 bp, Klebsiella pneumoniae
atgatgtcgattggctccgtaaaatcggcgggcagcgccggtaactactatacggacaaggataactattacgttatcggcagcatggatgagcgctggcagggaaaaggggctgaggcactgggtctggaagggaagccggtcgacaaggccgtgttcacagagattctgaaaggaaagctgccggacggcagcgacctgacccggatgcaggacggcaccaacaagcaccgcccgggttacgatctgaccttttcggcgcccaaaagtgtctcagtgatggcgatgctggggggagacaaaagacttattgacgcccataaccaggcggtgacaaaagcgctgcagcaggtggaaacgctggccgccacccgcgtgatgaccgatggaaaaagcgaaactgtgctgaccggtaaccttattgtggcgaaattcacccacgacacgaaccgtaacgaggagccccagttgcacactcacgccgtcgtcatgaatgcgacgcagaacggggacaagtggcagtctcttggcactgatacagtcgggaaaacgggctttatcgagaatgtgtacgcgaaccagatagccttcgggaaaatctaccgggaggagctcaaacctctcgttgagatacttggctacaaaaccgaagtcgtgggcaaacacggcatgtgggagatgaacgaggttccggtcgagccgttttccacacgcactcaggaggtcagggaggctgcgggtcctgacgcttctctgaagtcacgggatgtggccgccctcgatacccgcaaatccaaagcagccatcgatccggccgagaagatggtggaatggatgaacacgatgaaggagaccgggtttgatatgcgcagctaccgcgaggatgccgataagcgcgcagcagagctcgccagtgcgccagtcagtccggtgaaaacggacggccctgatatcagcgacgtggtcacgaaagccattgccagtctcagcgaccggaaggtgcagttcacctacgccgacctgctggcccgcacagtcagccagctggaagcaaaacccggtgtgtttgagcaggccagaacgggtatcgatgcggcgatcgagcgcgagcagcttattcctcttgaccgggaaaaaggtctcttcacctcgaatatccacgtgctggatgagctctccgtgaaagcgctgagccaggaggttcagcgccagaaccacgtctctgtcacgccggatgcgtctgttgtccgtcaggcccccttcagcgatgcggtcagcgtgctggctcaggaccggccggcgatggggattgtctccgggcagggtggcgcggcaggtcagcgggagcgggtggccgagctgaccctcatggcccgggagcagggacgcgacgtacatattcttgctgctgataaccgctcccgtgattttctcgccggggatgcgcggctggccggggagacggtgaccggtaaatccgccctgcaggacgggaccgcgtttatcccggggggggacgcttatcgttga

SEQ ID NO: 248537 - DNA, 453 bp, Klebsiella pneumoniae
atggtgctcggtaaacgggtcgagggtctccgcgccgaagttgccggcgagcattggcccgctgaaggtgatgacgttgcccatggccagcaggcccgactggatagcggtgaaatcgctgtggccgcaaatcagcagcgggtcgcgctgctggcgggcaaccagtccctgccagtcgatatgcggcagcaggcgactggcgccgtagccgccgcgcacggcgaggacgatccggttgcggccgggcaactgggccagctggttaatatcggccagccgttcatgttcagtcccggcgaaacgctgctgccggcggggaatgacctgctggtgggccacctcgtgtccggcctgctgcagacgctcgacgccgcgggctgccgcctgctggttgatgcaataaccggatggcgcgaccagataaaactgagacatgataattccttgctatga

SEQ ID NO: 248538 - DNA, 825 bp, Klebsiella pneumoniae
atggaacagaaaaaaatcacgcaaggcgacctggtgagcatgtttctccgctccaacctccagcaggcctcctttaacttcgaacgtattcatggtctggggttttgctacgacatgatcccggcgatcaaacgcctgtatccgctcaaagccgatcaggtcgcggcgctgaagcgtcatctggtgttctttaataccacgccggcggtgtgtggcccggtgatcggcgtcaccgccgccatggaggaggcccgggctaacggcgcggccattgacgatggcgctatcaacggcatcaaagtgggtctgatgggcccgctggccggcgtcggcgacccgctggtctggggcacgctgcggccgattaccgcggccctgggcgcctcgctggccctctccggcaacattctgggacctttgttatttttctttattttcaatgcagtgcggctggcaatgaagtggtacggcctgcaactgggcttccgtaaaggggtcaatatcgtcagcgatatgggcggtaacctgctgcagaagctgaccgaaggcgcctccattctcggcctgtttgtcatgggggtgctggtgaccaaatggaccaccatcaatgtgccgctggtggtttcccaaacgcccggtgcagacggcgccaccgtcacgatgaccgtccagaacatcctcgatcagctctgccccggcctgctggcgctgggcctgacgctactgatggtgcgtctgctgaacaagaaagtgaatccggtctggctgattttcgcccttttcggcttaggcattatcggcaacgccctcggctttctgtcctga

SEQ ID NO: 248539 - DNA, 189 bp, Klebsiella pneumoniae
atgtttacagatagacaggcgttgtatcgtgatcttgaaagagagcgtgggtcgaaagttatcacttatgtaaccggtgacagacctggcatggaaacgaaaatccattctgaagtttatgatttctttgtgaatcacttagggaaggtgcgaataagcaggtcatttcttcccaagctgactcgctga

SEQ ID NO: 248540 - DNA, 420 bp, Klebsiella pneumoniae
gtgctggaatccgcccgcaaacggtcctggaataatgaagtatcagtgtcctcgatccgtaacctcattacctcagaagaggtctccacaaacggcgacaaattccgctttgtgggagaggccgcattcagtccggaagaaatccgggttgatctcttcagcagcgaaaacggcggctatgtcaaaagtgcttctctcgataccgccctgctggaaaaactgcagagtatcgcggaacaccttcgcgaagcagaaggctggtcatggtgcgatggccgccttgaaccgatttctcactacgggaaggatactaaaatctggcgtctgcatgctgtcccgcctgtggcatataccgaagccgaatcggaacgacttgccttccttgcacaacgcgaagaagaactcgaagtaggggtctga

SEQ ID NO: 248541 - DNA, 1353 bp, Klebsiella pneumoniae
atgctctatcaggcgacctggcagcacgggatcaacaatctgttgaccggctacaccggggtcaccggttttgacgactatcaggccttcctggtggggacagggatgaacaccggcatcggcgcgctctcttttgacgtcacccattcgcggttgaagagcgatgcccatgatgactcgggtcagagctatcgcgcgacctttaaccgcatgtttaccgatacccagaccagcatcgtgttggcggcgtatcgctactcgacgaaaggttattacaacctcaacgacgcgctgtacgccgtcgatcaggaaaaaaatagtcgcagcaactacaccctgtggcggcaaaaaaacggcatgaccttcacggtgaaccagaacctgccggacggctggggcgggttttatctcagcggccgtatctccgattactggaaccgctccgggaccgagaagcagtatcaggtcagctacaacaattcatttggtcgtctctcctggtcggcgagcgcgcagcgcgtctatacgccagacagctccggtcatcgtcgcgacgatcgtatttcactcaacttcagctacccgctgtggtttggcgataaccgcaccgccaacctgacgtcgaacacctcgttcaataactcgcgctttgccagctcgcagattggtatcaacggttcgctggacagtgaaaacaaccttaactacggcgtgtcgaccaccaccgccaccggcggtcagcatgatgtggcgctcaacggcagctaccgtacgccatggaccaccctcaacggcagctacagccagggcgaaggctatcgtcagagcggcattggcgccagcgggacgatgatcgcccacagcggcggcgtggtgctctcaccggaaagcggctcgacgatggccctgattgaagccaaagacgcggccggggcgatgcttccgggatcgccgggcacccgtgtggacagcaatggttacgccatcctgccgtatctgcgcccgtaccggattaacgccgtggaaatcgacccgaaaggcagccatgacgacgtggccttcgatcgcaccgtggcgcaggttgtgccgtgggaaggcagcgtggttaaggtcgcgttcggcactaaggtgcagaacaacctcaccctgcaggcgcgccaggcgaaccacgagccgttgccgtttgcggcaagtattttctcccccgacggcaaggagatcggcgttgtcggccagggcagcatgatgtttatcagcgatgcgaacgccaaacgcgcgattgtgaagtggagcggcgggcagtgttcggtggatctgggacagcaaacaacaaaggatagcgtatgtcgctga

SEQ ID NO: 248542 - DNA, 549 bp, Klebsiella pneumoniae
atggcagcacgaggcatcaataaagtcattctggttggtcatctggggcaggacccggacgtgcgttatatacccaacgggagcgcggtggccaacctgacgctggccacatcggaaacatggcgtgacaaacagagcggggaactgcgcgaaaacaccgaatggcaccgtgtggtcatgttcggcaagctcgcggaagtggcgggggaatacttgcgtaaaggcgctcaggtctacatcgagggccagctgcgcacccgcaactggcaggatgaggccggaatcacacgctatgtcaccgaggtgctggtcgggcagaacggcacgatgcagatgctgggtgggcgtcgtgagggcagttcgtcagagagcgccgtacctcatcagcccgcacagccgcagactccggtacaacctgctgaaccccctgtggcatccccgaaagcgaagggcggtaaaaaaggccgtcagagtgccgcgccgtcccagcaacccccgcagccgtccccggatgattacccgccgatggatgacgatgccccgttctga

SEQ ID NO: 248543 - DNA, 624 bp, Klebsiella pneumoniae
atgacagacacatcaaatataaatgaaatgtcagaaaagtataaaaaaatacttgatgaagggtgtattattttagatacagaaacaacagatctctatggtgaagtaatagaactcgcaataattaataatgaaggttctgttttgttcaatcacaggataaagccaaaagagcaaaaaataaaacctaacgctgaagctattcatcatatatctatggagatgctaaaagatgaaaaagagctatctttttatatggatgaactaacagctatttttacgaaatataaaaatctcgtcatatacaatgctgcgtttgatattgaatgcttaaatgtatcacttaacgctaacgattttcaagagtttaaagttatttttggcattaatataaaatgtgcaatgcgtgattatgcttattattataatgaatataacgattactttaatgattacaaatggcagagattagaaacagcagcaaaaagatttgattttgactttaccaacataacgccgcatgaggctttaagcgattgttttatgacgctacacgtcatagagtcgatggctaaaaagaaaaccgagaaagtttataatctttctgatttcttcaacagatag

SEQ ID NO: 248544 - DNA, 1356 bp, Klebsiella pneumoniae
atggctatatatagttttcaatgtaagattgtagcaagaacaaaacgtttaaataatgctgttgctcatgcagcatatattaaccgtattgatcttgataataaccgcgatggttcaaagtggcgttataatcatggtcatgatgatgtatataaatctgctgttttgcttccagataatgccaacaaaaagttttctgacccagcttatttgtggaatgaagtcgagtcaaaagaaaatcgatctaatagtcgtttagctcgcagttttattattgctttaccaaatgagttaacaccagaacaaaacaagaacttgattgaagattatattaaaaatcacatgacatcggaaggtatgattgtaaactatgctattcatatagatgatacaaataactttcatgctcatttgatgagcacgacaagggagctagatcctaatgggttagagtttgccaaaaaaaacgtaatcggcagaacgtggaatgatgacgagtttttagaaggattgaggaaaggctgggcagatactgcaaacacacaccttgcaaggcttgatcatcaggtcaggattgatcacagaacgctgtcagctcaacgtgatgaagcccttgagcagttcgatatggctaccactgcagaggctaaagctgaggctctggctaaggctgtaagccttgacaggccagcaatcaaaaggatttggcgtagtaagctgaacacagaagaaggtagggctttacgtgaagcacagcaagacagaagagatctgcagctcgttgttgctgaagagactaaaaagagtgttttgtctttaccacaagatatagttttaaataactttgctcctaaaaaaataaaatccaaaacaaaaacaaaaactactattgaaaaaacacgccccgccacagaagcagtttttaaaactgctgataaagggggagagataaaagatctcaaatatagttcttttaataagtttttattagatattaagataagatataacaagcatcaaaaaaataacggcactaaaaagctaaataagaaaatagacaagataataaagactatagatagagaagagaaaaaatctaacatcatgcctaatcattataatagtgattatttcattgatgataaaagtacgattattaaagatgaatacaaagatgatgaatataagaagctacagaagtttattgatgatgtagataaaagagctatagagctaaacaataaaaaagaagcaatattaaaagcagaacaagaaagcaaaaaagcactatcacaacaatctaaatacaagcaaaaagagggaagcgaaaatgacagacacatcaaatataaatga

SEQ ID NO: 248545 - DNA, 318 bp, Klebsiella pneumoniae
atgagtaaagcaaaagagaaaatagataataggatggcttatcatcttcaacagcttgcacaactaagagcaaagaaaaaagaagaagatagtaaggaaaaagtagctgaaagaaaaaaaagagcgagtaaaaatattttacttggttcttctatctgtaagattttaaatattgattacactgaaatagatgaatatttgcctaaaataatcggtcttttatattctaaagaacagcatataaataaccccgcttatttattgaaaggtaatgaacttttagagagctggaaaaatgacggcgacagaaacgagtaa

SEQ ID NO: 248546 - DNA, 693 bp, Klebsiella pneumoniae
atgattgttaaattccatccccggggtcgcggcgggggcgccggtcctgtggattatcttctgggtaaagaccggcagcgtgaaggtgccagcgtcctgcaggggaagccggaagaagtccgggagctgattgatgcgtcgccgtatgtgaaaaaatatacctccggggtgctgtcattcgcggaggcggacctgccgccgggtcagcgtgaaaaactgatggccagctttgagcgggttctgatgcccggactcgataaagaccagtacagcattctgtgggtggaacacgcagacaagggtcgtcttgagctgaattttctgatccccaataccgaattactgacggggaaacgcctccagccgtattacgatcgtgccgaccggccgcgcatcgatgcgtggcagacagtggtcaacggcaggctggggctacatgatccgaacgacccggagaaccggcgggcgctggtcacgccttcaggactgccagaaacgaagcaggaagccgcagagacgattacacggggtttgctgatgttagcctcatcaggagagctgaaaacgcgtgatgacgtcacaggggcgctcacagcggccggttttgaggtggtcagaaccacaaaaaacagtatcagcattgccgacccggacgggggggcgaaatatccgactgaggggagccatttatga

SEQ ID NO: 248547 - DNA, 369 bp, Klebsiella pneumoniae
atgtcccgggtattctcatccagcgacagcaatgcgtcccgggaagatgaaaattaccggatatttgcacttctggaaaatgtagaagaagagaaagaacggcagatcgggtgtcttctggcctgggaagcggatgctgtttttaaagtcatggtggagccggatatggaaagtatccgtctggtaagtcggtcagattttggtttatggttcaatcataaagggcgccactatttcagcggccagcctgaaaccgggtatattgcgaagttactacaggaattagatgaactgatctcccggcctcagagtaaatcaaaatacctggtaaagcgtcagcagagggttagcctggtgcggctttgttga

SEQ ID NO: 248548 - DNA, 318 bp, Klebsiella pneumoniae
atgaacaaactttcgcctgaaatgcccgaactgcaatcaatgaatatcactgccgataacatcaccaaacttaaatcattgtttcctgaagcttttaatgaagacagtgttgattttgaggttttaaagcagcttttgggtgaaaatgtagacgacaaagaagaacgctatggcctcaactggcatggtaaacgtcaggcgcgtcagcttgctctgacgccttctcgtggcaccttacgcccatgtaaagatgaaagcgttgattggcataacacctgtctcttatacacatctccgagcccacgagaccgaggctga

SEQ ID NO: 248549 - DNA, 201 bp, Klebsiella pneumoniae
atggaaaacaatacaatccagtgtccgttttgcctgaaagagagccagcgcggtgtgcatgtttgtactggctgcatggcgacggttctgtatggaaccttccccggctggtatgctttcattgttatagtattgaccttcggcctgtctatcctgattcagaaaaaaaagtatgtgcgatgctcaactttagcattatga

SEQ ID NO: 248550 - DNA, 150 bp, Klebsiella pneumoniae
atggtgattctgatcacaggatttgtgaagccgctgatcttgcacttgctttatggatttctaaagattacgtctgggtgcgttatacaattacggaaaaaaaacaaatttcagactggtttaaccaatgcttacgttataaagttatag

SEQ ID NO: 248551 - DNA, 297 bp, Klebsiella pneumoniae; identical to SEQ ID NO: 246129

SEQ ID NO: 248552 - DNA, 759 bp, Klebsiella pneumoniae
atgcaaaaagataggttcaaaataactgaatgggccacagtaataacacttgcaataggtttgtactgttatttatataattatatttattggagatactttgggatcaatgcttatgactatttttcatatattgatagtcttcaacgttctgtcccactacttattattgcacttagcgctgtttacaccgtttttatcatattttttgttgtgtttttgttagtaagaaagagggcgctgagtttctttcgattcgttaaaggcctacataaagagattcgatcagatcattactttgttttatcggcaattgctttaattgcttttttcctttcaagtctactagtgatgccgattcttaaaatagaaagcttgtcatatgaacaaaagaatctaattataggtgcactttatgttgtttttgctgcttttttctcctctgcgatttcgttatatgcttttattagaaacattgagcgaaaaagaaaattaaaaaatgggatgtttttgttttttatttcaccaatgccatttcaaataattatgtctatactttatatgccaataacagatgcgtatagagatgaaaatacaattcaggctcaggttgtaacaaagattgggaatgcctattcatcacataaaatgttagccttaacaaaggactttgtccttaccattgatgataaaaatgtaatggtaagaaaaattagtgatgttgaatatatatattacagagttgaaaaagttaagtag

SEQ ID NO: 248553 - DNA, 780 bp, Klebsiella pneumoniae
atgaacgcactctctgttttctcgtttcaggaagcgcaccctgttcgggtaattatgattgatggtaatccgtggtttgtggccaaggatgtttgtgatgctcttaggttaaccaactctcgcgtgtcccttgacgcgctggacgatgatgaaaagggagtaagttcaacttacacccctggtggcaaccagaaggtctcgattatttctgagtccggcctgtacactctgatcctccgctgccgcgatgcggtgaagcagggaacgacggcctggcggttccgcaagtgggtcaccaacgaagtcctgccagccatccggaaaaacggtgaatacagctacgtcgaaaccaccccaaaaagcgccggcgaaccattggactggcggcaaaaggaagaattacgcggcctgataaacgatatagcccaaagttttcagtatcgaaacgcgtggatcagtggtgtttggctggcgctgcgacgtgcctgcaggaatccatcacctaacccaattacggtcgacgatctgccggctatcattgccgaattacgccgaatattaacggcggcagaaactgccctaggtaatatgcgagtttacgaacgggagctgctgcgcgaggtagttcgtggcgggcgccagagtatgtcgtgtgaagaattgcctatcactgatatcaatacggaaatggagaaggtgctgccagcgcattttgagctggccatcagtaagctggagacgctatccacgaaattaacgcccccggctatctcctcctga

SEQ ID NO: 248554 - DNA, 231 bp, Klebsiella pneumoniae
atgaatcaggtgcagctaaacacccagggcctgcttgagtcgattgaggagcgcctggcgcagatagaagcgctggtttcctctgcccaccggacgatctccagctatgaggcctcgctgtatatgcaggaggcagcggaattgctccagttagcccgtgagctggtacaagaagcccgtaactgctcctcctctctgtccgcggagctgaccaccagggaggccgaatga

SEQ ID NO: 248555 - DNA, 351 bp, Klebsiella pneumoniae
atgatttaccgcaagggatgggtgccggttttgtttcggcatgagcttgagcgtaagttaaaagagcagggtttcgaaaactggaaagagatatgtaattttctttgcggtgaaggggatgactacgccgaatcagccaaaatgccagagcaatatgattaccaggtggtcgacaataccaaatggatggcaagccgtgacgcgacgttctggcagcgtcttaaccgcctgtggttcgtgccgctgtattcgttgactatcccgttccagtggcttatccgtggccgtgtcgggtttgcaactacgtcaaaaacagctgcattattcagccggataaccgggttgaagtag

SEQ ID NO: 248556 - DNA, 297 bp, Klebsiella pneumoniae; identical to SEQ ID NO: 235373

SEQ ID NO: 248557 - DNA, 219 bp, Klebsiella pneumoniae; identical to SEQ ID NO: 200107

SEQ ID NO: 248558 - DNA, 174 bp, Klebsiella pneumoniae; identical to SEQ ID NO: 199871

SEQ ID NO: 248559 - DNA, 225 bp, Klebsiella pneumoniae; identical to SEQ ID NO: 199872

SEQ ID NO: 248560 - DNA, 165 bp, Klebsiella pneumoniae
atgagccatcaggagcgtagctcggttagggctgcctacatccataaggcggagcatctgggggagagaaggctgatgttgcagtggtgggcggattttttagatgctaaccgagagaagggagtaagtccgtttgattttgcaaaactccatggctccatgtaa

SEQ ID NO: 248561 - DNA, 210 bp, Klebsiella pneumoniae
atgcgccagcgccgcgggcgtattttccagggcgatacagttgatccccaccgccaccacctgcgggttatccgccagggcggccatcacctcgcgcagcggcgtaccgtcgctgagatgttcggcgtcgcgcagcgtgaaggagtaccaggcgcgggcgcggggatactcctgcagcagggccgccagggcctggatctcagcgaatga

SEQ ID NO: 248562 - DNA, 861 bp, Klebsiella pneumoniae; identical to SEQ ID NO: 233227

SEQ ID NO: 248563 - DNA, 294 bp, Klebsiella pneumoniae
atgaagttaatgggtgaaaagttcgcccaaagtatcggcctgctgtgcagatacaaaggcttttacctcataaaggaagatcgtatctaccgtttcgagtggatgaagcacaatcagcagttgttgtctgaatattgtcggtccattatcactattattactgataaagatatccgagagagtatcatactccaaggagcagcctcgacatatatatttactatcccccatgaagttgtcggatccttcacagaggcgcttacccttacggatactctcatccctgatagctaa

SEQ ID NO: 248564 - DNA, 510 bp, Klebsiella pneumoniae
atgcatatcaacaccgagtcctgtggccccgatattaacgatttccatgtcgtcaatgatgctgttggaccagtactggataaatatcgccttaatttctggcagatagccggatgccggattaagcgtctgattttccccgtcaatggtaaagccggtaaaaagcagattatcgatataggtttcattaccccgatacagaaacggtgcggtcgctttgaatggcagcaggcgagctttctttttcccggcgccgatataacccactccagccaccggagtgacagggcgggaaattcgataagccccttcagggatatagattgtgccgccgccattagctcccagccagtttgtcgcccgctgcaggggataccacatgtcctcggaagaaaacgggtcaagcccacactctctggcatcaagaacacgtcgccgttccagatgctcagaaagtcgcttattcagccttttgatattctcctgaacgctcccctgcaggccgggtaa

SEQ ID NO: 248565 - DNA, 417 bp, Klebsiella pneumoniae
atgatttttagcgatgccattaaagcggcgaatgacctggcgagtattgtccctctgctgggtggcagttcgtcccgcaaagattacgaagaggcacttaaactcgttgaatatcttctggaacatgagccggacagcccgctggttgatatgctgactgcccgcattgatgcctgggaagataccgcggtggaatttgaagaatttaatacgcgtatcgaagctggtaaaaacggtgtatcgttgctacgggttctcatgcagcaacgcgggctttcacagtccgattttgaaaacgagataggcaaaaaatcgctcgtcagccggatcctcagtggtgaacgcagtttgacccttgatcacatgcgtgcgctggcaaatcgatttcaaatcccggtctcgatgtttgttgactga

SEQ ID NO: 248566 - DNA, 546 bp, Klebsiella pneumoniae
atgacagcgccagcagagaaaaacccggatggcggcgtatggcgccttatccgggctacgctctggtgccgtatttttgccgggtggcagctacgccttacccgacccggtgatttggcgctcaattcgcgcccttcgcaggcccgcgcaagcgtagcgccgccgggcaagggcagcgggtgcggagccgcttttgtgccgggtggcggctgcgacttacccggcctacggtccgtgcgacttgtcgttaatttattcaccattgttgctgaaactgccggtgctggcggcctcaaaatcgctgagacgttcccggaaggccggggcagcccgcatggatgcgggctgagggccgtgttttgcacggacgctgcctcggcccgacccgaagcctgcagggataagtcgaagggaccgcgtagcggcgattttgctggccggagcccgggggtacagggggcggcggcgactggccgccccctgtgcgctccctgcgccatgccaggcataacgcagaagattaaccgggagcgcaatgtgcgctga

SEQ ID NO: 248567 - DNA, 543 bp, Klebsiella pneumoniae
atgggtatcgccgttgaggttatcggcgctgaaaagctgcagcagatgcggctggccatcgagaagctctccgacagttcgctgcagcaggagctgctggagagcatcggggccgtcgtggagtcgcagacccgccgccgcatcagtgacgagaaaacctcaccggctggtgagcgctgggaggaatggtccgagggctaccgtaagacacgcagcggaaatcagagcctcctgcagggcaatggcgatctgctcgacagcatccagtacatcgtcgagcgtggccgtgttcgtgtgggttcgccgctcagttacagcggcgttcaccaggacggttttgcaggtagcgtcccggtcagcgcccacaaacgtctcattcatcaggcgtttggccgggcgctgaagcatccggtctggcagaccgtcggttcccataatcgcatgatggatattccgcagcgcgagtacctcgggctgtccactgcaaacagtgatgagctgatgcacgtcatcggcgacttctggaaagaggtattaccgtga

SEQ ID NO: 248568 - DNA, 2010 bp, Klebsiella pneumoniae
atgtctcatttattttatggcgtggcgtattacgatgaatatatgccggaagatcggctggctaaggatatcgccttaatgcgcgaaaccggcattaacgtggtgcgtattgccgagtccacctggagtacgctggagcctgaagagggccactataatttctaccatatcgaccgggtgctggaggcgatgcatgaggccggcattgcggtcatcgtcgggacgcccacctacgcggtcccggcctggctggcggcgaaacatcccgatattctggtcaccaccgtcgcggggcagcaaaaatatggtccgcggcagatcatggatatcgtcaacccgacctttcgccgctatgccgaaaaaattatccgcacgctgatggcccatgtgcaacaccatccggcgattatcggctggcaactggataacgaaaccaagcattacgacaatattggccgctatatgcaggagggcttcgtgcgcagcctgcaggagaaatatcctgacctccggcagctgaatcacgatttcggcctggattactggagcaaccgcattgaccgctggcaggattttccgccggtggaaaacaccatcaacgccagcctcgcctgcgccttctcccgctatcagcgtcagcaggtcaccgagtatctggcctggcaggcggccatcgttcgggaatacgcccagccgcaccagttcgtcacccacaacttcgatttcgaatggcgcggttactcttacggcgtgcagccgcgggtcgaccattttgcggcggcgcaggcgctggatatcgccggcgtcgatatctatcacccgagtcaggcacacctgaccggacgggaaatcgcctttggcggcgccatcacccgctcgcttaagccgggccagaactacttcgtgctggaaacccaggctcagggtttcgcccagtggacccccttccctggccagctacgcctgcaggcattcagccatatcgcctccggcgccgccatggtctcctactggcactggcattcgattcataacgcctttgaaacctactggaaggggctgctcagccacgacttctcgcgcaacccaacctggcaggaagctaccaccatcggcgccgatttcgcccgcctgtccccgcagctggcggagctgaaggccgaaaatgacgtcgcgttgctaataagtaatgaggcgatggacgctctcaatcacttccttcccggcgacgccaggggcaacatttataacgatatcttccgccgcttccacgatgcgctgtatgaccacaatatcagcctcgacatcatccacgatgtgaacgaggaaacctcgcgctaccgggtgctgatcgttcctggtctgtacgccgccgatgagggcctgctaacgcggattaacgactatatcgcccggggcggcagagcgctgatcggctttaaatcaggctttagcgatgaaaacgtcaaggtgcgcagcagcgcgcagccgggggttttgcgccagagctgcggcgtcagctacagccagttcaccctgccggaagagacgacggtaagctcttgctgcgcagagattgattgccgcaatgacaatcaggctgagctgtggatggaattgctgacgcccgatgacgggacccgcaccctgctgcgctatcagcacccggcatggggcgaatacgccgccgcaacggaggcggattacggtcagggtcgcgccctgtacgttggctttctgccgcagaagggcctgattagccagctgtttgatgtcctgacggcggatctcacgctgaactcgcgaacttccgcctatcgctatccgttagtggttaaaaagatgcgtaaccgcgccggaaataatatccacttcctgttcaattactccggcgaggcgatggatgttgtcagcgagaccctgggtaccgcgctgctgagcggggagacagtatacgtcggccagccgttgcgcctcagggcctgggaatttactatcatcgaaagctaa

SEQ ID NO: 248569 - DNA, 354 bp, Klebsiella pneumoniae
atgcttctcaccatagactctttaaaagagtcaggcgcatttactggtcgccctgtagagaaagaaattaattggaaaggcagagatggaaaagaatatagagcaaccgtctttgtgcgaccgatgggctatcattcggtgaaatcagaccttcttgcaatgaaagggaaccatgatccagtagcaggcctgattgcggcccaaatttgtaatgaagaaggtaaatctatctttacggaagctgacatacttggtaacgcttcagaagaacgtggtgctctcgacgggcctattgttattgctcttttagctgttattcaggaagttaatgagctgggaaagactacgagctaa

SEQ ID NO: 248570 - DNA, 264 bp, Klebsiella pneumoniae
atgaacggcatcggaggccacaccatcgcagaggctcaggagcggatgagtcgtagggaatttctggtttggctcaagtaccgtgagaagtacggaccgctcaatatcatgatgcgtaccgagtggggcgcagcccttgtagcttccgtactggctaacataaacagaggtaaaaactctccaccatttaagatcagtgattttgccatacatatcaatgaaggccctataagcctggaagatgcgatgaacagttggacatga

SEQ ID NO: 248571 - DNA, 2901 bp, Klebsiella pneumoniae
atggcctttaacccggagctggggagcacgtctcccgctgtgctgcttgataacgctgagcgtctggataagctggtcaatggccccgaggccattgtacttgaccgcggtggagacccactgtattcatggcgacttattcagaaatctattgagtcagtatcaattgctgcaaatacctcgatctctgagttgcaagagcatgctgatcagcagattgataatattgcgcacagcgcagcggtttcccaaagcgtagtcagtgcctctgcccaggctgcaattcaggatattaattctacggtcacgcaaactgcaaatgatgctgccattgttctggccgggctcggttacctaccgccagcgccgttcagctctggtttgtccgtcagcagcacacgctttactgtcacatataacgggaatacctatgcggcaatagctgacaaggtaccctttaccacaacatcaacgtttgacggttcacaatggcgtttgcttgctggtgtcatgagcggtgacgtcatgacgattgttgacgctgctgatactgttgttcatgtgatgccaggcccctctggcagtccggctacagatacagccagattacaggctgcgctggaaaagagaggtactattctgtgcctgaatcctggtacgtattattacagttctacaagcacaattcgcagcaatacccggctagtcattggccatggagtgacctgggaaaaagatattaattctgtgtgggggccattcctcaggaacgcggcatacagtaatacccgtcacgcagtaaccagtatgacggtatcaacaagctacagcgacccgtggaaagacaacgtcagttccagtggtctttccgcatacctcaacattgcctgtccagggcatggttttgcggcgggtgattatgcggccttttacggcgcggttgaattcggttttgatggcatcatgaaggttgtcagcgttactgatgacgacaattttgtcgcagaggcgcacaacctgccgaaagggaagtccgctacgtatgacacctgggccaacgggctgttctgtttcaaagctgacgaaaatatcagcgtggagatttatggccgccttgacgggaaatgcacgcaactgaaagcgagcggcgagccgtccgacaccatgaagctgtatctcatggggatgatttttcacggcatcatgaacggcagcctgtacataaactcaatccggcgcatgcgcaaatattcagcgctgattgctaacgtgcgtaatttcgtcgtgccgtttgcgaacatcgataactattcagatggtctgcacttcatgcccccgtatgttgatgtacatatcaaaacgatcgccggcgcagggggagacgacattttcgcgctaaccggcggagattttgcgcattatgaaatcagtcgcggacacgggtacgacattacgtgtgacaaactgaatccgcagaacgcattatgtgcggttaaaatcacaggaaatgcgccgtacagattctggaatatcaatattggtgagattaccggactgacgcagactgatgcgataaaagcaatctgggatacgaacctgacatacacagcaatcgggacgctgaaaataggcctgtttgattgtgctgttcagattggttccgggctgaagctgacagcagatgaaatagattccgtggtcattgatgagtatgtcatttctcagaagtcgactaatgggtgggacattgctgttggtgattcatcaagaaataaggttgcaataaaatctctcatcgtacgcaatgtcagattaaaaacaccggatgttgctgttacccggtttctgcaacttggtcgcgcggctgaggttggtgatgtcgatatccatgccggcaatcttgctatttccgcgctcggctctggatttatttacagtaacggttcgacagagaccctcgcagcaaacaaaaccagccgtatcagacttagcggaaaaatttccgcgccttccgcaaattacgtggtgatgttccttaatggaatgaatgatgtgattgatgtgtcagggctggattttgaagggtttgcgaacctcatccggacatctaaaaccgtagctccctggaaaaaggaccatattgatattaatgcgcgcggtttgcgtgcatacgatatcaaccgtctcttcacgctatacgccggtaaatggaagattggtttcagcggggaggtgctgacgccgggggcaggaaagctgacgcccattttcgccggatataacacggtggtgcacatagacggctatgcccgggtcgagggttcatcggaaacatttactgacgcgtcgggcgcgtacacactggttaattcactggttattccgactgcggaaagcgcgggcagtggtgacgtgagtcctgtaattcactcacacgattctcgcaacctgttgccactttcatacgcaaccagcccggtagttggcgaggcattgacaaacgccgtcagcggacagtcagagaacaggctgaaatacgggcattttggctgggtgcctgaatcggactggcgaaattatcaggctgccggtgatgtcaacgctgcggtatatcatccgtattttgatcgcggcaacgtctggcacgtcaacggcatcacccagaacattacaatcgcgcagtcatcatcggactggggcgtgctgaaaccaggggcgagagtggctgtaatggtgacgcaggacgctgtcggcgggcgttcagtcacgttcgacccggccaacttcacgtttggctacacgccagcgacggaatacactgccggagcgacctcgctgtacgagtttgtgtatcaggggggagggaagttttacggcatgataccgaacatctggtattga

SEQ ID NO: 248572 - DNA, 588 bp, Klebsiella pneumoniae
atgagggcaattaagaacttttcagagcaaaacttaaaacgcataccggaatttttgaaatatgaccctgagacgggcgaatttagccggataagagtaatcggtcaccgcttcaaggtgggtgataaggccggaaccgttaataagcaaggttatgtgcgcatcatgatgtttggtatgggatttcaggcgcataggttggcgttttacttcatgactggtgagctgccacctggcgacctagaggttgaccatatcaacggaaatcgctctgacaacaaatggagcaatcttcgcctggttactcatgcggtaaacatgcagaactccagaaagccaaaacataacaccagtgggcaccctgggattctgcagaacaagaaaacagggaagtgggctgcgcgcatatcagtgagcggacgaatgattcaactgggtgaatttctggataaacaggaggccattaattgctatctggctgcgaagcaaagaatgcacgaaggatatgttggatttgaagggaaagccgcggtgcagcaacaccaacggctttctacgcgaattaactggatcaattcacaggagtaa

SEQ ID NO: 248573 - DNA, 204 bp, Klebsiella pneumoniae
atggataaaaacaataaaaagactctttcccataagaaaaatgtaggttttactaaaactgaaagaaaacttgcagtgatttgtgataaaacttttctaaagctctggtcttggactagtttgtatagcgacgaaggtatcaataaaaatagaaaaggcaaggaaatctgcgatcttctagggaaggtgcgaacaagttcctga

SEQ ID NO: 248574 - DNA, 360 bp, Klebsiella pneumoniae
atggacaaaattaagaccaaaagaagcgagcgccgtttgtcgcgtgaccttatagaagaagggttaaggctggtggcagaacgtagcgagcgggagggagtgaacaaagataccgctaaacgtcatgcttcagccatcaggggcgtgattccggcgctgggagtagtaaagagtaaggttgtgaagccgggggtttgggtttcgctttatacccgcagcgatgctacatcgaccgtcatcagcaatatgaagtttaccgccgtcatatttgagtgggccggacagcaggagtatgaagattctgcattttatgccgctgttgcaaatgccatccgtacagcgctggctgtcagggggtaa

SEQ ID NO: 248575 - DNA, 879 bp, Klebsiella pneumoniae
atgctcagcgatttactgataatggttgaccgccgcgctcaggcggtcagtttgcgtgagaaaacaattattaacgagcgtcacgccgtccgtatgctggagcctgttttatctcttggggtacgcgctgcaagcgtacctgaaacgtgggtaagatacgctgaccgttgcattgataaggggttggcggcgtctacggttcgccagcgcatcgattgcgttgcggctgttgtagcctgggtgattcatgctgatattaaattcaaaccagccgcgccgggctctctgggcaggatgcttgatgccatgcgtacagcggcaagagctataggcaagcggataaagcgtcacagggcattgagcaggccagcccgtgtaagtgttgacgagtattctacagtagtgcgcgatattgagtctttgcgggatccctatcgggccgcagcccgtatgatgctgtgttttgggatgagggcaacagaaacgctttcactatctccatcatcaattatttcaggagggaagttgtttgttcctgaccgggagactaaaactcattccgatttgcttttacctttgccagttaaatacattcctttaatcgaggggtggctaagcgtgataggtgagtcagaaataaagtacaacacgcttgtaacgacgatttcccgcgccgggattaaatggcgctgccatgatttaagaaaattattcagaacatccgccgctgtgcgtggtgaggattatcttgcaacagaattgatattaaatcacgcggtaaaggacgttccgagcgtttacttacaatctccaccgtttgcggcaatgaggcgagttttaaacaattcgattgaagaatatttacaggttaaagggtag

SEQ ID NO: 248576 - DNA, 258 bp, Klebsiella pneumoniae
atggaaaaatcagcgattaaagataatgatattatgtatcaaaagaagtatccgagagattgtctgtttaaattgcttcaactacgcactaatttaaaagcgaagccagatatttaccggatagaaatgattaaccgcagtggtgataagattttgatgggagggcggcaaacaacacaggaggcgatttctctttatcaggatattgcgacacttagcccgtcagaagtggaggcggcattcagtagcatggtctga

SEQ ID NO: 248577 - DNA, 954 bp, Klebsiella pneumoniae
atggcatacgggcgtcagttcgaaataaccgttaactgcacagatggtgagacgatccacattactgatgtggacgttgatttctcgtctgtgcgtgacgatgaaaaagagccaaacgaggctgatttaacgttatggggtttaacaccacagacgcagaacgccatcgctcaggctgggtcaaccgtcagtgttgccgctggctatatagatgaaggaatgttcacactttttcagggcgagcttatcagcgccgtgaccatcaagcccaatgaggtatacggcctgaaaatgaaaatctatgaggcgctgattccatttcgggccagcgttacatcgcgcacgtttcgcaaaggccagagccttaaagatgctgtgttacaggtagcgtccgatatggggctgggttgtcagttctctaaatcagcgtcatctctcaccctggctaaaagcgtcagcgctgcggcattgtcccgtgatgtgctgaccagcctttgcaagccagttaatgccaactggtcgcttcagtatcagtcaattgttgtcactgctggtgattcaattcttactggcgctgctgttttctcccctgaaacgggcctgcttggtgcgccacttctgaagattcattccccgaaacacacgaagaaaaagaacccttccgaaaaagagaagatccagaagaagcacgacaaaagcataactacctatgtctggcccccgaagggctcacaggttgactactcaaaaggtgctcgtcgccagatgggggttattgaggctgttacgtgggaatcattgctttatggcggggttgagattggcgagcaggtagagctttcgtctccatcaatgggcgaaggctggatggttattgtgaagaagatttcccatcgctttagtacccgcgaccgtcaggcgtggtcatcgtcatgggagggcatcatcgcatga

SEQ ID NO: 248578 - DNA, 711 bp, Klebsiella pneumoniae
atgagagccggtagccagattcaggccattgttgagcaggcgcttaattcagcgcttttttcacttgaggcaacgattgtttcagtcagcggcgggctggcaactgtcctgccaaccccaaaacgcatattcggtgacaactctgaaccgattgcttatccggctgttgaaaacgttcgtttagtttcgctcgtctgggatagcggtaagtcaggcgttagcgggcgagtttctccgggggatgaatgtctccttatcgcgctttcacacggtgacggcgacgaaccagaccataagaccatttcaagcgccatcgctatatgtgggttttcagacgttgccagtcaccagatgccggataaggcagggttaagagtattcagcggtagcgcctttattgaatgggatgacggaagcattaagggcgataccgggcaaggcgctactttcgagtttgcgggcaacaaaatgaccgttaacgcgccgggcggtatcgatatgacagcgccaatgacaaccataaacgggaatttgacgatttcgggatccatcagtcagggcgctgaagggggcggcgacgctgactttggcggcaacgtcaccataaccggcgatagcaaagccgctgaccacatcagcggtggtaagtccttcaattctcacacgcataaagaaaacggtgagggcagtcagaccgacgccccgacataa

SEQ ID NO: 248579 - DNA, 378 bp, Klebsiella pneumoniae
atgaaattaactgaccatgcggcacaaatcgcactttcgaacggtggctttctgattgcgggggactacagcacaaccattggcaaaggcgagattatcaatatcactgagcgaaccgggcttgtagttgagagcgtcgagagcatcaccctgattaacgccccgctgtgtatggtcatggcgacgtgcagggagagcaaagaccagtacatgccattttacagcgatttgccgtttgaattgccgcatcaagcggcgatggcgcaaatgttaaatgatgctggtgaagggtttgaccttgatgacctgctggatatcgagtcgctggattctgctgtgacggtcgtccacgttgaaaaatggatgcacaccgaatga

SEQ ID NO: 248580 - DNA, 219 bp, Klebsiella pneumoniae
atgaacatcacaacaactcagtatcgacagggggtaaagggctgctttctttccacagagaggccgcaggttggcgaggatttaaagctggtaatgctgacgtccagaggacgacgcattatccccgttggtgaggttcagcgggttgaggctgtaggtgctagccgttgcctcgtatgggtttcggcgctggcattcgttgaggggatgaattactga

SEQ ID NO: 248581 - DNA, 348 bp, Klebsiella pneumoniae
atgctggacattatgcaggatgaaagcggagtcattctccgcaacggtgatttagtgctggatggcggcattgatggcattgcacagcaggccgaaatccgtgtaggcactaatcgcggcgaatggtggcttgatgaaactcaaggtttgccgtggttgcctggcattatggcgtcacgtctgccggtttcgattgtctcgaacatgattaacgcagaggcacggcgcaccactggcgtgaccgatgccagaactacaaccatcaatgacgttaagggggattacacgattcgctttgcggtttatgtcggagcagatagcacggaggtaacgagtggaattaattaa

SEQ ID NO: 248582 - DNA, 1410 bp, Klebsiella pneumoniae
gtggaattaattaatgatggtggctggcacggtgccagactgccagagctgcgcggcgacatttaccagaaattgcgcgacctgctgggggatataagcccggacggtgattccctgattggtcaggttatggcggttgtcgctgaaaatgacctgaatatagtggaggccatcggctggacgttttctggtttcttcatttcatcaggtgaaggcatccagcttgacggcatcggagaggggttcacgcttccccgctatggcttaacccggtcatctgccgatgtggtttatctactggcttcagggcaggtaatcgcgtctggtgagactttcactatctccggtatttctggtgactggtcgccgtcaggcagcattcaggccaatggtaaaagtgctaccgggtttgtgctggaggttaaagctgatgctatcaccacgggaaataccttcaccatatccatcaacggtaagccatattcaacgcagtaccagacaggcgatacgtctgattcgattttatccaggctgtatcccatcattgccgccgctgatacgtcagtaaccacatattcaacagaatacgggttgttgctttatgcggcggacggtaaatcgctaattcagttctcattttctgatgatgttttttctatcattcgcaccggaatgcccgcgacaacatggtatgacagcgatacggagtttcctgatgttcggttcggctatgtggcaacagatgacattctgattctcgccaacggcagtaaaggctttgaaatagaagatgacgagcagtacagagagcgtcttttcgaagcagcggaggcagggcgaaagaatgtcagcgcatcaaggccgggcataaaaaatgccgttttagcggttgctggcgtaagccacgtcactgttaacactaacaggggaattgagacagattccgatggcctgccgggtaagtcggttcaggtttttgttgctggtggagatagcgacgcgatagcacaggccatctatgatgcggcagcggctgaatgcggtttctacggaaacacatcaggtacagcaactgacggcacaactaccgaaacggtgtatttcactcgccagagcttccagcttgtctatgtttccgtttccggtgatacatgggacgctgagacaacaggtaagccagacgattacgagagcgtagctaaaagcgttatcactggctatttctcacagcttgaaatggggcgtgacgttttcgcgggtcaaatatctgcccgtttggttacggcttttccaacgatgacggatgttaccgtaactgtcggcacttccgaagcaccgacagggaagaccgttcccataagtagcggcgttgttgcggttacggattctacttctgtggtggtgtcgtaa

SEQ ID NO: 248583 - DNA, 756 bp, Klebsiella pneumoniae
atggaaccatcaattaaaaaaccggggcaactggcaactgaacgccttacctcaaaggtcagattacaaaaaaatatcgacctcgtttccggtattaaggccaaccagcagggaatggttgatgcgctggactatctgaaaaaaggtttttcaattactgattcttcgggtcttttgcttgatgcatggggggaaaggttcgctataccgcgagagggtcgcgacgatgatagctacagaatagccctgttgcagggtgccgggacgcaatctgtttcgcttcagtcgcgccgcgctgtcggtggattcatccagttagcctatagccttacatggttgcgtctgaatcgtgtaggactttctgcgggcgctgtaggtgcggctttcaaccgcgtacctctacgcgctgttttcgtccagtgtggctcgatggctccagatatcgaactgccggaaacactggttgcggcaacctttgccggggatatatacagcgctgcaacacctcctaacgtcaaattagcccaccacgcgccaatgttccccggtaatgcgtttccggctgtgtggggcggcatcaagtacgagaggacgcaaaaaacagtgatggctacagcaaataaagggatccgagtcaccgcgacaaagtccattttgacgcggatagagggtacgaaaacggttaacgggaatgagcttctggagccattcaacacgcttgtaacagtcaaaaagatgaaggtgaaaaatggatag

SEQ ID NO: 248584 - DNA, 234 bp, Klebsiella pneumoniae
atggatagctgggccaatactgacaaaacttacgtggggcaaggtggtgctgatattccaaacaagcaagagccatcagaagaaatgcaggcgaccgggttcgcaccgacctactttgatgtaaatggcaatctggtgtttggtgacggtataagcgctcaggtaatgaattacatccttaacgacctgtacaaaaaatatcaggagcttttagccagggtagaagcgccatga

SEQ ID NO: 248585 - DNA, 237 bp, Klebsiella pneumoniae
atgaatacattttcgaccgttgctcgtaattatcctgtaagtggcggcatttatccgagcaagaaacaaccatcggcagcgaaacaggctgatggctttgcgcctacttacatcaatgcaggcggaaaattgattgaaggggatccggttgacgtggcggagcttaacttcatttttaacgacctgtacgcgcaggcggcacacattggccagcttcttacggctaaggggaaataa

SEQ ID NO: 248586 - DNA, 633 bp, Klebsiella pneumoniae
atggcattaacaccagatgagctaattgcgatatcagaccttgagaaagcacagattgcagactccgctgtagtgcctgattgggttcttcctgctgaagttaggggcagtagcgcaccgataaacggtattccgtaccctcagcacaccattgacgtgtttggcgggcttctgactggcgaatggtcgcttaaattccagaacccgttacaacgcgttgtgtgcgatctggagatattccacggagagaatgcgccagaatcgacgcccccggacttgtcagcattacagttaacggcgaccggctttgataaagctgtgattttttgcccggcaaaaactgttacagatgcaatgccgataaactttatggggttggctgtttccggtgttacaccagtttacaggctgggaggcaaacgcagatttctggagcagtctggaatggttgtcatccctttaaccgtgattctactgtcaacgcagccgctgaccaatcaggaaacaagcagggctctatccgtctccctaaagcgccgtaatgagaatcagatgactgtagcgccaattatcagcgggatggtctacagtaacccattaccatcagcccgagatatcgcgcaggcgtcgtga

SEQ ID NO: 248587 - DNA, 204 bp, Klebsiella pneumoniae
atgcattttattgacgataatccaatggaaaaccttcgtagaatcgatagaccggaatttgtcgagtggtatctaaaggtagttgatatcgtaaaagaaacgggaagtggacacgatatatcatacaaaggtttgtgggttgatttttatgatgatggcttaacccctgaggaagccatcgagaaaaaaacgcaaattagctaa

SEQ ID NO: 248588 - DNA, 1797 bp, Klebsiella pneumoniae
atgtccgaaaataattatggtgcgctgatgatgaaatcggcactcagcaccaatactgaaattgatggcattttattgtctggcatctatccaatccctgaaggaaatccttcgtctccagatccagaaggtggtttcctgactgtgtatccgggagagaaaaagcgaagaaccttcatatctgataaaaacattctcgctacatcaacctatgacgctcagtcaatgacgtggagtgaatgggttattccccgctctcaggctgacctaagctcacctaatggggctggttatgtaaatgatggaaatgctcctctgtcagaagtgatacgtgaatctattttcaaatacttaaccccagtagacaggattaagctccagatggtttctggtagcgttgtcgttgctgattacgcattaaaagctgcgatagctgatggggttatggtactggatattccgtggatgttgggttcactcgaactaggctctgacccggcaacccttccattggggttttcgatacagggctggagttgccgcagaccgtacaccatttctggcgatagtagttttttgggttgcggagtggttatccgcgttgctgctggcgcaaaatttcctttctactcaacaggtcgtcacgactttaaaaacatcaactttgacggtcgagataaaactactcaacttttatactcgactaactcaggagcccaatttaatggcactcgttttgagggctgtggtatttatcgttttgcagtaggactaggctggtctggttatactggcactctttttgccacaagatgctcaatttctggtaacggtgatggtgtacgtaatctcattgactctaacttaatcgggtgcgtaataaacgccaatgacagaggggtgaacttacagcaaggtgcaaatagtaatacatttatggccgtaagaaatgaatggaatgctggcgataatttcttttcttataatgcagtcgataatgtcattattggtgagatatgtgaccgggctggcagggctggcattgtagcttcaggtggctcaagctggttcgtcattggtactgtggttcgacgttctggtaaaaatgaaccagttggctctgattattcagcgaattttcttattatcgattccggtgaatttataattaacggcatcagaacaagatccggtgttgatgataccggcgctggcgtttcgtcgccttcatttggcgtttccgtgattggtagcggaaccccaaaattcaccgcaacaggctgtgatttatctgggtatgtcactaaagcattaagccgcaaacaatctgccagcatggttgtgtctgcgtgtcttggtatgcctgattatgtgaatataggcccctcaaaacacatgtttggccgtgattgtcttgactcaaagaccggaactctggcggcggtaaaaggcaccgttatcagctttccacttgaggtacctgttgatgacgaatccggcccggttcagtgggaagcatacgtaacgagaaagttacatatcgaatgccgactttcagaccaacgatttgacctcttggatattcccatccttttcaaatttgaggattatcgttcaattgtcaatatcacctcccgcatgtatgtatcttcggcgagaataggtatcgacgacaacgccactggagtaagagtttcatggacacttaacagcactggagatacattgaccgtgactctcacaagtgttgatggtgttgagaggaaatgccgagcaactttactacctgtaatgtaa

SEQ ID NO: 248589 - DNA, 516 bp, Klebsiella pneumoniae
atgaaaaccgcacaggaaaagttacaacgtcacgttgaaaaacaacgtgagtatcagcagcgggctattgcccgccagcgcgagaagcaggcagacccggaatggcgacgtgctcagtatgaaaaacagcgggaacgacaatcccgctatattgaacgggcaaaaaataaaccgtgttcgcgcggtttgaaaggacgaacgccccgcgccgctgaacgctcactgatggacaaaatcggcgctctaccctgcattgcctgttacgttcatgggattattaacgatgtggtcagcctgcatcatatcgacgggagaacagcagcaggtgcacacgcacgtgtgttgccgctgtgcgaccatcaccaccagcacgcagcgccagcagcaatacgtgcggtttatgcctggctgattccggttcatgctgatggaacatgcggaggaaaagctgcatttgaagcgctaaacggcactcaggacgatttatacacccaatgccttgaaatgatagcctga

SEQ ID NO: 248590 - DNA, 1599 bp, Klebsiella pneumoniae
atgtctacattactcactatccccgatgccgcagaacttgcagtacataccatgatggcacttaaagccgctggctatgcaactgctgctatgattcccgttcacaaaaatgcctcaaatgaagtcgaaaaaacggaagtgaccgcgccggaagtatacgtagcgccgggaaaacagtacgccaatgctcaggaagcgctggcgcatctggtgcgcgaactgaaaaacccggaacgcgacaactataacgaaacgctggactttacttttgcatcactggcgcaactgctggacatgcttcgcgagcccatctatcagcatgggctgatgctcaaacaggagtttgaaaaaggcgacgagcttccgctggaaatggtgacaacctttatccatatcccaaccagcacggaagtatctttccggctcccggcctttatcaaagaagataagcggcttgatgaatgccagcgcgtcggcgcgtccttcagctattttcgccgctatggtctgcgtcaggcgctcgatattactgatggtgatgacgatattgaccaggcagacagtaagcgcgaacgccgtaaggcccgcgccctgaacagtagccgcaaatggaagccgaccaaatcagaacgcactaaggcggaatccatcctgaatatgctggttgcggctggtgaattcactggcagcgcggtaatcgcccaggctaaagcccgtaacccgtttctgcgtacaccgtcagaagttgcagaggatgttatccattcccgtgataatgccaaagacgataacgcaatggcccgcgatactgtgttgcgctatggcctgacggatgagcactggcagagtttctacaaacaggccggattctttcaggtagacggcgacgaacttatcgacaccagaactggcgcacacgtcagcgctgaagtcgctatggatatcgcagaatctctttcatctgttgcgatttccggcgctaattcaaacgatgtgcatgatacccgcgatatgtcagcgccagtcgcccggacatttattcctgactgcaccccgcttgatgacgatgaagaggtttttgttgccgccgttgaagcaggccacgattcggaaattattgaaatcgccatgcgtcagatggaagtccatgtgtcgcacggtctggatatgcgctcagtacacagcgatacgagctatcaccgccgcaactggtataacgcttgccgtgagttctatacactggctctgatgcgtggtgatgtgaactttgaagcgttggcaaatcctgaaatgaaagttgcccgcaccatcatggatatcgtcggcgctgacggcgataacgaggccagcgaatccaccattgcagacgcacaagcgcaactcaccgtcgatgcgatgcaacaaaaggtcgatattgcgcaggaaatcgcgacaggtaacgctgataccgatatcaagctacaacagcttcatgaaattgcgcatcgctgtgatgcgtacaccgctggctatatcgaaactctcatccgttatgttaaaagtggtggcctcaacagtgatattccggcgtacgtccctgaatctgaccttccttactga

SEQ ID NO: 248591 - DNA, 531 bp, Klebsiella pneumoniae
atgcatcaattcactgaacttgcatacagatgtactcacttttcgttacaagctataaacgaagcctataaaaggtcggaaaaagaacttgcagaaacagagtcaacgccgccagtgaaaaatctacaagcattgaaccttcaaaaaatgattcatgctgtagggctattttcagtttttgaggctcatctacagcggagtcttaactgtcagagtggttttcaagaagctgaatccatccttggacaggcagggcagcaggcgttaaaagaagaatttcataattattacctagccatcaatgcgctaaaacatggggatggagcgagctacaataagttagttgccaggattaatgatctggattttgaagtggacacacctaacgcacctgtctatgaagtgggcgaccttactgctgtatctggattggtgaaggttgatgatgctttcatcgaaaactgtctgtcggtaattgaaaaagtttcagaatgtattgtaactcaaagaccagattacgcaggttactaa

SEQ ID NO: 248592 - DNA, 531 bp, Klebsiella pneumoniae
gtggggaataagagcaaattaagtgccgttatgttgggtttgattgctgccggggcaagcgctccagtattgatggcgcagtttcagcacgaaaaagaaggaaccagcctgacagcttaccaggacaaaagccggggcatatggactatttgcggcggtgtgacttacgttgacggcaagccggtaatcaagggaatgacattaacgcgagcacagtgcgataaaattgataaagccgaacaagctaaggcgctggcatgggtggatagaaatgtccacgtgcaattaacggagccgcaaaaagttggaattgcatcattttgtccgtggaatattggccccggtaagtgttttccatcggggttttatcgtgacctgaacgcggggaactttaaaggtgcttgtgcgcaaattaagcgctgggtatgggatgccgggcgtgattgtcgcatacgggagaacaattgctacggtcaggttatccgcagagaccaggaatcagagctaacttgctggggcatggaaaaatga

SEQ ID NO: 248593 - DNA, 807 bp, Klebsiella pneumoniae
atgtgtataagagacagggataaaagtattggcagcccagattatgaaaaatacaatcatcttagtgaagatagtataataaatcgaactatttgggtttattgggcccaaggattagataatgcacctccagtagttcagaattgtgtcaaaactctcaaagagaattcatctccagattttgtagtacaggtggttgatgattttaatttggttgattatattgatataccagagattattaataccagattaaaagagggagtaatctcgcgtacacactttagtgatattgttagatttgaattattaaaaaagcatggcggagtctggattgatagtacagtattggttgctgagaactttaggggggttttaaataaattctcaaaatttattacattgaaccataatgatcataacccttatactgcaataaccgaaggcagatggacatccttctttataggcatgccgaagcattccgcacttgccgattttatgtcggatgcatttgtgtcctattggaaaaagaatagcaaacttatagactatgttcttgtggattatctgattgccttggcttataagaaaataccagcagtacaagaaatgataattgggcaaaatgagctcattggtaactctcgttggtttctacaaaaagtttatgataaaaaaatatctattgatattgatgaggcaataaattcagatatatataaaatttataaacttacttataagctaactccaccgatggataaggatacctattattataagtttttttgccctgagaaatga

SEQ ID NO: 248594 - DNA, 510 bp, Klebsiella pneumoniae
atgaaattcgaagaatggttagcacaacaggatgacgtcattgaggttgagtgcggctgtgttaccactgaagctttttatcactggatgcgcgtagcttatgaggctggcaactctcaggtgattccggatggttggacatgcaacgataaagcaaacgcagcgctgatgatgcttgatcggattgaaacggtagaccctgttgatgatgaccgtatcgacggcattaagcgcattgttcgtgagctcgcagccgccccgcagtcacccggcagtgaacccgctaccgtgccgggtaaatggattccggtaagcgagcggatgccggaagttggcgttaaagtcttatgcttcccggttaaagatgagccaattcatgcaaccttcaacggtcaattatggctgcaggatatttcatggagcggaagcgacgagccaattgataacgtcattcctaccagcgtaacccactggatgccgctgccggccgggccgcaggaggtgaggtga

SEQ ID NO: 248595 - DNA, 1245 bp, Klebsiella pneumoniae; identical to SEQ ID NO: 217882

SEQ ID NO: 248596 - DNA, 171 bp, Klebsiella pneumoniae; identical to SEQ ID NO: 138617

SEQ ID NO: 248597 - DNA, 321 bp, Klebsiella pneumoniae; identical to SEQ ID NO: 129668

SEQ ID NO: 248598 - DNA, 174 bp, Klebsiella pneumoniae
atgctgcaagaaaccgtattgcgacttaatggactagaattcgactctccattagtaatatgtaacgaacagcatcggtttttagtggcagaacagttacggaaaataaaccatctatcccagaatattattctgttcattcttaatattcacatcccaaagtgcggaccatga

SEQ ID NO: 248599 - DNA, 297 bp, Klebsiella pneumoniae
atgttcatgtttaaggccagtaaatatctaaatgaactttcttcttttagacctgacatatatattgcctgtgaaagttcgatgcaacactcatttttagataacggacaagattttatcagggttaatagtgatatttttaatttatgtcctgaggaatccgttgactatgcggtgatggaaaaaacgcagagtgcagtggtcgtccctttagatgcctcatggaatgatgttggctcatggtccgcactttgggatgtgaatattaagaatgaacagaataatattctgggatag

SEQ ID NO: 248600 - DNA, 126 bp, Klebsiella pneumoniae
atgttggtaaatgactacgctgtttccattaccatcacaaaggtggtaaattacggcttttacagatgtcaggctttgtgttgcaaaatcaaactgtgttgcattcccattgacaccgaaatttag

SEQ ID NO: 248601 - DNA, 177 bp, Klebsiella pneumoniae
atgataatgtcacttgacatgaaagattgcggcgtaaagaatgtccgcccctggcacaaagcagacgttaagacttacagcatcgggaaacttctggatgccgcgtcagcggcatggaggcgccagatgaggttacatgtgtctgtggagtcaaatggcgccgaaagcccggcgtag

SEQ ID NO: 248602 - DNA, 2811 bp, Klebsiella pneumoniae
gtgactccgattcggacagcgactctgactccgacagcgactctgactccgacagtgattcggattcggacagcgactcggattccgacagcgattcggactcggacagcgactccgactccgacagcgactcggactctgacagcgactccgattccgacagtgactcggattctgacagcgactcggatgctgacagcgattcggactctgacagtgactccgattcggacagcgactctgactctgacagcgattccgactccgacagtgactccgattcggacagcgattcggactctgacagtgactccgattcggacagcgactctgactccgacagcgactccgactcggacagcgattcggattccgacagcgactctgactccgacagcgactctgattccgacagcgactcggattctgacagcgactcggattctgacagcgactcggattctgacagcgactcggactctgacagcgactccgattcggacagcgattccgattcggacagtgactcggattctgacagcgactccgactccgacagcgactctgactctgacagtgattccgactctgacagcgattcggattccgacagcgattccgactctgacagcgactcggactccgactccgactcggactctgacagtgattccgactctgacagtgactctgactccgacagcgattcggattccgacagtgattccgactcggacagtgactcggattccgacagcgactcggattccgactccgacagcgattctgactcggacagcgattccgactccgacagtgattcggatgctgacagcgactctgactccgacagcgattcggattctgacagcgattcggactccgacagcgactcggactctgacagcgacagcgactctgacagcgattcggactctgacagcgactcggattctgacagtgactcggattctgacagcgattccgattctgacagtgactcggattctgacagcgactccgattccgacagcgattctgactctgacagtgactctgactctgacagcgattcggattccgacagcgactccgattcggacagcgactctgactcggacagtgattccgactctgacagtgattccgactctgacagcgattcggactccgacagtgattcggattcggacagcgactccgactcggattcggacagcgactctgactccgacagtgattcggattctgacagcgactccgactctgacagcgattcggattccgacagtgattcggactccgacagtgattcggattcggacagcgactccgactccgactccgactcggattcggacagcgactccgattctgacagtgattccgacagcgacagtgattcggattctgacagcgattcggattccgacagcgattccgattctgacagtgactcggattctgacagcgactccgactctgacagtgattccgactctgacagcgattcggactctgacagcgactccgattcggacagcgactcggactctgacagcgattcggactcggacagcgactctgactccgacagcgactctgactccgacagcgactccgattccgacagcgattcggattctgacagcgactctgactccgacagcgattcggattctgacagcgattcggactctgacagtgactcggattctgacagcgactcagactctgacagtgattccgactctgacagtgactcggattctgacagtgactcggattctgacagcgactctgactctgacagcgactcggattcggacagcgactccgactcggacagcgattcggattccgacagcgactctgactccgacagcgactctgattccgacagcgactcggattctgacagcgactcggattctgacagcgactcggattctgacagcgactcggactctgacagcgactccgactccgacagcgactccgactcagacagcgactctgactctgacagcgattcggactctgacagcgattcggactccgacagtgattcggattcggacagcgactccgattctgacagcgactctgactcggacagcgattcggattccgacagtgactccgactccgacagcgattcggactctgacagtgattccgactctgacagtgactctgactccgacagcgattcggattccgacagtgattccgactcggacagtgactcggattccgacagcgactcggattccgactccgacagcgattctgactcggacagcgattccgactccgacagtgattcggatgctgacagcgactctgactccgacagcgattcggattctgacagcgattcggactccgacagcgactcggactctgacagcgattcggactccgacagcgactcggactctgacagcgactccgattctgacagcgactctgactcggacagcgattcggattccgacagtgactccgactctgattccgacagcgattcggattccgacagtgattccgatgctgacagcgattcggactccgacagcgactcggattctgacagcgactcggactctgacagcgattcggattctgacagtgattcggactctgacagtgattcggactctgacagcgactcggattctgacagtgattcagactctgacagcgattccgactccgacagcgactcggactctgactccgattccgattcggataccgaaccgcaggcaaataatgatacccatacggcggctatcgataccgtag

SEQ ID NO: 248603 - DNA, 519 bp, Klebsiella pneumoniae
atgtgtttccatccttcaatggccaaccatcaccccaaaatagctgctatagccaaagctcttgcgtacagaaaaggtgatttcgaatcgctgaaaaagcgcgaagtcgagattctgcatactctagaaagtatacgcgagcagatagggcaggcagagcaagacatccagagactatctgcgctaatcgaagaatttaacctcaacgcgacggacattcgatccatacgggcagtctcaagaaagccagatagcgtatatggattgttccgagacactctggtcaaaatacttcaagaagctggtgagcctataacagccgctgaaatgctagaggtgctgaaggagaagaatgacccccgaattaaccttcctagtgaccgaaggattgcacatcaaaaagtatcgcgagatctcaggacactatgtgcatgcgggatggtgactcgttacaactccagctcaaatttccaatcggttagatggctgtgggttggtcaaaaacgggaatcgttctga

SEQ ID NO: 248604 - DNA, 1095 bp, Klebsiella pneumoniae
atggcagcgttcttttggctcaggaaagaagcaatcccaatctccatgagcgatatagatatttacaccgaggagcaggcacacagccttcttgcctcaatgcgctggaagtctgaagatcagcaaacatgccctcattgcggtgtccaagctaagcattatttcaggaggacacgactgcaatggagttgtagggattgctttaaaaccttttctgtcactagcggaacctcattccacgggcacaagctgaaatacctcacactgctcaaatcacttttccacttcgccattaaccaaaaaggattgtcggcgctggctctgcgcagatacctcggggtgcagtaccgcacggcctatgtgctgctgcacaaaatgcgggaggccatcatgctaagtaccgaaatcaagcagctatcaggcaatgtgcagattgatggtggtcacttctctggcaagaaaagaaagccaagaaaggtggcagataaggaactcccaaagctgcctaggaagtaccagcatcgagacaaacttggccctgctgagaacccttttcataagaatcgccgcatcataatggtgttcagggaatgtgatgcccgcccacccggcaagggagggaagataggtgctataagaactatcactgccatctgtaatgcagaagacagtcaggttatccccttgattgagcggtacgtaaaagaggacagcaaaatatttactgacgagctgcctgcttaccgacaactcaaatacatggggtttacccatgagaccgtgaatcacagtcgtgagttttctacggatgagggcgtaaaccagaatcaagcagagagctatttctcaaggttgcgcagagcgtttatcggtgtatttcaccgtataacaccgcgctatatgctcgattacagctgtgagatgagctggcgcgaagatatgcgcagaacagacctctttggtcaggtcactgacttgttcagcagggtcacaagcactccgcactcaaaagactggcggaactatgttcgtggcaataggcgtaaggatgagatcagaacgattcccgtttttgaccaacccacagccatctaa

SEQ ID NO: 248605 - DNA, 1512 bp, Klebsiella pneumoniae
atgcctgtttttcacgctaatcgctggctgctcctgcttaccgttggagcgggtcttttgcttataacgctcgataactctgttttgtatacggcgctaccaacgctcattcaagagctgggagccacctccacacagggtctatggattatcaatgcttacccattagtgatggctggccttcttttaggtgcgggcaccctcggggatcgcattgggcatcgtcggatgtttctaatagggcttgcgctattcggtttggcatccttgctggcggctttctcccccacagctgaagcgctaataggtgctcgggcattccttgcggtcggtgccgcagcgatgatgcctgcaaccttagctcttattcgtgtcacatttgaggatgagcgtgagcgcaatattgccatcgccatctggggcacactgtctgtagtgggggctgcgttggggcccattgtcggaggggtattgctgaatcatttttggtggggcgctgtatttctgatcaacgtccctgtagtagtaattgctttcgcggcaacactatttgttgcacctaaagctcaaggtgacgccagcactccatgggactttgtttcttctatccaggccctaattgcgctgtcagcattggtctttgcgattaaagaaaccacaaatacggccagtgactgggtgtctcctgttcttgctttgattatcgctatcactgctgcgtactttttcgctcgccgtcagatgcgcgctacctttccgttgctggatttctcaatttttcgtaataacgcgtttttgtcaggaacatttgcagcagcgttttccctattcgctattggcggcatcgagcttgccactactcagcgttaccaattggttgaggggttcagcccgctgcaagcaggattgctggtctctgtcgcagcgtttggatcattgcctactgcaattttaggaggggcatttctacacatcataggcctgcgctatctcattgcaggagggatggccctaggggcggtttctgttctagtagctagcttaggtgtcagttacggccttatttggatgattcttggtctggctttgatgggggcgggagtcggtgcatgtatgtctgtagcttcaactgcgataatggggaatgcccctgtgcatcgagcaggcatggcatcttctgttgaagaggtttcttacgagtttggaagcctttttgccgtcacagttcttggtagcttattggcctacctctacacggtgaacattatcttacctaacggcgtatcagaaattgcgcgtgatagcttgtctagtgctctagaggttgcgagctcatcaggtgtggatggtcaaaacctgcgcacagtagcaaaccttgcatacgataatgcgtacctgattgtaatgtatgtcgcagccgctgttctggcatttggttctctagtgacagctattctattgcgtgactacggcccaggtacggcatcatcatcattcgattcaggtcattag

SEQ ID NO: 248606 - DNA, 558 bp, Klebsiella pneumoniae
atggcccgaccaaacaagcgcgaagaagcacttaatgccgttgtaagcattattgagcgcgagggcataacagcccttacactagacgctgtagcggcagaaacagggatgacccgtgctgggcttctttatcatttcccgtccagagaagacttactgcttgctacccatgaacaccttgctaatgcatgggagcagggaatggccagcagtgcaggaaaggccataagcgaaacgacccctgctgaaaagcatgcagcttacatcaaggtttgtgcccgttcagcgcgtcgagtagaactgttgctgatgcttgaaagcactgataatccagagttagccaccttttggcagcgtgttatggatcgctgggcaccacctcccaccgccaataactaccaagagctagatgcatttattgcacgtcttgcagctgatggcctctgggcacacgaagcactgtccgctcagaagctgccgcaagagttacgtgatcgtgttgtatcgagactggtggcgatggcaagtccctttagcgaagaaagcaatcaatcgtaa

SEQ ID NO: 248607 - DNA, 729 bp, Klebsiella pneumoniae
atgagaacaccattagtatctgtatatatcccaactcataatcgcgctaatttactaaaaaaagctgtagaatctgtactaagacaaacatatccacatgtcgaaattttaatttgtgacgatggatctactgataatactgaagaggtagttaatcagttaattgaaagaaattctggaaagacgattatttatttaaaaaatgaacaagctcgtggagcctgttttagccgtaatagatgtctccaacattcgaaaggtgattttgttacaggtttggatgatgacgacgagtttacgcctgaaaggataaaagcttttatagattttgcacatgcgaaacaaataaactttctaacatcagcacttatgttccacaatggacgcttctataagcgtgataatagtgtcgctgcagaaattacctttgaagatatgggctataaaaatgtaataggtaatcaagtgtttgctcctcgaaatatgttcttggatgtgggggggttcgatgagacatttcctgcttggcaagactatgatatgtggtttcgtatggttaaaaaatttggaccatgttataggttaaatgacgctacctatattatgaatgtaaatgaagagcgtaaacgtattactacaggtggtaacgcacatcaaggatatcaaaaatttattttcaaacacaagaaagaactttctactaaccagcttaagtcatttaacctataa

SEQ ID NO: 248608 - DNA, 171 bp, Klebsiella pneumoniae
atgatgaccgggacgggattttgtacattggtatggctaaactgttttgccaccgtacaggtgatctggctcgttcatttagttctcagtatcggcagagtaaacaccagaccgggcagcgctattggagtgatgaacgatatcagcagcgttatccgtatgaacacctga

SEQ ID NO: 248609 - DNA, 225 bp, Klebsiella pneumoniae
atggatcaagagctgataaagaaactcggtctggaacccacacatacttttaatcagacgagttttgttaataaaacaaaggggcgcttagatatcgatgtgattatgtatgatgagtttgataagagcggtgtcagggttgcagaagtaacaatccatgatacaaccgagcgttatcctccattctcgagagagatttacttggaatcacgagtaaaagtttga

SEQ ID NO: 248610 - DNA, 282 bp, Klebsiella pneumoniae
atgattaattttgaacaacacaaaaacattgtagaacagtttgtagaacagcattacccgctcgcgcatagtctgatgttggatagttatattgacccagaagcctattattcaaactaccaaatgttgctggaggctatgaacactctcccggagcatccagaattctttttagagtggcttttagaagatgaccccacgatttatattaatttgatggagctttttgtcatcaccagaactgttcacaacgtgtttgaacaggtttcttctgcgcagtga

SEQ ID NO: 248611 - DNA, 171 bp, Klebsiella pneumoniae
atggggattcccgaaggtaagcgtaatgccaataacgctcatttctctgtagtgcacaatattctaagtatagcatccgttgattattgcctacatatttataataacattaaaacattattttgtcaatatatagagactctatttggagacatttttaatattttttga

SEQ ID NO: 248612 - DNA, 264 bp, Klebsiella pneumoniae
atgcgttatattcgcctgtgtattatctccctgttagccaccctgccgctggcggtacacgccagcccgcagccgcttgagcaaattaaacaaagcgaaagccagctgtcgggccgcgtaggcatgatagaaatggatctggccagcggccgcacgctgaccgcctggcgcgccgatgaacgctttcccatgatgagcacctttaaagtagtgctctgcggcgcagtgctggcgcgggtggatgccggtgacgaacagctgtag

SEQ ID NO: 248613 - DNA, 1077 bp, Klebsiella pneumoniae
atgtccgaatccagttttagtacggttctgacgaaaaaaggactggacgcgattgctctggcggcactgaacggaacgcccgtcagcattgcctttatgggcgtgggtgacggaaacggtactgtccaggagccagacgcagaggctgacggcctgattaatgagatttttcgcgcccggctgaaccggctggtgatagcagaccaggccgaaaatgttatcagggcagagatgattgttccgccgcaggtcggtgggttctgggtcagggaggcagcattatacaacgaagaaggggaatgccttgctgttgcaaatgtaccgccttcttacaagccgctgctgtcacagggggcggggcggcttcatgctgtcaatctgtggattgcggtaattgatacggccagcgtgcagctaacaactgactattctgtggtgctggcaacggttgatgaggtcaaccggttgacatctgaggctaaagactatgctgactcgattgtgggagcactcgatgctgatattacgcaggttatcagtgatgccatcactgcggcaaaacgtgatttctgggaagacgataaccccgtggggacgacgcgattttttaatcagaacctgaaccccaatgagcgctggccgtggtcggagtgggtgtataccggagaaaataaaacgatccgcgtcggcaaggctgacggttcgaacgtcggcgtgaccggcggcagcgatagcgtcacgctccagcaggccaacctgcccgctgtgcagattgacgtgagcggcgagaccagcgaacagcccgagcaaacgctgaccacaaaacccggcggcagacacaaacacggcggcgtacccagccgggataatccgtgggagattggcggtgatatcagacagcgttttaacccggcaaacctgggcgaaacggatgaggctgaagaccatcagcacgaagttgtgcaaccggcacacaaacacacgactaccggcaaaaccgccagcctcggcgaaggaaattcgttcagcgtggttgaagcccacaccctgctgatgtgctggagccgtgttgcctga

SEQ ID NO: 248614 - DNA, 1236 bp, Klebsiella pneumoniae
atgagtgtttttcagagctggcgaacggctattactgtccccgcggtattgcggagctatccacctaatccgttatatgtggatactgttaatggaacagctgccggaacaggttcaatagataagccggtgaataatttatcgctggctctcgatctttgctcgggccttgcggattatgaaatcagaatccgtgcacctgaaagcaacccgctgcggcaggaagttatttttaatacatcaaaagatgttgtgttgtcaggtgctgatgatgaaccctggcatatctacggttcagaaatacatgattcaggctggggagggaatggtcctgtttacagtaaaagaataggctataccgatgttttgcaggctgttgtaaccacaatgactgaaaccgtcgctgaccgcgatgatttttatttaaaactgatactaaatacaataaccccgacggctccaggtgccggggaatatggttatgctgccggtgttatttacgtgcgccttcctgatggttcacaccccgatttacataagatagagatttcaaaacgaaatttcggtgtggggacaatcgggtttggattattaactgtgcgtaatgccgttgcgcgatattgcatgattaacggtatttcctgcggtctttctactcagccagcaggcacgggatatctgagtgttcgggattcgttaattgaatactgtgctaatgcaggtgtgggcgggacgggcaggaatgagcgtattgaatgcaccggtgttatagcccggagaataagtaatgacgggtttgggcagcactccccagccggtggcgaaggattgatgatacttaatggctgtaccggaagttataacggagacaggccgggacaatcagcccagggggcatcgaatcatgaaagaaccagaatgattatcaggggcggaacgtataaccacaatatatccggcgggatggtggctattgaatttgcacagtgtgacatatacggaaacaccgagtttggcccggtaatgatggacgggaatatgagggcaggcaatacggcgggaactatagccagtcaggcgggatgcgcctggctaaacaatgcatcgggaacagtaacgggtctggtcaccgtaaaaaatggcgggggggtgggtgtcagaaaatcaccactcgctattgttgaggggattgagtccattatttctgaaggtaatgcgttacccgatattctctga

SEQ ID NO: 248615 - DNA, 678 bp, Klebsiella pneumoniae
gtggggagtataaatgagaaagagcagtgggaagataatattccattaattacccgttcgcagaaggttgaaggtggaatgacgggcgcggcaaactcacagagtattccactcgcaaaccggactcgctaccttaaacttgttgcaggttccgctttgaaaatagcggagcaggtcagaacggctattaattcattgcatgccgatccggttaacgctgttacctctatcattatccctgcgaaagactttgatcttgcatcggggaatgccacttatggcatggtggcgcagcgcattgcgggctggcagctatcgcatggtgtgaagtcatccattacaaaagtaattgatctgccatcgcattgggaagggatgagaatatctcttatctggtcaaatctgattgctaatgatgggaatgtgagtttttccggtgaggtacatggctgggccgaaggagaatcttttaataagccgccagcagggtacagtacggtagcagttgccaatgccacaccgtatatgggcatcgaaactgagcttgcactcaatctgcccgtagacccggcaaggcataccactattcgtattacgagaaacggggactctgcaaacgatacgttagcgaccgcaatggtattgctggcagtaaggttatcaaaggtcgatgtatga

SEQ ID NO: 248616 - DNA, 510 bp, Klebsiella pneumoniae
atgttagattttcgcgtttcgtcacatgcacatttcgatgatgcatgtagaaagtttgccgcaactcataacgtcaaagaactggcgattaaggctgatatcaagccacatacgctatataacaaactcaacccggaacaaccgcaccagttaacacctcgagaaatttggttgctgacagacctcaccgaagattcaacgctagttgatggctttttggctcaaatccattgcttgccatgtgtgccggttaatgagttggcgaaggacaagattcaaacctacatcatgcgcgcaatggctgagcttggcgatctggctgacagtgctgtttccactgaacgtcttaccccagcaaggaagcacagtatggtcgagagtgtgaattctggtatacgcatgctttcgttgacagctctggcactacaagcacgcctccaggctaacccggcaatgtccagtgtcgtcgataccgttagcggcctcggcgcatcttttgggctgatgtga

SEQ ID NO: 248617 - DNA, 957 bp, Klebsiella pneumoniae
atgatggcaattgtaaaatcagaacatgaattagcattagcaagagaactattagatgacatcgaattgtctcgcttaaatacggaaacaataatatttaaagcttcgcgtctcgctcgcttgtgtggttctgttgagtttcaaacttggctaagttatgaaatgggtggttacaacagcgattctgctttaagcttaaagtatatgagtcttactggacgctggactgatagggaaaaaaaagaagggtattgggctcctatatctcagcttgaatcatctattgaagcagcaaaacttttattgcaatcacatagcacacctaacgtaagtgggaattcgaactctaatattgttttgagcaaatattacacaactgttcaatcaatatcatataaaatatcgaagcgcagcggaattagaactcgagtaatgagtattttacacagatttatttctgacatttattatgataaggaactcgaaaatttagcagagtccatattcgaaacatacaaaaaagaagttgacagtctaatatcaaaccatgcccgggatgtccttcaacaaatcccctctgtcgtaaacagacttgcggagaatgaggaagaatccgtaagccaagctttgacaacagttagaagaataatcgacagttttgcagattctatttatccaccatcaaatgggaagtacaaaattggcgataatgaattgtcattagatagttcaaaacatcagaatagattaaatgtattcgtacatgaaagggtagagagtaaaagcaggaaggacaagatcagacaaaatctaagcaacctttatacaagggtatcaagcggagtacactcagatgtcactgttgaagaagcaaaatcgctttttctgaactgctatcttctattgggcgaaatattgcacatcggccaattggagaaacttgaaataaacggatga

SEQ ID NO: 248618 - DNA, 702 bp, Klebsiella pneumoniae
atgtttgatccaaaaaaattcaccaccccgaccgccaggccgcttcccgtcgtcctgcttctggatatcagtggcagtatgtccggagagaaaatcgagaacctgaataaggccgtcagggatatgctggatgcctttgcgcaggaagagaaaatggagaccgagatccttgtttccgtcatcacttttggcgatcaggttgagctgcatgttccctacatccgggcttctcaggtgcagtggcagggtctgcaggcaagcggaatgaccccgatgggaaccgctctcgaaatggccaaggacatgattgaagacaaggagaccacgccgtcccgtgcttaccggccgacgattgttctcgtttcagacggacagcctaatgaccgttgggaaaggccaatggaggactttatcctcgaaggacgctcttccaaatgtgaccgcatggcaatggctatcggacgtgatgcggatgaggcggttctgaaacgttttatcgagggcacgccccatgaccttttttatgcggaaaacgccgggcagatgcatgaatttttccagcgagtgacaatgtctgtgaccctgcgtacccagtctcggaacccgaacgtgttaccggcgtccattgagttagatgcgcgcacgaagtcaaatattgctgcgtcagtctctattgcgaatgatgatcaaggttattggtag

SEQ ID NO: 248619 - DNA, 1572 bp, Klebsiella pneumoniae
atggaaaggaatcaggaaaatgtggatttaccaacactgatagcgaatggcgcacatcatagtgaagctcaggcagatgctttagctggacagatagaggttacgccagcaggggcaaacaaaactcgcagagttattggttcatttattcgttcttacagagataaatcgcctgacctctccagtaaggcctggcttaaccttgaattctctaaatatccggatatttggcgcactgaagaagaacgccaacaagcggctagcgagattgttgaggaggtggcggttttcagctcatctcagcaagaattagcggcacatcacagcaaaggattaagtaccagcaactggctggcggggaaagttgagcagggcgcaacggcaggtggcgtcaccaacttcggcgcttacgccacgataattgatagcgccatcgagacggcaaacaaagcaaacattgatttgctttaccggaacgatggccagttgaaccagcagcttaatctggatggttttattgctgaacagcaccatgctgataccttcaaccttgatgcggtagccaaaggcagtgaataccgtgctgaagtgttaaaacccaaacccggcgggacatatggcaaaaattcggtagatgttgtgattcgggatggcgaggggaaaattgtacgtcgctatcaggctaaatatggggccgatgcggatgcaacagacacattgcttaaaaagggtgattaccgggggcagcgcaagttggtgcctgaagggcagtctgatgacattcctggaagtactgaaacaatagagattgatggcgttgaatcgaagccactttctaaacaggaagccaaagagaggcaacgcagagcccaggaacaagccgaagccaaacaatatgactggaacgagaccagcaggatcgatattgcaaaaaatatcgggaaaaacgcgggtactgcggctcttttgtctgtgggatttcagggggctcgtattctcgggcggcggatctggaagggaataacagggcaagaaaataatagtgctgaagaagaccttcaagagtttgttcagagcgctctgaaatcggcggcgacctcggggctaagcgtcgctgtcacgggtgccatgaccgtagcggtgaaaagtggctggttgggcactgtgttaaaaaatacacctgctggcagaattgccaatgctgtgtgcatcggtattgaaaacgcgaaggttctctacaaatacgcaaccggagaaatcacagcggaagaagcgcttgatcaagccggcagcgtcacatgcagccttgtggggggagttgtcggtggggccaagggagcgggcataggtgctgcactgggaaccgttctgggtcccgtggggactgctattggtggcgttgttggtggcgtagtcggtggcattgctggaagtaccgttggtgaagcgatatatgaaggtggaaagagaattgtatctgcagtcgttgattccgttaaatcgatggggtcggcaataggcagtggtatttcatcgttctgtagcggcgtggcctctctgtttggattttaa

SEQ ID NO: 248620 - DNA, 2148 bp, Klebsiella pneumoniae
atggatatcaaaggcattattgaggctattcgttccggtgtatcaggaattcagattctgggccaggacgtcaatcgaatcgatgaagaaatcgagaccgttgcgaccgtactggacttcaaggtaaaggagtggaatctggggtatggttgggttgattttaagactaaaagggctctgaaaccggatcaaaatgcattactgtatcaggatctaaaagccattgcggatgacgatccgacgggtcggatttatgtcatacagaacgcctgttccgtattaaaagatgacatcagagcgattgccagactgcagcaggaattgttaaggatcaagcgtcactttaaggggcaggcagcgatctttttcgtgtctaaagagagtatagaatttccagagcttgtggatcttttgatccctttctcttgctctcctctttcgttagagcaagtggatggcatttttgactctctcttacaggagtactctgtcactgttactaccgcagtgcgtaattctcttaaatccatattttcaggtatggagcgagacagggtgtttcaaatattcgaaacgctaaaaaataaatataaggccacatttcctcaggagtctgtgggcgatgctctggccctgaaaaaaagagagttatctcgctccggtttgctggagttggtcgatagtcaaatagatattagccaaatcggtgggctggaacggctcaaaagctggttacgtaacaagaaacacatcattgatgatttaacgaaagcgcagggtttgggcatctcggcccccaaaggcgtgctgttagccggtatgccgggatgtggaaaatcaatgagtgcaaaagcggtttcctcattattcaatgttcctctttttcgcttagacattggctcgctgatgggaaaatttgtgggtgagagtgaagcaaatatgaaggccgccctaaaggttgcagaacaagcgagcccttgtgtgttgtggattgatgaacttgaaaaagctttttcaggcattaacgggaccgggggaagcacagaaatcacaactcgtctgtttggttattttctaacctggatgcaggagaagccgggagcggtgtttgttgtggcaactgccaatgacataacccatatccctcctgagctattgaggcggggacggtttgatgaaattttttatgttaatttacccagtgaacgtgagcgaaaacagattttcgccgttaaattaaatcaactgacccttccccctaaagggctcgaccttgcagagcttgcaaccctgtctaaaggtttttccggcgctgatattgaatgtgtcatcaatgatgcgttagaaagtttgttccgcagtaatgagcctgttctgacccagccccttattaagaagcacattgacctggtgacaccaataagtgttgttcttaaagagaaaattgcggtctaccagacgttgtttgagaaattgagtctcaaagccgcctcccttgcagaggaagatcttgagagcattaacgcactgagtgacagcgatgcagtgtcggaaagagaaaacgccgcatcaaatgaatttatcgcatctgaaaaactcatacagttattgaacgatcaaagcccggtcgttcgccaggcagccttaaaaaaccctcaatgtccattttcaggcttacagcaagtcgtaaacagatattgcaaatttgattttagtaagcccggatcctggagtaacaacgaaataaccaaaaatgagttcgagctggcattgcagcatcccaatatgagtggtgagctcattcttgaactccattcaaagcaacagattgatgcgcaaaagcttttatcgctggcccataagctttcatttgaggagcgaaaaaaaatatttgaattggcaacgataaaattacctcggtctgttacaacaggtacggttcagaatatcctttgctttacaggcaatattgttaaatataacgatattcttattgagatagataacgagcgaggtaacacccaaaaaatcaacgcttctgttgacgggcttgttgtcaaggtgtgcgtcaaaaccggtgaaacaattcatgcaggtgaacagatcgtgcaaatactcgtacctaaaagtcagggacgtataaattga

SEQ ID NO: 248621 - DNA, 1701 bp, Klebsiella pneumoniae
atgacggatttcagggcctctctcggactggaacagacaaccggccctgttctgggggctttgctggcggaagattacaccgatgtggtcattctggggtttacgcgcccggtgaaaatcgaaagccacgcggatgatgtccagccaaaaattgccgcgacagaaggtgttgacccggctgctgcaagacagtgtagggacctgttttcaaatacagaaggtgcgcacacgcatttcaatgaatggctaaataaacagcttcaggctgccggtaaaaaagtcgatgtacattttcaacccgtggagctggcacatctcaatgacacggaaggtatctatgaggcggcaacgcaatccctgaacgccgttgctgcctccgaaggtgaaaaactggttacgctctacctgagtccgggcactcccgtgatggcattcgtctgggcttttgcggccctgaggtacccaacgctaaagaaacgtcttatcgcatcttctcagccgggcaaatcgccggaaagaatcgtcctgccgaacgagtggctggaatggcacggaagacaggtcctgccagtcagtgcgggatctgatcggtatgatgccatttttcacctgttcggcgaacagcggatccctaacctgcttggtgtactccagttttcaagccggaagcatatcttcgtgaattctgcccagtttcctgccgatgtcatgaaaccgtttcttggcgaagcagaatacggtgaaattgcggtggacccgtatgatcctgacaatgtccggtccaccattctggagcagattgcggacatgcctgcagaggcgaagatcggctttaacttaacgggtggcaccaagttgatgtatgccggggcccttgccgcctgtcgcaaggtgaatgcaacaccattttattttgatttttcaaagaagcaggtgatcaatctaaatagcttcactaaaagtgagattgtttcaattgattcggtagaaacattcctgaagttgaatggtgatggattaaccatctctaagcccggtctgactgaacacgatatttctcgcgagatgattacggcttctcagttaatttgggaaaatcgtaagttaatggtgtctaagtatcgcgaactgaaatcttatctcgaagagaaatcattcaaatgttggggtaatgacttctacgcagagctgacaatagaaaaacaaggaaaactgaccatcgggggtcagtcgtttgtgtttgatgattgtccggattttatggaatttctcctggggaaatggttagaggtgtatgtctttagtgtgttaatgccgttaaaggaatcggccgtactgaaagatatacgccttgggcttgaggtatccgttgaggacgttgattcgaacgataactttaagtcctatcatgatgggtttaaggaaaaaataggttatcaagaatttgatgttatctgtaccgacggatacgctttatttgttattgaatgtaaaagtgggaaagttgaagcacaccatatttcgaagcttagcgaaattaccaagcattttggtggggtgaaaggcaatggggttatgatttcagcatttcgtccctcacatcctgtggtcaagcaaaaatcagatgaccagacgaatgtaaactggttttttggggagcatgcgtcagaccgcttgttgaagttttttgagagtaattaa

SEQ ID NO: 248622 - DNA, 582 bp, Klebsiella pneumoniae
atggatatatattttattttcgatacttcaggaagcatggatgaaatggggaaaattcatcttcaacggaatttagcccgttatgcaattcaaatgcctggcctggctcaggaaaaatgtacggatttcgtcatccgtttatatcagtggcatcaggatatttccgaggtcacgctgcaaagcgatggggatattccatccttaaccgcaaaaggctcctcaagccttgctgagctctctgattttttattccaacatgtttataagagcggggtggcaagagttctcattctgtctgatggcaatttccccagttcagataccatcaactttcaaaaccagctttgcaccttccccgacctcattatccggactgttgcagtcggcgctgatgctgacctgttgaagttgcggaaactgtctacaaacaacaccgtttaccttccggagaatatcgcttcagcgatgaacagtactctctttggctctgatgagccggtgaccgctccggtatccgcagcccagatacagcactccgcacccgctgaaacagttgagcctgaggaggactgggatgcgtga

SEQ ID NO: 248623 - DNA, 729 bp, Klebsiella pneumoniae
atgcgtgatccactctggaacagctggggggcctcagtaatcggcccccttcatgttaaagcgggaatacccaatcaggattcctggagggcgcgccggtataaatggggaaatgtcgtcgttgtatcggacggactgggcagcaaggcacattcagatcacgggtcaaaagccgcctgtctagctgtctttgaggcagccagggactatcagaatacccctgcggcctctatcggtgatgttctcagactcattcatgccaactggcttatgaagatagcgccgtacgcttcaacagagtgttcggccacctgtcttttcgtcatccagacagaaggaactatcactctgggtcgtctgggcgacggcatgattgctgtccttggcgaaactgacgaacaccaccttatcctcagtgatacccgacacgattccttctcaaactacacaaacagtcttcaacaggcgtttaggcccgaacaatgggaaaccgcgacgattgcaagcgcggcgtgccatgccgttgtgttatgtacggatggaatatccgatgacctgttacccgaaaaacagatgatttttgcacaagagctctgctccacgtattcaaacgtcaagcctgaggaaagaaagcgggatcttcggcgttggctcagtgaatggccggttccaggacactccgatgataagacgattgcctgtctgtttaagcaaggaggcacctggtga

SEQ ID NO: 248624 - DNA, 1497 bp, Klebsiella pneumoniae
gtgagtgaatggttcaacaggtatgtggatgaatatcagaatgtgcacattcaggacaaggtgctcggtcaggggggccagggtgttgttttccgtacccgggatcctgatctggcgatcaaactggtgaccgatgagagcggaaaccctgtcaccgatgacgtctcggtggaacggtgttcgaaacgctttaagcgcgtccggctcttgcctctgccggaaaacctgaatatatccgtaccggcagcgctgcttcagaacaaggccggttatgtgatgcaactgttgagtgaaatggtcccgttcagccatttctggcttgatggtcagaccgcagaaaaaatggggcctgaccagatcccggcatggctttctgccatgccggagaacgaagctaaaaagatagttcattactgcaaaacgggcgggctaaggcgcagacttcatgcgctctacaagtgtgcatcattactggcacgtctccatggtaacggcatggtctacggtgatatctcgcccaacaatatctttatttcagaaggcatgaatgatacctccgtctggctgattgatgccgacaatattcgatttgaaattttggcagggggaagcgttgtttacacaccaaaatacggcgccccggagctggttcagggcactgatggtggaagaccgtcaagcgattgtcatgcgtttgcggtggtggcgttttaccttctttcgctgattcacccgtttgttggaaaaaaagtggatggaacagatgaaggcgactgggctgatgaagaaaatgatgacggggatgtagaagataaggcttacgctggattgctcccctgggttgatgacctaaatgatgatgccaactcttccgacagcggtctgcccagatcccttctcctcaccgcgaaactgacggccttgtttgagagcacattcggtccgggaaggacatctcctttgctgcggccgacaatctatcactggcctgaagctctcgcccaggccgcggatatgaccgtcacatgcccggggtgctcgatgcattattactatgattttattcacccggaaacagaggcgcaccattgcccttactgtacaacaccgaggccgcaggtgctcattctggagtcttatcgatggaagggcagtgacacccccctggaacttccctgctggcgctatgtccgcgagatcccgccggggtcagagctgacagtaccgagacgcgtctttgatgagtttctcatgcttgattctgatacagcagaggtgctcatctcttcaggcgatgagggcattctgattaaaaagtcagatcatgctaaagccgatgtctctgttgccgctgacagccatccgcaacgtggttttcagacagtttattcacagatgaaaatagaccgtgcaaccccggatgttcagttttggatgttcacaaacatgaatagtccccggttggttaaatgcatgatcagcggaagtgacaaatga

SEQ ID NO: 248625 - DNA, 3435 bp, Klebsiella pneumoniae
atgaaactcaaagacataaatgctgaaatcacttttgaattatggatgacgccggcgctgtacgaagagacgccaaccacgggggtgggctctattgcccctcaccaaaatgaccaggcatacagattaagaatcgatggccagcagtggagcatggtgcttcgggatactccggccggaaacgatctgaattttcacttaaaaagaggctgtgcgcaccttgccgaagtcatgctggttgcccaggatcgcagtgtgctggtgaaaattgtcttttttaacggtgaaattgttgaaattggtgatgtggagatcggcattgatgagcgcatagagttaacggcgaaaagaaatggcattcgcttcaatggcgctgaagagttggggggcgtattaaacgaaaaatgtaacatcaacgttggtggcgacgatttctttctgctaatgagtggaccatccgccagggctgactttgaagcggatatgtctgaagagggaggctcacctgatccccagggcgttgtacaggaaaaatacagggaattttctgtctatggtgagagggtgcgtattccggttgaaaggcgcaatgtcgagacgttcagggatatctattttgcgaccaaagcgatctttagagacgatcataagagggaaggatcattacgtctggcaagggggaaggtccggtttactgattacacgaagacgggacgcatccgtgctttagccgccggcgcgatgagtcagctttccagggaaaccgggagttacctgaaacagtgggacgaatacggcgcaattgaaggtgaaatgctgctggccagggcaaaagctgttggcagggtggattatcatggcactgaacagacaacaaaaggagttaagttctttgtgtcgtctgttccggaacaacttaccgaaggcgatgagatagagatcacctccgaggaacctttatacctcagaactccggatcttacctgggaagcttacagcaaggctctggaagaagaatttgccgccaaacgggatcgaaaaaagaacgatgctgaaatatccgtttctgtttatgccccgatcctgactatttcaaagaccagtattgaactggatctgccgtcaattccgtccggtcagatgtttttgatcctgtccatcaatggcgacaagattcagattgaaagacgaatgcgggcacgttcagccattctggaaggacgctgcgcaaatccgcttctcggcctgcttattgaagaaggcggtatactcccggacatacagcgtgtcaccaaactgaaacctttgacgtcttttgtgaaagagaaaattttcaggcatgagccaacgcctaaacagacagaggccatcgatgtcgcactgaacaccccggatattgcgcttgttcaggggcctccgggaacagggaaaacaacggttgtgacagccattcttgaacggctcaatgaggaatatgacaaaacccgctcgataagaggtcagatacttgtctccggttttcagcatgatgccgttgagaatattgtggcaaggctgagtgtgaatgcgcttccggcagtgaagttcggcacccggtctggtggctcagaatttacgacagatgccgttactgaaaaactgaacaaatggtgcgccactgtcgccggaaagattcgaaccaaaaaccctcaaatggttcagacggagcatcaggtcagactgacagagcagtttgtcacctattcactgtgcccctcaaagaacaacaccgccagtttaataaagcgtattctggatttgcccagagacgtgatttctgaagatatcacccgtgaggctgaagaaatcatcaattccctgcatacggagcccacgtcagacgatccttccaccttgcggctcgtgagggctctgcgtgtcagtgaagccgcctttgttgacgacggtgcggtaagagcggttgatttactggacaagatagaaggcggaccggctaatccggatttacgtgttcttgaaaaagcggctcgctggcgcagcggtaagccgctgaatttccttccagaactcagagaactgaaagcatcactgctctatcaatatctgccctcgcctgatttcaggacagaaaaaccaagagaggatgtgttgagactggtgacaacggtatctcagcgtctggagaaagaactcagttcaacccgtaaacgggatgcaatactggctgagtttttacatgagcttgaggacaatcctgatggcgtacgtgaggccatagaggactacaactttgtgtatgcggccaccacgcaacaggctgtcggaaaagacatcatccggtcaaagaataaaaacgtccaatatgatcagcgaacggaaatggttaagtacgatacggtgatcatcgatgaggccgcgagaaccagtccgcgagatctgcttatcccgatgtcccaggcggtaaaaaggataattcttgtcggggaccacaggcagttgcctcacctgattgaccaggaggtcgccagagctctcgaaggtgacgatcgatcaggtccgccggttgatgtcgattttgtgaagaaaagcatgtttgagtatctgttcaaccgcctgaaaaaactggaggagaaggacggcatcaagcgaacggtgacactggatgcgcagtaccggacacacccgttgttgggggagtttgcaagccgcaacttttatgatcgatacaatgaaggttatcgttctcctttaggcgctaaatattttacccagaagttaaacggcatcgaagatagcgccgccgtctggatccatgtgcccaatgaggctggaaaagagcagcgtcttgagagtggcagtcgtgaaagagaggctgaagctaaaattatcgccaagagactaagtgactggattaagtcagatgagtccactgcagattatatgaagacgttaacccatgatgacaggcaacccggccttagctttggtgtcatcagtttttataaagcccaggtatttgctgtttataaagccctgcaaaaatacggtatcacggaacgggcacaggatggtgcatggcagatatgtcaggaataccgctttctcgacaatggtgaagagcggctccgcatcggcaccgttgatgcctttcaggggatggaattcgatattgtgtttctttccatggtgaggtctcaggatatgaacgccttgccgcctcatatacgcaacgaggaggatgacaaaaagaaacagcaaaaactcttcgggcatctcatgtcggaaaaccgcctctgtgtgagtatgagtcgccagaagaaggtcctggccatagtgggagacggcgtgtttgcgaacacccagatagcggaggatgccgttccggccctgaaaaacttctatgatttgtgccatgaaaagggggtgatcctgtga

SEQ ID NO: 248626 - DNA, 2157 bp, Klebsiella pneumoniae
gtgagtgcaaaacccaaagatcatcgtcccaaagtcatcagtttccgcaccgcactggatggattgaacatcgccgccagacaaagtgttctgtggccatgtcatgccttcaacatctcacttccgcaaaagaaaaagagcggtctcaatgtatttgaagaaactgttctgaagatcacagagattgaatccggcgacacagaaatgattgcgcagctcacgtgtctggagaaggagctggtggcttttattcagagtcgcctcaaccagctcggtcttttgaatgatcgctatgagttgtctgagcaaggacaggcgcttttgaacgagtggcagaataaatccgacggagatctggaatacaccgtggccacggtgtttgtggatctgctgtacggaaagcttctaccttatgtcagtacgaaacaactgagctacaaaaaaatagagaccctttactcaaaagagaatcttcagaaaaagggggagtttgaacactatgtgaattttttcatcacccccactgatgataaatacattcgggcgattcagatacgtccagcaaacgacgctttctggaaaaccgttcctgacgctaacgacatcatcagagctatcagggaatttaagaggaaatataagcggcaggcgctgttgaaccagggcgtcgagcagtacccgcctccgatccctgtggctgaagccatatccttacaggcgaatccagaattggtttacctgcattgccacgcccttatccagacaggcaattctgacattctggtgacggatggatgcggcttcggattctctgagagctttgccagttacctgatgtctcagaactggcagtgggtcatcgacctgaagaataaaggggttgtcgacacgctgaaccccgaccaacgcaatgaagaggctgaaaaagactctttagcggcggatgagttgaagcaatatccgcggatagcgcgcccacttcggcgcgcacaagcgtatctgtcagacgctgaaaaaatcaggattgattcatccaatgatgagcaggaattcacccgtctgactggcctggcggtcgtcgccctgtatgaagccatagaatgggcgttgcggtttgttgtttcggataacccagtgacgcactgggagcgattattctcgtcacagtcctacagggaaaatgacaagatactgcgcgcgtttgccacccggattgggtttgatgtttcagagagtgtgaagggcctgcttcaggttaaacccggcaaaatcagagacgttgaccatggtgcttccgagatgcagccgctactggctatggcaatcgccggggcgatcaatgatcccagccatccacttaatcgtctggccattgaagatgcaggatgtctctcttttattcacgcgcttaaagacgtcagggatcctgtttcccatggaaacgcaatgggtgtgcagctctcaaaggaaactcttcagggctattgcaggagaaccgttcggcttattcaattactgataccggatatcacgcgggatgctgatacaaccaaatcacggcagaaaaacgatattgatcaggtcagactgaaggccaggatcgaactggacaggtcattggggctgggtttcgtccacgcggtttctccgtcgttgcgggaagaactggtcaaagtgacgatcttaaaccagatgacgactctggataatgaacagcaacagcgctacataaatttactggcgtccattatgcaactgtcgttatttgaagccgctaaggaccggataacccccttcaaaaaccgaacaaacctgagggatgaggcgattgaaaaaatcgttcaatccggtttttatcccgcacctgatgccataccagtgcaaatcagtacggtaaactgcagtcgactctctcgtgctgtgcaaggttcaagcacaactcttggtgctcaacttcttgcgctttgtttattggcatcagaaagcgaaagggtcgcactcaaaaggtcttttccggattgtttcgagcttatcgccagtttaatcaaactgcgtgggcacggtaatcaacagaaatttgactattcaagggaatacctggcgtcattaaaaatgaacgtattcaaactcatcaaaataattatggaagaattttag

SEQ ID NO: 248627 - DNA, 2712 bp, Klebsiella pneumoniae
gtggactctaaaaaaaataatagcgttcagtttactgcggataatgagatggcagatctgacggataacacaagcaacgtaacggagagtgagttcctgaataaactgcaggaactgatggaacgggaagactctctgacgcaaaaagaaacggttttagcccaaaaggaacaggcgctacaggcggctaaagacgcgatggcccaaaaagaagcagagctgaatgacaaatatgttcatcttcaggagatggagcttcaagcaaaaaacggctctctgcaattctttgaggaaaagttcgcagcattcaaaaaacaactggcgcagcgggaagctcagtgtgtaagtgagcgggaaactctcgaagctgaaaaggaaaaattgcggcaaagagaggtcgctgttcaaaaggcggaaatccaacgggacagggggtatgccgatgaaagggccaggcttgatgatgaactcttcagtctcagaaaagtacaggaaaaggatctggagtcaaaacgcgccagcgccctgacggcccttgaagaagagcttacagtggagagagtctccagaatagcaaacttggggaaagagatagctgaccggctaagcgcgcatgaagcggctattcaacaggataaggatgaactcgaacaaaaaagaaaggcattccttaagaaccaggcggagcttgatgaactcagggatgaacttgagtaccagaaacagcgccttcgctcaaataaagaccgacttgaggaaagagaatccgatctgaaccttgaggtggatgccagggttgctcagcggaaacactctttcgagagtgagaagtctgtgcttaacgatgaaattgcccgtttgagggaatccctcaaaacaagcattgcgctcatttcaaacttcgaagtactgaagcataagctcggtgatgaagatcctgccgccgttttacttaagctgaaaacttatgaagaggaaatcaacaccctgcgcgaggatcttgccacgcgcccaacacaggagatgcgggacgcctttgatcgtttgacgtctgaacagaacgaactgaagctggcctgtgagcgattctctgaagaaaatgaggggctcagaagtgcagcacgcgcacagtcagatctggaaatgcaggtagcggaactgaccgataaaaacaaatcgctgctgaggcggtttgaatcagtggatgccgacaacaaccgattgatggaggagcttaaacgcttgcaatcctcttacgaacgggaacaggaccgtgaggcaaggattcgggacattgaaacgccatacgttcaaaaagaactgcctcgtgcggctgaaaacgttgaagagcttcaatggctggacggcatccgtcaatcctgcatcgattatgggctgagattcccgcggcgaattttacacgcattccacacagcactaaaaacgtcagagtggtctcctgtgactgttctggcaggcgtgagtggaaccggaaagtctgaactgccaaggctgtattcacattttggcggcataaactttttgagtctggccgtgcaacccaactgggacagtcaggaatccatgctgggtttcttcaactctatcgataacaagttcgatgcccaaccggttctgcgtttactggcacaaagtcagaaggcgcaggctgaaggctatcctcttggtcttaaagatgccatgaatctgatattgatggatgaaatgaatcttgcccatgtcgaactctattttgcggaattcctgagcaagcttgagctgcgcagaggaatgaaaaaagaactccccttccttgatgttaagctgggggccggaattcagccctatcaattgccaatcggtcgtaatgtgctctgggctggcacaatgaatcaggatgagaccacgaaatccctctcagacaaggtcctcgaccggggaattgtcatcaactttccccgaccgactacgctggaaagacgccgtcagttgattccgttgggcgaccaggcgccattattgtcccgcaaactgtgggagagttggtggtgcagagaaagtaaattcagcgatgatcagattttgccctttaagggttttattgaagacatgaacgatgctctttctaaagtcggaagagcgcttgggcacagggtgtggcaatcgatcgaatactacatggcaaattatcctgatgtgctcgacgcccagagaaaaaatgatgatgcaggcttggtcaaagccatgaaagtcgcttttgaagatcagcttgttcaaaaggttatgcctaagctgcgcggcatcgaaacccgaggtaaatccagaacggactgtcttgaccgaattcgaactcaactggtgaatgacaactatacgataatcgaagatttcgatctggcgtgcgaatttggttacggtcagttcatctggagcagtgctaattacttaaaagacgatgagtcattgaatggtcaaactggtaacaacgccagtgccagtgatgccagtatgctgtcatctgatcacgccggacttcatcattgctctgctgcaggcgcaagcgctattcctgctgagatcagccggtatgcaagtaatagtacaaaggaactctggcaactgacaacaaacgaaataatgacagtcctgaaatgtgatgcaaaagaagcaaaggctatcaagtatttgtgtaatgcgaccagggaatcataa

SEQ ID NO: 248628 - DNA, 4047 bp, Klebsiella pneumoniae
atggagggttcattcaaaattgactctgttgaatctgtttacaggggtctaaataataccgatgagttaaaggctcatgctcagttaattcttgtggttcgcaactggctgacggaagtgtcgaacttcgacccagtttccggacttgtcctgcataccggtatcgacgatttcttggatgttgtggcgaaatcggtgcgggatacgtcatcagaggaggagacaaaagaccgtatctatcgcgtggtgtcacatgtgaaggacgctgtcctggcaataatggagcatacccgggataaggtgatacgcgaacatgccatgctgccgatatatgcggcgagagaggttgacagcaacagtgttcaatggctaagccgtcagccgggcaggacactccgagaaaagctttccggtaagccttatatgaaggccgtcagacggaggcgcagtgttgatacgtcggaaaacagactgttgagagcttttctcttccggctggaacacattctgacagaaagacagggtgcattatctgccgcaaaagaagagacctgtgaggacatgcttgtttcccttcagcgatggctaagaactgacgatgccgctgaaatcggtgcgtggggaaatcttccgcccaacaatacgcttctgcaggacaagcgctatcgaaaaatatgggatggctggctctggctccaggccagcgacgttcagataaccgaggacagcaaacggcttaataaagacctactcaccgttatctactggaatacactttcccagctttacgcgagtggtggctttcggacagttcagcaaccggtcggctttgattacgacaacttttctatcgtgcctgaattccccgttcggggatatttattccccgggtatggcgcaaagaaaaaggggaaggttaagttcattaagccagagagtttattcggatttatcacgtctgaagagggtgtggatttatttttccaccaaaaaaatctatctcaaaaattagacataaactcactaactgctggagatgaggtgtcttttgtcattggcagtaacccaaagggggaatgtgctgatgacatcgaccgtctggcggggatcatccctgtagcgttcaatttgacgggggataaatgggagatacacgtcggtgaggataagtatttattacatatcgtttcggggtatctggttattgcgtcagctcagggtgtaaacaaaaaattaaaaatcgagcctgcagcgctcaacgagataccgaaggcgatactgtcattcgtcacggatgccccgcctgaatacgctgcgccgacgaatactgaacgtgacccgatacggatggagagcaccgttgcggatctgtgttcagttcgtcctgcgttcacgcacggtacaggctctcaggcgcatctgccattcaggttggttcagcagtactggcccctgcattctgatggcgaagtggagatagactgcggttacgctaaatccatcgccctgcattccggtattcagacggtcagcatgaggagcctcttttcacctgactcaacactgcccgaggctactaaaagccgggcatcgatgttttttattaaaaagttgagtgactatatcaaggcagataagttgacctatcttatccctgattgggggaatgatttcgatctggaggggatacgaaaaagcgccaatttttattttgatgagtcaactccgcttcccaaaagtatcgctgctatctttgcatggcaatcgtcgaagaaatttgtacaggacagcgtccagggtaatgatgttgtgctggtgattgattcctttgatggtggcatttcagtaaccccggttcaggcaatttaccaaccggagcttgagggactgttgcctgagacaaaaggtattagctgggaaagacatcctacggttaatctgcccgacagcggcattcataatgccatggtccgcaatcttgacgggaatggctgccagacatctgaagaccttcttcatttgtttgggttcgagggtttagccagcgatgccggagacgtgtcttttgtcaacgatgaacgctggtatcacgttccgggttctgttcgggaggttctgactcaggatctagatctcagcatattgtcaaacaccgccatcagtaactgcctgaactctacaaacctgaattgtcggggcgcgaatgtctttatcctgcctcttgacgttaccctcaggaaacccgatgggcgaatggattataagtggttggggtccgcatggtcgccaattaaaggctgccagaccttaaacagatggcatgaggaagtgggtgacatgaccctctggcgtgatcatctgccagctctatcgatagaggtacagagtgacaaagggtataaggttaatttttatcttgtaaaagacgcgacagtaacgccgcaacgtggcagaacggtggatatacccgtggaagaattgttcacgcttcccgcgggacaaacgcattatcgttttcccctgcaacagggagaaggcaataaagagatgcggtttgttgcatacctgatgtcgccagcttttccattaaagaaggacacaacgtgcaagctgaagatgtcctatacctatggcgcggatgacccgtacgaactgaaattccttccgctggattcagcggaagcaggttttaaatctgtccgagttgagtggcgttcagcatcagaaagggggattgccgatctggcgaacttaccgattccggatttcccggccagaaaaagctggtccgattttcagtccttcccgaaagacgatggtaagagcgtctctgacctcctggactggtgttgctccaaaattgcaggtttgaatgagctgatctcctttgattatgaacaggaatttcaatccatcctgaataaaagaaaagtcggctatctggaatggggaagtactgacactaacgggaaatactattgtcgcgtcaatgttgagggacagagtgtgttttgccacagttctcactttattgaggctgttgatgaaaactccctgcataaaggctgcccggtttatctggatgtatttacgaatgaaaaagggccatacggggcaacgatatcctttttggagcgcgtccccttacaacttcaggagaaggcacaggataccctcaatcggaagttgtccagaaccattgagtatgctgaaaaagggatcttcagcctccgtttccccgcattaaccatctggaatcacggtcactcgctttccgagccagatgtgcccgaccattttagaaacgcgatactcgacggaacgcaaaagatcatatcaataattgagtctgaaaatatgccggacacgcttaaagaggagcttttcttctttctgtgctgtctgcataaggacgcccctgaaattgttggctcccggcttcttgatgcagtgaaggatagaaagctgttgcggaaataccacaagaatattgctttcgccattggtaatgccgacctgtcttaccaacaagtgctgttggagaatgtcattgatcccattgataatgagggccggaccagatccattaccctggaagttttgtcgatagtgctttggcgttccagaacagtgatcaacagattgactaaagagaagcttgaggctttatccgtaagcttatatcgttgcctcaagttcgatattcaaaagctggatagtgaaggaacgagataccaaatcgcgactcttggtaagcatctggagcttctgctggcattgctgagaagcagaggttccgaggatgaaggtctaaaaatgattttcgcgccagataatgaacggaccaaaaaatttgtggacctgatcgatcgcgtttccagattagtgatcgacaacaatatcgggttgcagtctcgaatcaatctgcaaattgaaaagcctaaaatctttctcaatactcccgaccttttatatgcattacgcatatatctaacgggagacgcaggtgcaagcgcgataggcatttcgtctgtttcagacgattaa

SEQ ID NO: 248629 - DNA, 345 bp, Klebsiella pneumoniae
atgactgtgatgtcggctccagttgtagaacacttcaatgtaatcgaagatatctgcccgggccagacctgggttttgtatatccgttttctgatgcgcttttttttcagtgaactgaagaacgattctgccactgcattatcccagcagttgccacgacggctcatacttggtgccaggttattggcccggcagaacctctgcctgtcatcactgccatactggttgccctggttactgtgcacgacaacgctgtctgtcggcttacgccgccagacagccattaacaacgcatccagggccagctcacgcgacagcgttggcttcatcgaccagccctattag

SEQ ID NO: 248630 - DNA, 5541 bp, Klebsiella pneumoniae
atgaaaacagccacaatacaacaaacaattgacgaattacggcagagcctgacacattatatcgaggcgacatatcacatcggccacccttccatagtcaaacagcgtcgtgaactattgaatcagatcggtggcatctatcaggctccatatctggaatcgactccccgctataagagcgccagtccttataatgagattgatagtttgccaccagcggcacttgaagcattgagagttctttctgacacaaaatcaggaaaaccagtaatttacccttccccctatacccatcaattggaggccctacaagagattctcaacaataatcgaaaccttatgattatgacgggaacaggttctggcaaaactgaatcattcctcttaccgatattaggcaagttcgcaattgaagcctgcgagaacccagagcgctttaaaaaatataatgctgttcgcgcattagtgctttatcctatgaacgccctcgtgaacgaccaattaagtcggttgcgaacaatgttcggttcccctcaaaccgttgctctattcgaaaaatgggctaagcgtcccgtcctcttcgcgcgttataccagccgtaccccatatgcgggcctgcgcacacctaataaagatagtaaacgactagcatctattggtgaatttttcggagagatcgaggatgcgaaacgacgctacgaacattccccttccgacggggaagaataccgcgcggctaaactctttgataccttaaaggtacggggaaaatggccatccaaagaaagtgtttccgactggttgggtaaagctcctgtgccttgggcgaagcgagcaatctgccgtccacacgattctgaactaattacacgccatgaagttcatgcatctccacccgatcttctcattacaaactattcgatgcttgaatatatgatgatgcgtcccattgagcgtggcatatttgacgcaacaaaagaatggttggacgcttgcccggacgagaaatttcttatcgttcttgatgaagctcatctttacagaggagcacaaggtgctgaagtcggattattgatacgtagactaagagaacgtcttggtataccagccgagaggttccaagtcatatgctcgaccgcaagcttcagtgatgagggtaagaaaaatgctggtgtattcggcgcacagctttccggagtatcggccgaatcattcgtgtcaatagtaggagaactacagttacgttctcctgaggaccgtggatcaatggtcgatataagcacccttgctgctgttaatcttaaacagttctattcagcagaccatagtcaacaattgtcagcgattgagaactttctaaagtttcgaggggtatcagtcaaagatgtaagtgatgtggacgctaaactttatctggcgctgtacgattacgcgccatttaatcgacttgtaaatgagactatgactgctgcggtatcgctctccaaactaccagaaataatctttgacgatacaataccatcaaatcttttggaaaaagccacaacggtattactcgcgtttgggagccgcgcgaaaaaaacaccaaacgaagctagccttcttccatgcagaatacattcattcttccgtggacttcctggcttatggatatgcatggaccccaattgccccgatgccctcggagacaggcgaagccctgccggaagattgttctcgcaaccacacgagcgatgcagttgcggcgctccggttttggaatattatacttgccgtcattgtggcacttcatatgccagggcctatacaaatgatgttgcgcagccacgctatttatggtccaaagaaggtgaaagaattgagactgcttcagggcttatagaggctcttcatcctcttgatcttcttattgaagaaccgccatcggatgataaagccaaagccgcttactatgatcttgtatcgggccagcttaatccggatgtactaggagagaaatatcgaaccgtcttccttgcacctgcaaagcccgtaacagatagctcgaaagatacaacccgtggagcaggtccagggcaattcgctccttgtgcatgttgcaaccagatggcaggtcatggacaatctagcgttcaagatcatcagaccaagggcgatcaaccgtttcaggctttattgggatcacagctaagaatacagccccctggtccacagcaacaaacttcttttgcgccacttcgtgggcgtaaggttctaatcttctctgattctcgccaagtagccgctcgtctggctggtacacttcagaactattccttacgtgatgcagtgcgggcactccttccgttgggttataagattcttagccgcgatccggacttctccaaaactcttgtgctcaaccatgcgtacttatcagttttagtggctgcccataagttaggcgttcgactaaggccccaacttggtgatgcagaaacactttcagaggtagaaggaccaagtccaggcccatctcccgcaggtatacagctctttcaactccttagttcgttgtcccgatgcccgcagcgtcttatgcaggcaatctccgatacgtttaaacatacgaacatgggacttgatctggaggccttggcgatcgccacgattggcgagccaccacaaatctcgtccaagattgtaaaacttcccgatctaccaggagtcgccgaaaccgaggaggctaaattgacagtctgtcgagcttggctgcgatgctggacgcttgatccgggaatctggttttcagacatgcctgactcttggtggaatgaacgagtgagatcccatcaaggggtatttactgccatgaaccgagttcttgtatcgaagcaatcgaaatcaatattcaaaaagaattggcttccaactcttctgaccatttttaccgagcaaacaatgggagggggacatcgtttagttgcttcgaagctttctcttcatttaaatggtcagtggcagcgatgcaatagttgcaaatctgttcatcgcccagtcggaactctcagtagatgtattgactgtgaaagttctgatgtgagcaactttgatcccgctttagatgaggtttacaaggcacgtcgtggtttttatcgcgaccctatcgcttcagcacttgatgttgaagatccccaactaatgaccattattgcagcagagcacacagctcaacttggagcggcacagccggatgaagccttctctcactctgagcgacacgaaataagatttcaggatatcgatgtcgcctggagagataaggaccgccctggtgaacccgctattgatgtgctttcaagcaccacgactatggaagtaggtattgatatcggtgatctttcaggcgtggcacttcgtaatatgcctccaacccgcgccaattatcagcagcgtgctggccgagcaggccgacgtgctaatgcagttgcgactgttgtagcatttggcagctcggacagccatgacgaccattattttacggatccagaggaaatgatacggggtaatgtcattgatccacgcctcacgttagaaaatccggaaataacgcgacgccatcttcgcgcctacctgcttcagcgctatcatgaagaccgtattcctggattaatcccaggtgccgatcctaatttgttttccgttttgggcaaagttggtgatttcaaaactcggggacctttgctcaatcgttatgattttgctaaatggctagaagataatgcacaagacctcgctaacgcggctgatcgctggctacccactgagttgtcgccagatgatcgccataggttgattgctgaaatgatggttgacgcgacagatacgattgacgaagccatagactttattcaatcagagaaccaagatgtcaacgccgccctagaaaaaagtaaggacgactctggtgatcaaaccgagaatgagataatgaccgagtcagaggataacgtacatattgttgatcccgccacggataaattacttgaccgtctcctttaccggggagtagttccacggtatgcgtttccaaccgatgttgtggcatttcacgttttcaatcaagagagatcaaccccgttcacatcggttatagattatgctcccgctcaggggcttgcgctggctctatctcaatacgcaccaaacaagcaactctggataaacggcaaacagtatacatccaaagctatatattctccttatccagccgaacggcgggacgcttggggaaaacgaaaactctacttcgagtgcagcacttgctcccatgcaaggactgacgattacttaaaagagagggagaacacgacagagacttgtccagcctgcaacacacccaactctttcggcccggcaagggtctggttccgtcctgtcggctttgcgcacccaatcgatacaccgccggaaactgagccagactcaccaaacgagaccgcaagagcgacgcgtgccaagttagtcatgcaaacgcctaatcctgacaagagctggattcaggtatccgagcgggtgcgtgctttcaaagcgagagaatttctcttagtatcaaatactggtgtcgataaagatggctacgattattgtctcgcctgtggtcgaatcgagtcatcggcggctcctgaggaactgctctcacaaccacacgctacgccattccgcagtgaagaaggctccatctgtccaggaggagcggcaaaacgtcacgtaattcttgggactgatttcaaaactgacattgcattattttcattcccgctaacagagccgttccaactcttgcccggcagtatagaagcggattctgtacttagaactctatgcgaagctatggccaaggctgcgtgtcaaacactagatattgaaccgggagaagttctagccgaataccgcccagctttgacagaaaaaggcgcaagcggtaacgaagttgaaattttcctatatgacacattggcaggaggtgcagggttttcgaccgaacttgtgaatcgggcaagagaattgtttgagcacacgcgaaatcttctagcaagttgtccagaaaactgcgacacatcctgctatcgctgcctgcaaagtttccgcaatcgaatggaccactcgctcctagatcgcaaactcggcattcagtttattgaacatgcgtttgatggtggatatccgccttatcctgccgagcgtactcaacgatcgcttgatcttctcgcccgtgatctgattcggcagtatggaaccgaattttctttctctcgtgaagttcaacgatatgacaatgaagctggagcaatagtaattccaattgttgctacacgcctggctacgggtgcagaaacttggatatcactcagttcgccactagccccagcgattccgacagatcataaactccagaaacttagtcctcaagggtcagaaaaaatggagtgcgcagatgaccttattattcgtagacatttaccagaggcaagtttgcaacttcgaggaaaactgagataa

SEQ ID NO: 248631 - DNA, 1065 bp, Klebsiella pneumoniae
atgaacaatattaaaatacttagccgggctgattgcctaaagtattcatctcgctcattaggacttcctgacttgcaaaaacttgataatgcattaatcgctcaagcgttgcggagaaccgttttcattgaagctccttgttcgattcggacagtatgctcactcgtaatgaattccctaggtccattaactgacgagcctgagaacttaaagacactcatctacgatattattgacgaccttgtcaacttgggtgatcttcttgaaatgcgggacgaaatcgcgggggaaacgaacctcattttgcgccctgctccaccagcgtttgtgcttcgaagagatgggacattcattatagtgggagtagctggtgatgatgtcactccgccacaggtaaatgactttaatctcgtttattacccgagtggtttaaggatactcacaccaagcaatacgcaatcatgtcggcaaacacttatcgatctaggacttattgagttacctatgattacatggctacgtgcaccagtttcgattacagccgacaaacttgtaaaatcgtggatcagcagactccccaacgatatatacccggaaaaaatagagaattttgagataattgatattagcaaaacaacttcatactataaaggcagatggcagtcactaaacgaacaacatcctggaatttatattgcccgacgcccacaacgctacggggcaagactgtggtgccttgcagaaattcgggacggattagtccaacgcttcgttgatattcattcaggagatgcgcgctttcgagattgtgatgaagcctggcgattactcgctgcgatggatgcacttactggctctccgcaacaggtcagagttgtttatgaaaaggagataactgtgctgtcctttacatctcctcttccttcttgggcgattaggcgtcttagtctggtcggtgaacgtttaaagcctcatcgcgccttgctgcaattttcactgcctttacataatagtgaagaagaacttcattggctagaggaatccctctggctaactcgggattag

SEQ ID NO: 248632 - DNA, 2826 bp, Klebsiella pneumoniae
gtgaatctagcagaacttcaagagaggctataccaacattattctcgactacgtgatctgcggactaccgaaaattatcccgtttatgcgatagagcatggtctgagcgaagcggagatttctactgctcaatcgcttctcaatgccaacttgaatacaacaaaacgtgctactcgcacgttttggctggtatggatcgctgccgctgctgagataggttacacatatgacggaaccgaatattgggattcctttgctatagcctttccctcctggcctaagtttggagaccgtgatcaaatccgtatatggtatagacgatttactactgattttaatagtgtcaccccctccgggtcatgggcacagcagttccctattatttcttggccaatcacgcaagccattctgccaagatatctacaacgtttttttgccgatcacctatacaatcttcgccatttactgactagaagtggtgaacttacattagaagaaataggtgaactactaagcgatgaatatcatggtggttcatctcggttcgagggtttcttacaacaaaaaactctaacagcacgaattgtaatggcgatgcgtcttgaagatgtcgttgatgttatctctcccattgagaaaagcacattgcgccgcatcatagacgacttcgataagcttggttcatttggtactcgcctaaaggaagtaagacgagtactccgcgaggctcgtttcgtcaatttgtatagtacaagctttatatcttcttcaaaaaatatccaagaaaatgtaactctcacgaaaacttatacagtaaaacctcggctaattgcacggcaaagaggtttaacagagtggaacctaaggctcgtaattcccgacattgcaacatctcttcgtcaggccggactatccccgcttgatttagaacactctcatatgcgctttcgtttttatggtggaggcaatgcatggatgccgggccgggcattattttcttacaccggaggaacagaagaaccactctcggcatacccagctgataatcattctgttttcgaatacgatcgcccttttgaaaaagttacagcctctttgcaggaaaggctgcttttccctgcaatgactttacgactactaaaggtacgttcagatggtacggctgttgaagtcacgggacggcatgtaaaagctaaccaagcttatttacttgtctgttcgaatacagtgcccactgaagttatcgatagtctatcgcttactcctgttcagtcacagacaactggagccgacgtttggcaattttcaattcctacgaaagtagatgctggaataatagcagcattatcgtcgattgggcttggatataagttaggcatgcgagccgaatcaataggtatgactgcccgatggaacaatgtagatgacgcgctggagtttcttgacacagaagttgtcatgttttacctagcatcggatgttgaagccgacgaattacagatcattattaataaacatcctcctgtacatctgcgtccggaacccaacggaaaaacgttcatttcgctcggtaagcttccaataggtttgtattatgtatctttatctgcactcggcgtagctaccggtagcaacataataagcgaagaaattctcattagggtgcgtttagcagcaccttggcaaaagactgtctccggaaaagcaggggttagcctcaagcttgaaccgcagggagccacattagagcagtttcttgaccacgcagccaccctgaggtttatagctcctgccgggcgtattgttaaactggaaatccgtttcttcaacgcagacggcacgctttttcatatagagccgattggcaattacaaggctcctgttgacgatgagagaatatctaaacttatcgtacagaaactgacagcagacaactacattgaacatgttgagcgttccgcgtgtatagaattgctcatatcgttggacgaatatggcctagagagcgtgcgattcgacaagaaagcagaacctttacggtggctacgtttagacaaacgtactatccgactcaccgatgatacagaggaaacaagtctgccttctgtaaagagatatgatttgaacgctgttgaaattggtcacgaagtggactatgaacaggctctgtccggactagagcttcgtggtaagggcggtttgtttgttgcaagcatcaatgatcaaacttacgaagtgatcgctatggcttcgcagcgccaaatttctgattttcgagatctgaatattctgactcatgtgtccgcagaagaaccacagccgctaaccattatcaatgctctgggatattggcagggagctcggaggctgataggaccaatggcttttttggctcggcgcaacgctattctcacacttgaaaaagaacttgaacgatatctatgcggtaatgactgggcagaagatttaaacaaggttcaaagtggtaaaagggacattggatttctttataggcgagtttattattcacaaggattcgcttcaggcttattgagcgcacaagattggcaatatgatcatgatgcagaaactgctgaactagagttttttcgactggctcatgcttataaaattccggaaacagacatcctctatcgtcttgcactgaaattggcatttcaaccgcataccgtgaaaccctcggacctcgcatcaccaaatgcattcgatttgctacggaaaaactctgcgctaatccgcggagcgtattttgcgcgtctagtggcaagcagccagaaaacgagctctaagacggaggtcttatga

SEQ ID NO: 248633 - DNA, 1221 bp, Klebsiella pneumoniae; identical to SEQ ID NO: 198744

SEQ ID NO: 248634 - DNA, 1083 bp, Klebsiella pneumoniae
gtgaaaatcgtggttgactacagagatctgaatcttaaccgagaaaaccttgatctcaatatccagaactttctggaatctcacggctatcagcttgatggagatatacaaacatttcccaaaaggaaaagggtggtttttggctctactgggtcggaattctcaactgttgattttcacctcaaccatacaggtacaactacgattcagtggaaactaggtaaaaatcaaccagttggtgaaacacttgcttcatatttaagggatacaatcgacccagcagaatttgaaaacgtcaattattcattgaaaggaataactacagaatcattcgaccctatattagaatgcgttttggaggctggtgatattgaactcaatctcttacgtgatgaagacaactgtaagcaggtaacgctgaaaagtattgcacatcaagaccacttaactctcactcaccatcggcggacaagagttttacaaatacagggtaaacctttgtcatgttatcgtcgtgttattttcatgcttacagatttactggatctcaaaggattagaacaagtcttatatcgtaaagatgatagtagcgctgagatagttagaaaggagatggccgatgactatataaaaacagcatttcctagaagctatggactcttacctgaatcagtaaaaaaactgctaatctctagctgttgtgtgaaattagcctcaccacagttaccagattattgcctattactttatccggacctacgggctctcgaaggagtgctgaaagagcagatgtgcatttacaatatgtctgttgaagatgcagaacatggttttggcgacttttttgatatcaatcgtgggttatgtactttaaaacctcaatatagtgcaatggttagaaatgtagggatgcaggatgctttgaataacggctatacattttataggaaacatcgtcatacacttttccatatggaagagtttgcagatggcagtcgcatgatagatacccttgaaaaggcaataagtttatctaaaaacacatattctgcgatcgatagcttatatacagcgagaatgtga

SEQ ID NO: 248635 - DNA, 1797 bp, Klebsiella pneumoniae
atgactgattctacttttaattactcagatttgataaaagaagcatttattgatcctattcgtaatgtcacagtcattgatgatgaatatcctactcttccgtcactaatagacctccactattgtagtgatcaaaagccttgtgatgtaacttataaaccggttaacgttgaaagattaaaaaaaattattacgatgtgtcattcaacgcataaatggagtattgacgttttcaatggtaaatctcccaaccttggagcgggagatgacgaggtgcctgcacatattcatcatagtgatttgattattttagactatcaccttgacggggagcctgaagtagatgacggtagaagagcccgagcgataatccgagcccttgataataataagcattacaacactatattagttcatactaaaggttataaaggagatatagagtcggtttttatagagatattaaaagaatttactcatatagaatcaactcatcctctaaatccatctgaggatacaatcacgaaaatggaagattggatggatgagaatgaagatggtagactttatccatggatcagtaatgaacttcgtcttctatctgtgttaccactttattttagttttaatcctgagcaatatttgcctttgatgaatccaaataatccattaaaggactttaggaatgatgttgacggattggccgaaactttgggcatggaaactaatgagctcgttaagtggcgtttgtacgattttataaaaaaacatgtaccagtcaattctagttcacgatccgatttcagttgggaatgggacgatgacaccaattatataagtacaggaaaaacattcatttcagtaattaaaaaaaagccagatgatccgcaggataaccttgtaggtgatcttgaggttgcacttaaaaaacataatgcatctcccatgcatctactaatggcaaaaatgcgttatgaacttgatgaaaaaggcattgagcaggcaatgaaaataatagctaataggccagcgcaagcaggatggttatataacctactacaaaattcggcaagcgatgctgctcatgataaggctattaatttgcattgggagcaattagcaatggcctctcgtcaagagctgcgtaatttttctaaaaaaataatacagtcagctaattgtaataatgcagaatctaatagcgcatttgtgaagagcttttttaaagaatgcatgggtaataaagatctagctctgggccatattaatgcattttcatgctcaatgccagttagcaataatcatttgataacgggaacggttcttgaaattgacgatgaaagatgggtatgtgtaacaccagcttgcgatctggttcctgggcagaaagttgaacattggcaatcgcgaataggtaaaaattatttagtatttaaggcgataaaaattactgccattgcactggcgacggctaataaaaatgctaacactaatgattatatatttttgaacattgatggttctccacaagctttttctgtgggcaatggaagtccaacttgggatactttttttgctgctgacttaggtgcttatgatagcaataatatagtctcattatttgccgtaagagaggatattcagaaccaagagaaaccactcgttatgaaaaaacttcctgcaaaggctatcgcagaattacgatatgagtatgctttaaatctattgcataagtttggtgcatcacaaacccgagtgggtcttgatttccaaaataaagatagcatgtggccttga

SEQ ID NO: 248636 - DNA, 2970 bp, Klebsiella pneumoniae
atgacagaccacgtcacttttcaaactagagcaagaactattgaccatcttggacgagaacaaatcgccgattgcccgacagcaatctcggaattatggaaaaacgcatatgatgcttatgctcgtgatgtagcactgcacatttttgatggagaagctaaagtttcagccattgtagacaacggtcacggaatgaatcgtgatgagtttgagacgaaatggttagttgttggaacagagtctaaaacaaatggttttaggattcctgaggaggatcgggatggtcttccagaacgccctaaacaggggcaaaaaggtataggtcgtttatcttctgcggctattgggccgcttctcttattaatctcaaaaaggaaaaaaagtgattatgttgctgcattgatcgactggcgattatttgaaaatccgttcttatttctgagcgatgtacaaataccggtaagagagtttagtcacaagagtgatttggctgaaacattgccattactctttgaccaaatgatggggaatatttgggggagtaaggaggatcctcaacgcacaaatagaatcgcacaagcatgggcagcttttagtgagcaagagcttcgtgacggagctgaacagacaacccaagagaaaattgaacaaacattaattaaagatgtattcaaagaagaacatttccaaaaatggtctgtatggactggtgagtcatcacatggaacagcaatgtacattgcggaggtccaatatgatattcatgttcaattatctacgactcccttaaaccaagcagaagatactgagaaaagtactcgagaaagattcttccaaacattatccaattttactgacccattttcgagaggtagtgaacctttaatcactgatttcaattacagtgttacaggttgggtgaataatatccctcaaataattattggtaaagacagggaatttgatcttcgtaatcttgaagagctcgaacatatcattgagggatatgtcgatggtgatggttactttaaaggaagagtcagggttttcggggagtggatagaagactatataataaagcctaaacaggcttacaaaactcgaaaagacagcgctttcggacctttttatatacgtattggtactttcgaagtaaatgttaatagttcttccttgaatagtactcaacatgctcaaatttctgagcaaactgataaatatggtgggttcagggtttatcgtgacggtctgcgagtaatgccttatggaagagtcgatagtgattatttttccatcgaagagcgacgttctaaaaatgctggtcggtatttttggtcaagtcgacgtatgtttggacgcattgcaatttcacgagagtataatcccaaccttaaggataaggctggcagagaagggtttattgaaaaccgtgcatcgaaactctttagagaaattgttgaaaagattttacttgattcagctgatagattttttggttcttatgctaaagataggaaaagtaccattgaagatataagaaccaaaaaagcccaacttaaagctgaagaagataaagataaactattgaagaaggagcgccgtcgtatacgtttatctattaaaaataacatgcaaccacttgtaaagttagttacagctctttccgaatttcagaacaccttatccggaaggataggcttgaattctatcgatgaactccaaacgctaaaaaaatctatcgatgactactccgaaatattacaaggttattctcttagcccattacctacaagtttaggacgcttagaagatgaatacagggcatatcgaaaggaagaattaaaatgtagggagattatcaagaatctaacattgtttatcaatgatgaaataactaagtccacagataaaaacgactatgaaaaggcctatgaggtatatcgaagtaaagtttcaagtattaataattcaattactagatatgcttcgcgtggcaaagatatgcttcaaaaacaacaagttgaatttgatgcgttaattaaactttgtcgagagcaatacaagtctttaatggaagatacgcttgaagatctcaatttaaataaaatatctttatccgatgttctttataagttagatgctgagcagcagaaggttgaaatagaaaataagcaaaaattatctccctacataacagctttagaacgaattaatgaacagatagatttagagggattggccattcatagtatgaatgaatctattcgttatcgcgatgaactaactagactacattcactggcccagcttgggatcactgttgagattatagggcatgaacttgatggtttggatcaagagttaacgtatgccttgaactcgttaagggaaagcaagctggatgagacacaagaatataatttaggtatagctttacaaagtcatagtacattgattgataagttgaaattcctttccccgcttaaattgtcgggacgtaaggaaattcaaaaaatatctggaaaagatatatttaactatgttggtatgtatttctccaagcaattcttaaacgctaatatttcatttggatgtacaaaggaatttttaaatatatcaatatctgatttacagtccagactttacccagtctttatcaatattgttaataattctttgtattgggttcaaagagaggatggcaataaaagagaaatatgtttggcatataaggatggggaagttttcattagtgatgatggtccaggtgttgataatgatgatttggaaaatttattcacacttttcttcacaagaaaacagaaaggtggaagaggagttggactatatctttgcaaacaaaacctgttggccagtggtcatagtatccgctatgagacaagagatgactttaaaattcttagcggcgctaattttgcgatcaactttaaaggattgacaaatgactga

SEQ ID NO: 248637 - DNA, 1239 bp, Klebsiella pneumoniae
atgaacgtgggaactgagtataaaaaattgaaagctattgatttatttgctggtgctggtggcttttctcttgcagcttacaaggtgggcattgatgtccaggctgcaatcgagttggataaactagcttcagaaacatattacatgaatttagttgataagcgaaaagcccaaactcaggttttttctcaagatatcaatagtgtagatatagattctttgatgaaatttcaaggtatcaatgctggtgagcttgatttgattctaggtggtccaccctgtcaaggattctctacacatcggatcaacaatgctggtaagaatgatccacgtaacttattgttaattcgctattttgattttgttaaaaaatttaggccaaaagtatttctggttgaaaacgttcctggattgctttggcctcgtcatgccgaatatttaagcagattcatggcattatcacatgagcatggttataagattattggtaaaaaaccgttcatcttgaatgctagagactacggggttcctcaaaacagaaagcgtgcttttatcctcgctgttagagaagacattgataccgagggttttgtatggcctccggagccaactcacactaaagtcggtgacaattcttgggttacatcatcctgcgtctttgaaagtccatctaaatcagtactaattgaattcaaagagcgactggttgaaaagtttcacgtgtccttagagcaggctgaacagtgtatcgaaaagttggtctggggctcacctattgctacagatgatccttgtaatgtccatatggaacactcagctgagttaactgagctgttcaaaaaaaccccattattaggtgatcgtactgagtcaggtcgacagcttgaatgtcataaaaattataatggtcatttggatgtatatggtcgtatttacccacatttgccatcaaatacaatcacaactggatgtaacaatccatcaaaagggaggtttgtccatccttggctaaatcatgggattactctaaggcatgctgcacgcttacaaacgtttccagatgattatattttcagtggtggttccatggcagttgctaaacaaattggtaatgccgtccccataaagctaggcgaagcactgctaaaacctattattagattactattaacacaacaatctgtacgtgatataccacagagtgaaaaggtttattttgataaggaatgtattcgatga

SEQ ID NO: 248638 - DNA, 1032 bp, Klebsiella pneumoniae
atgagtaatatgaaattaacggcggctccggccagcgagggttcctccttcttcgctaatttgcggcataaaatgccgaaagataccggcatctttgtggtgatgctggtgattgccctgacctttgaaatcgccggctggtatgttcgcgaccagtcgttcctgctcaataccaaccggctggtgctgattgtgctgcaggtggcgattatcggcatcatcgccgtcggcgtcacccaggtgatcatcaccaccgggattgacctctcctccggctcggttattgcccttgcggcggtggtggcggccagcctggcgcaaacctccgacagcctgtcgccaatgttcccggcgctggtcaacctgccggcggtgatccccatttgcgcggggatcggcgtcggcctgctgtgcggcctgaccaacggtttcctggtgacgcggaccggtattccgccgtttatcgccaccctcgggatgatggtttcggcgcgcggtctggcgcagtattacactcagggcaacccgatcagcttcctctccgacagctttacggcgataggccagggggcgatgccggtgattatcttcttcgtgatcgccgccgtgtttcacattgcgctgaagcatacccggtatggcaaatatgtgtatgccatcggcggcaacatgacctcggccaaagtgtccggcatcaatgtgaataaatatctggtgatcgtctacaccatcgccggggcgctctcagggctggcgggggtggtgctggcggcgcgcgtcagcagcggccagtcgagtatggggatgtcctacgagctggacgcgattgccgccgcggtgatcggcggcagcagcttaatgggcggagtggggcgcattaccggcaccctgattggcgcgatgatccttggcctgatcaaaagcggttttacctttgtcggcgtcgatgcctatgtgcaggatattattaaaggcatcattatcgttgcggcggtaaccatcgatatgcgtcgcaaccggaaaaaacactaa

SEQ ID NO: 248639 - DNA, 366 bp, Klebsiella pneumoniae
atgaaaaatacttttaataaaatatataaaaaagaatcacctgaaagtttgttaagaacacattgcatcagtgttaggttgaaccatgaagaactacagcttctcaatgcaaggcgtggagacaaaagtaaaggtgaatggtttcgcttggcttttctcgataagattccagtagctgtgccgcctatcaacattgaagcctggaaatcccttagcgaaatttcacagaagctgaacaagctacttattcatctcgaaagtaaaagcactggtggtcagcttactaagacagaaatcttcgcagtgaagcgccagatctcagagcttcgctcatgccttaccgcttcaagcacatctgtcaggtag

SEQ ID NO: 248640 - DNA, 1617 bp, Klebsiella pneumoniae
atgctaaagaacatatactgtgaaaaattaattagaaaagaactgattttcaaaaatggtttgaatgccatattgggacctaaaaatggtgccaactctatcggtaaatcatcagttctaatgttaattgattatgtttttggtggtgatgattttatcaccctatgcaaagacgttatttctcaagttggtcatctaaacatcgaatttacttttgaatttgatggaaaatcctatcactttataagaaataccgaaaccaataatagtgtgatttttagaaataacgaagaaaaattagagtggtcaattgaagattttagaatcttcttggctcagaaatatggtttttcatcaaacgctccttcattaagaaatttagtctccagattcacgagaatttggggaaaagataattacaatccaaataaacctcttctacgctataccggggaaggatatgcatctatcaaagaatttctcattaaatccttcggctattataacttaattgaagaaattgaaaaaaagaaagccgaaaacgaagtaaaaagaaagaatattgatatagcattcaagcagggttttgtcaaaaaagtaaatttaaaagaatacaggcaagcaaaacaagatttaaatgttatcgacaataaaattgacactataaaaaaagatctagacctttttgcagccaacataaaagctatccttgatgaaaaaagcctaagtttagccatcgaaaaagataaatatctcaaacaaaaatactctctcgaaagtaagttatttagaattgaagaaaatatttctgatacaaagcctattccaaaaagatatttcagcaaagttgtcgattttttcccaactgttaacattcataaactaaatgaagttgagggtttccatttatcaatttcaaaaatcttgagtgatgagttaaaaaaagaaaaagaacgccttatattccaattaaatgagatggatgctgaaattagtataatcgatctcaaaatcaaagaaatagctgcatcagtcgatagaccagacgaaattattgatgaagttttgtcattatctataaagaaaaaagaagttgaagatacggttaattaccgcgagcgccaagatgctcttaaacaagcatcaagcactataaaggtagaattaaaagaaaagacagaagaaattctgtcaaaaatatctaaattattaaacgagaacctcaaattatacaacacaaaattctatggttccgacagaataccaccacagatcattttcagtgataaaaattatattttcgaacatcactctgactctgggaccggtaaatcttatgcgaatatgctggctttggatgtgagctttttacatacaacaaaattacccatatcaattgaagattccattgttttcaaaaacgttgaagtcgcagctatagaaaaaatagttaatacattaaacactattgataaacaagtttttatatcactcgatcaattaaatatttatagtgaaaaaacaagatcaactttgagaaaggcaagctttatgcgtataagcagaaaataccctgcattcaaagtttcatggaacattcaatccaacaacaaataa

SEQ ID NO: 248641 - DNA, 222 bp, Klebsiella pneumoniae
atgattacaccaagtaaatctatctcaatccaagattcaatattatacaagatgacaatcatcttagaaactgagtttaacgaaattaagattactgatttatacgaaaaaacatcaagcaatttttcatctctggacgaatttgtttactcactcgattttttgtttattttagagaaaatcatactaaacccagctaatgggacggtaataaaatgctaa

SEQ ID NO: 248642 - DNA, 759 bp, Klebsiella pneumoniae
gtgggtgaagaacgcaagaatatcaatcataatacacatatagttttatatgatgaggtaagtggtctttgcccaaaatgctttaaacctttaatggttcagaatggcaaacgaaaaataaagctctatgaagtagcacacatatatcctttctcccctcgtgaagaggaaaagaaattacttaaagatgagcaacttctttgcgatgatgttgatagcgaagataatttaattgccttgtgcagagactgtcataagttgttcgacaatccaagaacgattgagggttatcgggaaatgtacgctatcaaaaagcagttgagacaagcagcacaaatcaaaaacagccaatttaattttaagattgaagaagaaatcaaagagataattgatatactatcaacgcttgaaccaagtgaagattctcaattatcgtacaaggctatgagagttgatgataaaattctttccgactctggccctgcattcaagataaaggtcaaagctcaagttgcttatttttacactgaaataaaaaaattattccaacaactcgatcaacgagttccaaacacatcagaaataatattcaacgaagttaaaacatactatttgattttaaaaagagagaatttaactcaatccgaaatatataaccatttaattaattggataaaaacaaacacaaaggacactaatagtgtagccgccgaagttttagtgtgttttttcatccaaaattgcgaagtttactcatga

SEQ ID NO: 248643 - DNA, 2490 bp, Klebsiella pneumoniae
atgcttaactttgacaaaattggtgttggtaatgttgccaatacagctttacctccaagagaaatatttcaagctttacctaaaaaagataatttaaaatttcagtatccaagggatgttcaatctgaagtttggagtaagtggtttgagaaaagaaatgacaacaatattgtcataaagatgaacacaggaggaggtaaaacaatagttgggttgattttattgaaaagctgcctgaatgaaaaaaaaggtcctgctgtatatgttgttcctgataattatctcgtcaaacaagtaattgatgaaggaaataaattaggtatcggtgttactaacgacgaagaatcgatgggtttccttaccggcaaggatatacttgttatcaacatttataaacttatcaatggaagaagtaaatttggtgtaggtgatgaaggaaagaaaatttcgattggtagcattataattgatgacgctcacgcttgcatgaataccgtagaatcacagtttactataaaaataaaattcaacgataataaaggcagtctttacaaatcctttttaaacttgtttgcagaggatatagcaaggcaaaactatataaaatatagtgaaatccttaatggagactatactgcaatgcaagaggttcctttttggaattggcaaaaaaagattaaagaaacaacagaaattttggtgcaaaatagcacagacgatgaattaaagtttaacttaccattgttaaaaaaccatcttagcttatgtaagtgtgtaataagttctcaatcaattgaaataacacctcatataatccctatatcagtatttccttctttggatactgcatatagaaaaatctatatgacagcaactctggcagatgatagcattctttcgactcatttcggtgttaagacaaatgagttaaataatgcgataacgccagatagtgctggtgatataggtgagagaatgatattactcccacaagtccttaacccgaaaataactgacaatgacatattaaaaatatgtcatgaagtttcaaaaaaacacaacgtggttattattagcccttcagagtataaagcaaggaaatggaatcctatagctaatcagattttaaagtctgaaaatataactgatggtgttaatcaattaaaaaacagccatgtgggaataactatacttataaatagatatgatggaattgatttgcctaaggatgcttgtcgattattagtaatagatggattacctgatgatagcagtaatattgagaaaattaaaaatggcattcttcttggaagtaaagaaggtgctataaggacaatacaaaaaattgaacaaggaatgggcagaggaataagatccaatgatgattactgtgtcgtaatgttgcttggccaacaactttcaagccttttatacgttaatgaagcatcatcttacttttcacctgcgacaaaagcacagttagaattatctaatcaaatcgcagaacaacttaattcaccatctaatgaagagatattggatgtaatggattactgcttaaaaagaaatgatcagtggatagccgccagtagaggcggattatctgcacttaagtatgaagaagcttctaattctatgaacttaaactctgcattatttaatgcatttaatgaagctaatcttggtgattatagaaagtcatataaaatactatatgactatgtaaaccaatgtgatgataataaaacaaaaggatatgcaaagcagttcttagctgaatatacaaacttttatgatgagagcgaagctcaaaaaatattgaagtcagctaaggctttaaaccaaagagtattacgctctcttgacggaattacttacgacagaataaatcaagatgaacataaacaagcccttaaggtaagtgagtatttgtgctccaaatttaaagaacctaacaagctaattatattccttaatagtatcttagacgatttaagtttcaaggccgactcacacaaaaggtttgagtcagctattgacgagctggctaaaatattaggttttacgagtgagcggccggaagagaagtacgatgaaggtcccgacaacttatgggctattaaagcaaatgaatacttagtgattgagtgtaaaaatgaggctgttaatgacaggataattaagtcctattgtaatcagcttaacggctccgtaacttggttcaacaacaattatgaccatttttgtaatgcaacccctattttaattcacccatcaactattacggaaaaagcagcttcgttaaatgctaacacaagaatcatcgattcagaatgtctggaaaagataaaaaacagtttgcactctttcattacggcaattgcttataataatgaaatggcaaatgttgataaagtaagagaaaggttatctggttttaagctaaaagctgaagacatcattaataattataccaaagagtttcgttga

SEQ ID NO: 248644 - DNA, 594 bp, Klebsiella pneumoniae
atgaagtattttaatagtaagccctccattgtttatggttatcatggacttgataaagatgttgcttacaatattttaaataaccattcggaatttcttttaagtgataacacttacgactggcttagtggaggtgtttatttttgggaaaataattacgaacgtgcaatggactatgcaattgagtcaagtaaaagagcatcttcaaatattaaaactccgtttgttcttggagctgttattgaattaggtacctgtcttgatttattagaccatagtgatattgattatgttaaagaagtttatgacttgtttgtgcaatatttgaaagaaacaaattctccgcttccagtgaactcaagttttaattcaaaagtaaatgacctaatgaaaagagaattagattgtgctgttatttctcatgctaaagaattagctaaattaaatggaatatctattgatactgttcgggcatcatttcaagagggtaatcccatttatccttcggctaactttcatgataaaacacacatacaaattgctgtagtaaatcccaaatgcataaagggtgtctacttaccaagagaacgataa

SEQ ID NO: 248645 - DNA, 180 bp, Klebsiella pneumoniae
atggatattcaggaacttacgagaaaacttaaaaataaaacaatttcatacacaacagaagaaacaaaacagatccttatcgatgccaaagttttggttaaagatggttcatataatccagagatgttttctaacgagttagtcaaaaaaagccaacgagcaatgaagcgtagaagatga

SEQ ID NO: 248646 - DNA, 1227 bp, Klebsiella pneumoniae
atgacctcactcacggtcaggacggttcaggctctcatcaaagcaggacagccaggaaagtatggtgatggtcgtggtttgtatcttaagattccatcgaaaggtgaatcatactggatgcttcgatacacaatcggctctaagagacgagaactcacacttggcaaggtatctcatctatctctgtctgaggtacgtagcctcgctgaggatacccgaagaaaagttgccactggggatgatcctattgctgaacggaaactcaatcgccctaagcaactcacaacggtagatggattgtttgaagactggcacaaagacctggttaagcggttgaagcatccacaaatcccagaaagggtatacaggaaagatatcgcccctactattggtcaactttctttgacgaagataacccccattgatgtcaggtcaattctgcaaaaaattacagatagcggaagaccaactatttcaaatgatgcactactctacatgaagcaactcttcgaccatgcaatcaagcttggattattgttaaacaatccagcttctgcgtttaaggtcaatgatgctggtggaatcgaaaaaagcagagaaagagcattgagtcaggaagaaattgggcaggtgtttaaagttttcagagaacactctgacagcttctctcgtgataactaccttgcctgtgccctacttctactgctggcagttcgaaaaagtgaacttacggaagcgccctggtcagaatttaatcttgatgagaagaaatggtctttacccaaggaaagaagtaagtcaggtgtgggtatcgtgatcccactaccaccactggcgattgagatgttaaaagagctaaaggtaagagcatttggttctgattatgtcttcccgaaccgccgaaccagcaagaatctacatatgggaaaagacaccctcaacagggcgatagctaaactttttgggattgagccaagcaagaagaagcaaccacccaatgtaatgggagatatggagtatttcaccgttcatgacttacgaaggacttgcagaagtttactggcttcactgtctgttcccccacatgtcgcagaaagatgcctgaaccacaagctgaaaggtgtagaaggtatttatgacaggtatgattattttcaagagagagaagtagcacatctcaaattatctagattgcttacaaagcatattaatttattggatagataa

SEQ ID NO: 248647 - DNA, 942 bp, Klebsiella pneumoniae
atgaaaaattatatttatattgacactaatattataagtgatttcaaacccttcacacctgacaaatggcaatcattcaataaagtacagaagaaatatcacttccctttttcacacgctcatttattcgacctaaaaaatagcccagaaaaatacttagttgaagacttggatctacttgaacgcatatctgataggtatggaataaatgaaatagacgaaaatggtaaatttgtaattaaaaaactaaactcaaaactatatccattttttaattctgttatagcaactgaaataaaagatgaagaattagctaaaaagaacaggatttttttcttacctggttatgataagcataaaatcgaattatcgaaaatgcacaaggattcattcctaacccaaatgattgataaaaataacgggattttagatggaaactttcccaacttactaatgacttatttaactgaaaacatggattctccaaatatttataaaagcttaagaaaacaagtccaggacttgatttctcatgcaaaaaaatacaatacatttaaaaatctcccgaaagaatttgtcggatttcttgagatattttcaggttcaattaaagaagaccagatttttgaaaagttagttgactatagaaaatgggcattgaaatttacaggtaaagatttcagtaaattttcacaaccagaacagatagttgatatatatatgtctttagatatagtgaagggttttagtgaagatatttctaaaaaaaaccgttgggtaaatatgtatagagatgcacaacattgcggcaatgcaagtcaatcaaaatattatattactaaagaacaaaataataaaaataaatttaacttcataatgagagagtttaatttaaaatgcagagaaattactcttgaagatctcttgaaccgaatctcgtag

SEQ ID NO: 248648 - DNA, 1236 bp, Klebsiella pneumoniae
atgagtgtttaccagtcatggcggacggcctggcgaacaccaggcgtgttaagaaattatcctcctaatccgctttatgtggatacggtcagaggaaaagcgtcgggaaaagggtcagtcgatgatccagtgaacagcctcggtctggcgcaggggttatgcctcggtctttccgattatgaaataaagattattgccccggaaagttctccactacgacaggaggttgtatttaacaccaccgagaatgtgaccttatcaggcgttgatggtgaaccgtggtacacctttggatctgaagaacatacatccgggtggactcagaacggtcagatttttcagaaaacactggggtatacctctgtgcttcaggtggtcgttacatcaatgacggagacggtcggtgacagagatgattttctttttaaactactacaaaacacctccacgccgaccacgccagcagctggtgagtatggatatgcaggaggcattatttatgtccggttaccggatgattcagaccctgctctgcactcgattgaaatatcccggcgtaattttggggtagcgacaaccgggtttggactccttacggtgaatgactgtatcgcgcgctattgcatgattaatggcatttcctgcgggttatccacgcaaccggcaggcaccggcttcctgaccgtcaatgactccgttattgagtactgtgcgaatgccggtgttggtggtacggggcgaaatgagttgataatctgtaataacgtgcgtgcctggcggatttcaaatgatggcttcgggcagcatgcgcctgtaggcggtgccggaaaaatgatcctgaatggctgtaatggtagttataacggcgatcaggccggtcagtctgcccagggggcttcaaaccatgagtttacgaaaatggtaatcaacggagggacattcaattttaatgtctcaggcggaatggtggctattgaaaatgcgcagtgtgatattcacggcgacacaaaatacgggcctgttgtgatggacgggaatatgaggctggggaatacggcaggaactatcgccagccaggctggatgcgcctggctgaactatgccactgggatagtgacgggagatgtaaccgttaaaaacggtcaaggtgtcggcgttcgccgtgggccagatgccatcgtggaaggtatcgcaacgatccactcaatcaacaacgcactgccggatattttgtga

SEQ ID NO: 248649 - DNA, 216 bp, Klebsiella pneumoniae
atgacagtatgcagattgtgtcagtgtgagccaatggtgatgacaaagccggaaaccgatggaatcacctatttttatgtgcattatgtggaatgttccggatgtggcataggaacaaaacggttttctgagcaaatgatggaggctgaggccgctatcagccaggcttcagaacagtgggagctgatgaatataacggttcctgacatcagatag

SEQ ID NO: 248650 - DNA, 153 bp, Klebsiella pneumoniae
atgagcggcagcaacggcaagggcaacaccaccaagatctccggcgacatcatccatgaggatggtgatctttcgtctaacggcgtggtcctgcatgaacaccgccaccgcactcaggggctggacgcactcaccacggagccgacccaatga

SEQ ID NO: 248651 - DNA, 231 bp, Klebsiella pneumoniae
gtgcatatcgcccgcggcaacctggcgcgccagcctggcaatcgcaatctggcggtgttcgcccgcgacagccacaagcgggctcgcacgagttggcatgaggttcgtgcctacaagatccgcatgcccgcgcggccgttcttgggcgtgaaccgtgaggatatgtgggcaatgggacgcctgacggtgcagaccatccaggcggccgagggaggtggcggtgctcggtaa

SEQ ID NO: 248652 - DNA, 225 bp, Klebsiella pneumoniae
atgccatcgtcggtaaacggcaccttgccgggcgcgttgacgagctgggtggctacctcgatcttgacctgctcggccagccagtcgcggccgcggatgacgtcgatccactcgcccgcggccaccttgccgttctgggtcaccgcgaagctgcgcatctgctcgaaggtgttggcgttcttggcgtgcgccgccagcgcctggccctcggccagcccgtcgtag

SEQ ID NO: 248653 - DNA, 195 bp, Klebsiella pneumoniae
gtgaagttcgaacaacgcccgtacaccacggtatcggcgcaggccggctaccgcttcaacaagcacctggaagcgaccctgacggtgaacaacctgttcgacaaggtctactaccagcgcgtgtgggcggcgtatggctcgaactactacggcgagccgcgcagcgtgatgctgaacctgaaggcgacgtattga

SEQ ID NO: 248654 - DNA, 240 bp, Klebsiella pneumoniae
atggacgcggcgcaggccgccgccgaccagctcggctacgccagcatgcgcctgcccagcggcgccggccacgacgccgtctacatggcgcccaccggccccatcggcatgatcttcatcccctgcctgaacgggcgcagccactgccccgaggagtggatcgagccagcgcagctgctggacggcacccgcgtgctgtaccagaccgtgctggaactggatcgccggctgtcccgataa

SEQ ID NO: 248655 - DNA, 243 bp, Klebsiella pneumoniae
gtggtgcgcatccaggagggcgcctggtatgggccgaccgggccggagattggcgcgctggacacctatggcgatcccaacacgctgacgctggacgtcggcacctccgagctggcgcaggggccaagccccaacacctgcctggtggaaatcgaaccgtacaagggcgtggcgccgccggtgaccgcgttcggcggcccgaccgaggtggatatcgatggcaaggcgctggcccggcattga

SEQ ID NO: 248656 - DNA, 204 bp, Klebsiella pneumoniae
atgcaatcgcggtcggcgggcatcgcgctggaatccacgccgtccacgcccgccgaccgcgattgcatcgattacctgtttttcgtgcacgaccgccacgacggcaacaaggccgcggcgcgtcagtacctcgcctgggaaaccaacctggtcaagcagatcgacgcgcgcgaacgcgccgcgtatcgcttcccggcggggtga

SEQ ID NO: 248657 - DNA, 147 bp, Klebsiella pneumoniae
atggtggattacctggccggcaagatccgcagcggtggccgtggcgcctggggcgccgtgcccatgccggcgcaaacccatgtcagcccggaagacgcccgcctgctggccgaatggatcctgtcactggcgccggccaagaagtag

SEQ ID NO: 248658 - DNA, 225 bp, Klebsiella pneumoniae
atgtggccggaatggctcgacgaagcccgcgagccgtccaacatggaaaacgacgaataccgcgctgcggtgctgcgtattctgcgtacgaaacgcccgcaatggcgcgacaccgtgctggcgaacaccgaccgggacgatccggatgcgctgcggcttgtactggctgatgtagccgcgctggaggcggcgcaggccgatttcatcgcccacaccaccgcctga

SEQ ID NO: 248659 - DNA, 171 bp, Klebsiella pneumoniae
atgctgggcaacgcctggaacgacctggtgcagcccttctggatcctgccggcgctggcgctgtccaagctcaagctgcgcgacgtgatgggctatacggtcatcatgatgttgtgggtcggcgtgatccacatcaccgccgtgctggcgtggggctatttgacccattaa

SEQ ID NO: 248660 - DNA, 174 bp, Klebsiella pneumoniae
atgatggaagagaacttccgccgtgccctgctgctgtcgcgcggcgacttcagcaccttcgtgacgcgccccctgtcggcctcgctgctggccgtggcgctgttcctggtggtgctggtggccctgccggcgatccgcaagaagcgcgaagagaccttcgtcgaagaagattga

SEQ ID NO: 248661 - DNA, 159 bp, Klebsiella pneumoniae
gtggccaaggtcaacgccgatcctgaatacagcaagctgatgcaggcgcaaggggtggatctgtggaacatgacgccgcaggaggccaccgccttcgtcgagaaggaccaggccgccatgcgcaagctggtgcaggcggcggggttgatgaagaaatag

SEQ ID NO: 248662 - DNA, 186 bp, Klebsiella pneumoniae
atgctgggcggcgccaacacgctgatgatgggccgcgtcatgtggaacgagttcttcaacaataccgactggccgatggcctctgcggtgacctgcgtgatggtgctgctgttgctggtgccgctggcgctgttccagtacaaccaggtcaagcagcaggaactggccaacggggggcgcaaatga

SEQ ID NO: 248663 - DNA, 294 bp, Klebsiella pneumoniae
atgaggaacatgctgataaacgatgcaaccagtttggtaaagcaaccgccgaggcagtcacgctaccggatggttgttcaccggggggggcgcaatatcgacagcctgctgaatcagcaactgttaacccatatggcggcaggaccgaagccgcagcacctgacgcggagcgggatgaggaagaggggaacgcctcaagaggagtgtccgctttttttgcaggaagtcttgccggattattattatccgttggagctgaaacatccagagcaatatacacgtcccgatatctga

SEQ ID NO: 248664 - DNA, 354 bp, Klebsiella pneumoniae
atgggcattcccggcggtgacgctgccgtcagccgggcgaaacgccgggcgcagctgggccagctgctgctcgctggtctccgggcgcggttgctcatcgtcagtcacgaatcgcggcggctttttgccctgcgggacgctgaccggaacgatctcctcacgaaagcgcccggcggcgatagcagccgccgctttgcgctgggagctggcggcgaaggcgtcctggcgctcgcggctgatgtcgaaggcgtcggcgaggttctcggcggtaatgcccatgtggtagtcgttgaaggcgtcccacaggccgtcctggatcatgctgtcctgcaggctggcgtggccgaaacgtag

SEQ ID NO: 248665 - DNA, 480 bp, Klebsiella pneumoniae; identical to SEQ ID NO: 191033

SEQ ID NO: 248666 - DNA, 276 bp, Klebsiella pneumoniae
atgagccttgaatttataagcgggttggtagtcgttctgcttggcttaatcgtaggcgcgcttgggttaggccatgcgcgcgggaccagcaaggcggaagccaaagccgaacagcagcgcaccgaagagaacgcggccgccagcatcgccgcggcagaacgtaaagcagatgttattcaagaggccagcaatgcacagcagactgttagccatatgcgtgatgacgatgttgatcgcgagctgcgcgaaaagtttacccgccccggtggtggttga

SEQ ID NO: 248667 - DNA, 354 bp, Klebsiella pneumoniae
atgaaaatgcctaataacccgagtaactggccagattttatggagttgctgcagagttggtggcgcggagatacgccgctgggcgctgtgctgctttctgtagttatggctgggctgcgtattgcctattttggaggtggtggtggctggaagaaaaaaactctcgaagtccttctttgtggggccataacgctgacttgttcatcagcgctggaatatttgggtctaccaaaaacattgtcggtaactattggcggcggtgttgggcttgttggtgtggatgctatcagagcatttgcaatgaaatatattggcaaccgatttggcatcggtggcggcgataacaaggcgtaa

SEQ ID NO: 248668 - DNA, 486 bp, Klebsiella pneumoniae; identical to SEQ ID NO: 203946

SEQ ID NO: 248669 - DNA, 216 bp, Klebsiella pneumoniae
atggctaaatcagcgatgaaatttctggtacgcgcctgggataaagaactgaaaaatcctgtgtggtgcatggggagccgcaagcaccgtaaagattgcgctagaaactgggcttcaacaaccgcctcagcggctgaggattggtcttggccaattgacagtcaggacgccgcagacgaagccgtagctgaagacgtgagcaactgggacgcatga

SEQ ID NO: 248670 - DNA, 513 bp, Klebsiella pneumoniae
atgccgcatgagaaaggcagacacgaaacgaggtgcgcaatgactgatttcggcggatcgaaaactccaaaaaatgaaagaggaaggtggtcgcagataaagggatatgaggggatttatgaaatttccacactaggagaaatcaggtccttacctcacaaggattatatggggagattgtatcctgggaaaaatatgaagccattaaaacacccaagaggatacttaggggtaggtctttgcaaggatggtgttaagaaacgttatttaattcataggcttgttgctatgacttttataccttgcgcgaatgccgattatgttgtcaaccataaaaatggagataaaaaggataattcagtttgcaatcttgaatggtgctccgcttccgataacaacaagcatgcatataagcttgggctaaattacatttcaataaaaaacaaacgagccacctctgaaagaatgaaattgaggcatgcagagagaaggaaaaataagaatgcaaagtga

SEQ ID NO: 248671 - DNA, 1044 bp, Klebsiella pneumoniae
atgggcgaagttactaaagaaccagttgagcaggtcaaacaagcctttaaagacaggatttcaagccctttgtggggttatgtttttttctcatggcttggtttcaattggcaaaatattgctaagttatttatgagcaaaagagaggttgaagtaaggatttcggaaataacctctcaggagtggttttttgttcactacatcgtattaccagtgattgttggtgctgctctggctgccgtttccccctatcttcagcaatggctttcagcagcccataagcgtgcagaaaaaaatcaacgagcagacctgaaacaaaaaataattgataaatatgatgatgatattgatatagctggaaagaaagttgaagcaaataaagctcaagaacttgctgaggaaaaagagcatacaaaggttgttcaggagcaagaaaaacaaaaaagagcagttctcgacacaaatgcactagaagaaaacctcaagcaattggaaaaaagaaaatacgaaattgaatccgcaataaaaaaactagaagagcagggggaaaacagaagatatgagattgaatcctcaataaaaaaactagaggagcaaggagagaaagtccagaaagagactgatttctggagaaacagggtgttcaaagttatcaaattagttaatggcttcaataatgtttcagacagccgctcactgaacagtatcaaagacgagctttccagcctattcagtgatgaagagttagagattgctggctatgtcgtagagtatcaggaagagcgaaataaaatcctcatggaaaccatatcaaatgccttatcccttattaaggacatccgtgagtcgtataaccaagaacttgattatggcgttaccacgaatatcagcagacacaaagaaatggatttgcttatcaatgagctttcatcgacactgaaaattatcaacaaaaatgtctatatgaataactcaaagaaaaacaagaacataattaacaatatcaaaaacagggctgtaatttcagggacaacagccggatga

SEQ ID NO: 248672 - DNA, 624 bp, Klebsiella pneumoniae
atgacttcacgtgtctacgcttacctcagagcttccaccactcagcaagacgcaacacgcgccaaaggtcagttgggtgagttcgctacagccaacggtatgactatttcaagctacttcacagagaatgaatctggtgcatctctaaagcgtcctgagttgttcagattgctggatattgcgcagaagggagatgttctcttagtggagcaggtagaccgcctgtcacgtttgagcggtgaagactggaacaagttacggtcactgattaatgagaaaggtgtgagagtcgttgccttagacctgccaacaagccaccagcttattcagtcaggggatgagttcaccagcaggatgcttgaggcgttaaacgggatgatgctggacatgctcgccgctattgccagaaaggattacacagaccgtaagagaagacaggctcaggggattgttaaggccaaatcagacggaaaatataaaggccgtccagaggacacacagcgcaatgagagaatagccaagctgttacaggctgggatgtcttacagtgacgtaatggaaacggtgaattgttcaagggcaacggtggcaaaggtcagtaagagcctcaaagaggtggtttaa

SEQ ID NO: 248673 - DNA, 576 bp, Klebsiella pneumoniae
atgacaaccttgaataaagccgtatcaattaaccaacccatcgcaagtattaaccatctgctaccttttgaacaacgtcagcatattgagaagctctatttcccgaaggttcaacaggccactgacaagatgtctaaagcagaatctgaatatcgggatgcagtagaatcacgccagcaattgattaaccggaaaactgccgaatatctggctaatccttcagaacgtcacggtttcattgtgaagcaggtttacccaacgaaccaacagcagattattgagtcaatggcttattctggctacatggttcaccgcatgggtatcggtgtaattagtttcattcgtgtgccaaagaacgctaaagataatcctcttcaggacataactgataaggctacagcagaggctgagtcaactattgataagatgattgaacgtctgaaggtaaaagcctctgaagctgtccatcagcgaaataaaatcgtaatcgaagcccgtaaagctctggattcgattaaattatttgaaagctatttaaacgtgattgtaactgactctgaagaggtaacagaataa

SEQ ID NO: 248674 - DNA, 261 bp, Klebsiella pneumoniae
atgattactccaatgaaagggctgtccaaacgtggcagctataaccctaatactgactcaatggaattcaaatatttcaacggtcaaaaagaaatcagtgaagcaacttataaatcactctcttcaggcagtaagcctaaaccaactgtgaaaccatcgaaagcagtcaccacttacaaggttaagccaaagccaacaattgaacagcaaagagatacagctctcaaagatgcaatcaggaaaatgacaggagggctgtaa

SEQ ID NO: 248675 - DNA, 246 bp, Klebsiella pneumoniae
atgaaacgcccgactgcgaacgtttctggtgacaacccaggggattcagcccctgtggccggcgaggagcgtgaccagacgctctttcacctcggcgttgctccccctcacgtatcttccccggactggttcctccaatacggttacctgggcaacgcacctcttctggcaattactgacgtctttcacctgccgggggaacagggacattatatcccccgcgaataccctttcgctgtagcgtga

SEQ ID NO: 248676 - DNA, 3783 bp, Klebsiella pneumoniae
gtgggtaggaagtcacgtgaaaagcgggaaagaaaactaacagagcaaaaggttgattatgattctttgatacatgatatgtccagatgtcgtgaattgtttacgaatagggtagatgaagacacatacttttgtaagcatctggaagccacccagaatttatttcgccgatacaaaaccctcgacgtagcagttgcattatttacttccgaactctggccaggcaatacaggtagccccataaagcatatttttgcttggtgtgtccttttagagctgccatttgagtctcaggtaggtatatcgattgatagctatgtagattttaaagtatttacaaaagaattatacgcatcatggcctgaattcccaatgcttgaggatttttcccccgaggctgattgggggcaaatcaaagtacggcttggtcaagacttcgttcctatgttctacgggagttgcattgagagaatgtctgacttcgtagaagcatttcgcattacctatgctcatattccagaagcacaagcccatatggatcttgccattgcgctgcaagcgcagatcatcgaatcgattcctgagttgatgctctctgtcaaaaccgaggcccaatgtgctgatgttgaactagctactgaagtcttctggttgacttgcaagtctttgcttcaacaacttggcaatgagctagagaaccgccgaaagaaagcagggtgtacgttcgatactcgtgttggcactttcaaagcaccgctgaaaccggatgcgttcggaaatgcagtgatgcaaggaatggcgctacctttccttgctgtcgagatggatagggtatggataccaatgtcagtacgcagtgcaccgggtctcattattgaccattgggctaacaaaaatctgaacgggattagcccctctacacacaggaaacttgcagagtttgtcgctgagcgattccaaagaacccttatggggcctttgactctatatgttgacggcaccgcctgcaaagacctgcctatcagttgtattataccgggtgattctgggatatatctcatttgcacatgtgaccacacatctaatgaccgcctgtcaaacgcagcggaaagcatatacgccaaggtgagtcgtggatcgtcgattttcttccgtcttgatgatggacgtttcctttctctatctagagatggtacagaacctagcgtcgatgagcttcacatcgttattgtcgttacactcgcgggtactgcgtttaattccatcaatctcccctcaaagccaactcgtttgtttccattagcggatttcattacgatttttgatagtctcaaagatctggaagaattagaaagttattggaaatttacagatgctcaagagggcacgctcagcccgttttcccgtggaacagtagacctgtttgcatcattcaaagacatgcatggtgtacttgtcgaaggcgcgattgcacctaacttcattgggctagaccctcactggggtacttcttggcgcttcaagatattgacagaattctggtctcgtgcgcccaaggtatttccagacagctctatcggatggacgttgagttcttcaactgaaggtgttgttcgacttgaatcgcgtcatcacaaagcgatagcatactcaacatcgattggttcctgtaccgttcaaacattaatagaaatacccaaagaattacgctttgaagatggacgtctgatagacctttttgcccaacttctgaccgactgtagctatcgctgcagaaaaatgatgtctgatatctctctatttaggcagccgcatgttttgttttcctgctcccctgatccatctagtctggttaaagctgaagagagtccttcttctttagaagaatttaaacacgtggtgacttcagtcatcccggattcccacaactccgatgtatttcacgttcaagttgatacacgtgcagtccttgccgggttaaatctttccaaggatggatcattcgaggttcgttgcttactggaaacgctcgaaaaatgtcatgcagtacttggtttgcagatgcctgatgaatttgctcaacgatttactcatatagcgtcgcaagcggctcgttatcatttaaaagtcatggcccgtaatattgatgtccccgaccatgtataccctataattccttcgcctaccgattacaagcttgcacgtagaagactggccgcagaaatcatggggcttgggtttattcctggcaggtatgagctgtcagatgccaaggccaggattgatccttccagtgctcgcatgcgtcttcacattgagaatcgacttgcagcatttgataggcatcagcttctgcaggcattcatcgagcaacatgatgccctccttgttacggagaggactagaatccaacgagcccgtttgagtcttgctcatgaagttgagtacgacagacttgatgcgattgaacaggcacgcaaagaattcggaaatatggctcggcattatcgatatctgttggaaaagaccgtcagtttatcttcaaacggtgtagatgacgttacagaggatgtactacgggagttagtaggtttggttgattggttcatggtgctgactggtgcaagtgatacccttcacaatggtatagatgtggggggagttgaaatcgacgactcgtatattcctgaagttttctattcggcaggttttgatgatcgtgaggcggtttttgcaagggagtacgcaaaatccagactgggactcggtgcaaatgacaaggatgcggttgaaggtgaatcggaagatttactgtcgtcagagaaactcaaagaggcttttataaccgatctgggcttcgaactgcagaacatgctcactgctctcgctattttatcgcaagctcaacgatatgggtttggcgacgaactttcactgtcttatgttgctgcaccggatcgcctcgcgcaaggattgtctgacagtatcgatagacttgactattctgaggcccaaaaaatcgttgcttttctgactctttcggaaacaggtgttcgtaggcttgctggacgggatatcgatgagggagatatcccatactgggagcgtaacaagcgaatcgatcgatacacaattaagccactggtaattgatggtaccgacctgcgttggggggcagagtcggcaagccgggcaatgtacatttggatgtcggcggtacgagacggttatttgcctgcggaatttgattggcctcatgttaagccagtcattcgcgaggttaaggagagtattgaaaagcgccttgagcttcgtacagaggaaatattccgcaggtatacaccttatgttcagcgaggtattgatttctttagaagattccgggaagagaagtttgatgacgttggtgatttcgatgtttttgcatactggccggaaagcaatttgctcgtgacagtagagtgtaagtacaaccagccgccatatacaatgaaagatagccgtcgtcttcgtgatcggatatttggcaaggcagagaatgacagggcaggacaattcagtcgtattttaggccgcagaaaatttctcgaaacccaccgttcaaggttgcttgaactgctccagtggccacagcatgagagtgttcctttaaggaatattgaactctatgtaagccgcgatgtgtactactggatggttcacccgccatatcctgttccgacccagtttgtacgtgtagacactttggacacttggatcaaaaccgaactaaacatcccttga

SEQ ID NO: 248677 - DNA, 1221 bp, Klebsiella pneumoniae; identical to SEQ ID NO: 218052

SEQ ID NO: 248678 - DNA, 1293 bp, Klebsiella pneumoniae
atgaaaaaagcagcattaatatctatattagcattatatatcactggttgtgactcaagcccagagaaaaaaaatgtaagcgagcttaaaaacaatgaaataatggatatgtgccaccttgaaaataacgatgtaacaagcggattgaaattaaaagccaaaagggatattaaaaatccgttactacttaatccaatgaatacatcacaaaaaagcccagctttatctgcgtttgaatattctgactataaaacaatggaagaattcagtgccaaagattttattgatgaccttggtaaagcaaatacggtaagcgtaacaaatcaaaatggaagtgctgacatcccatctaactccttgatctgcaaaggtttaataacatacacaccaagctttgcctatggtcttgaaataaaaataccttatgagtattcgataaaaagaaatgaaggcgtattgaccaaagatataagcaatggtcgaaacattacctttgatacccgttttaacgatgaaaacttatatacagaaacaaccccaacaaagaatcaagaagaatggatctcttcatatttaaataaattaagcaaaaaaatatcagaaatgaaatccactccaaaatctaaatacttgcctatttcaagtggagatttggtatatttatactttgctaactcaaacagagaatttactgatgacgaaataatgtcagtattcagcagaaaatggaactctacaaatgacacatttatcaaagatgatataaaaaaagaagaaatcaatgggataaaagaaaaaataaactcttacaaaggcattgctaatgtagcagtggctgctaatagtacacgcctatctggaatcattccgttacccaatggtatcgatggaaaccctcaattaaacaattttactaacgctagcgattcctatatcgtagataatccatatgacaaagaacttcatggctttaaatcagattcagctggctgcaatagattcaacacgtttgaatacaacaatcaagggattgttttagatccacggctcgatttgagaaaatgtattttagtggttaatgatgatgatgctagaaatatttcttcaaaactaacatctcttcaaaaagagaagatcaatatatcttccactgcaaatcattaccttcatattgatggatatcttaatcaaggtaattatatagttgctacgatagtgaaatcagacttctcaatatataaggatgttcctggaaaatcacctgagttagtttttacaggagatcttaactga

SEQ ID NO: 248679 - DNA, 588 bp, Klebsiella pneumoniae
atgagaaaatatgtaggatttataatcctattatccggctgcgcttcaaaacaagaaccatttcagctagaagattatggtaaattctgcccatccgaagttaagatttcagaggaatcatcaaaagaatatatagtttataaaagtgaagaaaaggatttttatattcttccaggtgactatgtactttccaaatccgagctattaagaatgccacaaagcaacaccgtcgccaataatgaaaaacaagttaaaatatcgtcagtatcagactttgctaaatatttaaatgaccagattgaggatgtaaagacaattggagttaattttaaaaatgggaaattaaaaaataaatcaaattacccagacaaaaatctagccaaagaactgattattgaaaaatacatcagtacaaaaaacccaaaaattgttttttgtggtctaacattgaagtcagagttcatcccaatgagaaataaaaacaccaagtatattgtaaggcaacatgaagaaaaaaagccaaataacgaaatctactccggtgagagaggggattactacttcaccataacaccatactataaatga

SEQ ID NO: 248680 - DNA, 885 bp, Klebsiella pneumoniae
atgagtgacaatttagttgttggccacgaggagttgattacgctgatcaatatacctctttctattctagatcctaatcattctgcaattagccctgaaattcgtaaaaaaattctaagagaacgttataagaaccaattaatagcagatggattagaaactggtcatcttaaagaaattagaggtaatatttattttgtctctaaattatcacttgaatcgtttgctgggtttgtttttgaagcctatttggttagcctttttaatcgtaataaaaatattggtagagctgctcttacgtggtgctcatgtcggcaacggcaggttatgactaatatttatgaaaaatataaagctataggtacagggtttattaccactaaagcgctctaccctcatttgtatgctcctcaaagtagatctgatattatttttatccgtaacaatcttatatcaggtcaacctgagcctgcaacagaaaaccctacgactaatattgctggtattcaggtaaaagcaattcgttcaaatttcaaatctgaaataattgatcctattgtatcaggtaaatattcacatgtaataactctgctgaatgatcaatatgggacaccttccagaactacatgtcttcgtgagttagatattttggctaataatggaagtattgatccatcaatgagagaatttgtttcagagagaattaaaggacctgaattcttaggcataagtcaaagagatgtcgaagattattatgattatataagggatttttattctggaagtcctatttcgagcgatgagaatattaatgatgcaatggatgctgaaattaaacgttataaatataagaatgggctattagttcctgagaattttgattaa

SEQ ID NO: 248681 - DNA, 303 bp, Klebsiella pneumoniae; identical to SEQ ID NO: 96991

SEQ ID NO: 248682 - DNA, 126 bp, Klebsiella pneumoniae
atgttctcctttgcaacttataatgtgttctcgcatccaattagggtgagaacttgcctgtcgagcttttgttgcatccagtacattattcctagcatttgcatgatcttcaaaaacaaaacatag

SEQ ID NO: 248683 - DNA, 1077 bp, Klebsiella pneumoniae
atgatatatataaatggacgctttttacttcagcgtgtcacgggggttcagcgtttttcatttgaattgataaaatcattagtagaaattagggatgatataattattttattacctgaaggtgaggttaaatacgatctgacttttttggatggtaataaaaataaaattgaagttattcaaggaggaaaagggcatttttgggaacaatttacacttcctgcatatctaatcatgcgtaagtcaccgttgttaataaatttatgcaatacagctccagtaatatataaaaaccaaattgttacacatcatgatataacctacaaaaaatatccaaagagtttttctttaccatttagatttttttataatacagctccaagagcttttttaaaaaactctaaatttgtgattacggttagcgaattctccaggaatgaaatatgtaatcactataaaatagataaaaataaagttagtgttgtctataatgcggtaagtggagcgttttcagttgcaaaagaaaataattcacccggtatcgtaaggccatacttcttagctgtttcttcccatgcctatcataaaaattttcatgggcttattgaggagttttcttgtttaccttctgatataaatattgaattgaaaataattggaagtggagctaatagttttaaagtggatgggctccaggctggtaatgaaaatataaaatttattggccgagtggctgatgatgaactcgtatatttatatcaaaatgcaatagggttcattttcccttcattatatgaaggtttcggtattccaccattggaggctcaagcttgcgggtgcccagttattgcatctgatcgttctgtaatgcctgaagtactacaggatagtgtgttatattttaaccctctggaaaaaaatgatctttgttccaaaatagtagagtttatggctactccatcaatctcggacagactaagagagaaaggatttaataatataaaacgtttttcatggggccagtctgctcaaaaattaaatgctattattaataaacatttaaagaaggaggggtga

SEQ ID NO: 248684 - DNA, 1305 bp, Klebsiella pneumoniae
atgtgtataagagacagacttagggatcttggaactgcatctgctattattcaaagaaaagtactcccagctgcacttgtgaattctattttttggctcaatgtgtttcttggcatttttttatgtttggtagttgcggggacatcaccactagtagctcagttgtatgatcaaatcgaattaaagaatgtgctatttcttctcagcataacatttccattgtcaagttgcgcagcagtccatttagctttgctagaacgtgagtctaaatttaagaagatatccctcattgaagtttcgtcttcattattctcagttgtcattgctatcatcatggctaacttgggatttggtgtttatagtttagttgctcaatctattattatgaatctttcatcagcaatcctcttttggaagatatctggttggagaccaaatataccgacaaaatatatgtgggtgcatttgaaagacattttttcttttagtgcgaatctttcggtgttcaatataataaattatttttccagaaacgctgatagttttattataggtaaattcatgtcagcttttatattaggtaattataatctcgcttatagaattatgcttttcccgttggcaagcttaacatttgtatttggtcgatcattgtatcctattttaagtcggcatcaggatgatagtgattatacaagaaaaatctacttagattgtgttttttatatattaatgctatctgctcctcttatgagtggtgttgcaattctcagtacaccattaatcaataatatatttggttctcaatggacattgactgctggcattttggtatggcttgcaccgacagctattttacaatctgtgataagtactactggtgctgtttttagctcaaaaaaccgaaccggattacttcttattatgggtattattggttcaacattaatggtcaccgcttttttgatcggtgtccattatgatatattcacttttgcaaaattatatttaatcgctaatgtcataaatttctttccacctgtatgcatatcattgtggctattgaattctaatttgtttcaacttattaaaactatctttccaatagtaatttcaactttaattatgataatcgctttgaatatggctttatctattggaatggttaaccccaaaagtgttttagaactatttttttgttctttatttggtgcggtagtatactttttaacgctgtctgttttctctaaaaaaattagagagatttttctaaaaaaattaagatttaaaaaggtggggatatga

SEQ ID NO: 248685 - DNA, 273 bp, Klebsiella pneumoniae; identical to SEQ ID NO: 217615

SEQ ID NO: 248686 - DNA, 249 bp, Klebsiella pneumoniae
atgtatggcaaaatcactgatcttaaatggtggagagtttttacctctgtttatgttagccagtacggaagctacaagggctgcgccccactcggtacgcatcatgatattgagcggtccgtacttctcacggtacttgagccaaaccagaaattccctacgactcatccgctcctgagcctctgcgatggtgtggcctccgatgccgttcatcaccagttcacaccagaattcatcctcgccggttag

SEQ ID NO: 248687 - DNA, 1131 bp, Klebsiella pneumoniae
atgagtcagtggataaaaactaaacttggtgagattgtcattcttaattatggtaaagcattaaaggcacaggataggaatgctggctctatacctgtatatagttcaggtggattaactggttggcataacaaagcattaataaacgaacaaggaattattattggtcgtaaaggaactgttgggaaagcgtacttaacttatggaccattttggtgtattgatactgcttattatattttacctaacccttcgaaatatgattttgtttttttattctatttgttgaaaacattagggctggaagaactgaacgaagatagcgctgttcctggactaaacagggataccgcttatagtcaagagatcctattaccttcactgccagagcaaaaagccatcgcctctgtgctgtcctctcttgatgacaaaatagacttgcttcatcgccagaataaaactctggaatccatggccgaaaccctgtttaggcagtggtttattgaggacgcgcagatacactggacggaaaaaaaactgtcctcttttggaagtataatttgtggtaaaacgccttcaaaaaagaattctttgtattttggtaatgatgttccttttctaaaaatccctgacatgcatggcaaggtttttgtattcaaatcaactgataatctttcatttgcaggggagcatagccaatcaaaaaaaacaattccaccaggaagtatatgtgttagctgtatcgctactgttggtttagtctgtataactgatgtaagcatgcaaacaaaccaacaaattaactccattattcctaacaaggaatattataaatatttcttgtatcttttaatgaaaagcatgggtgatgaattaaataatctggcaagtggcggtactgcaacattaaacttgaacactggggatttttctaacataacatttctttccccttcagaaaatgagttgaaaatatttcatcaatccatttcaagtttatttgataagttaaaatttaattcaaaacaaattaatataattgaaaaccttcgagacactcttcttcccaaactgatgagcggtgaagtacaggttcagtatgtagaagaagcaatcgcatcagtagcataa

SEQ ID NO: 248688 - DNA, 705 bp, Klebsiella pneumoniae
atgacgaaaaaccctgacagtataccatacaacatttggcctgcggaggcgctgcgcctggccgaacgagaggcggcggacagcctggggctgacgctgttcgaactcatgcagcgcgcgggcgaggcggcgttccagctggccagcggcgcttatcctgccagcgcgcactggctgatcctctgcggacatggcaacaacggcggcgacggatatgtcgttgcgcgtctggcacaggccgcggggcggcgggtgacgctgctggcggtggagagtgacagcccgctgccggaagaggcgcaggcggcgcgggaggcgtggcttaacgccggcggcgtgatccatgcggcgactatcccatggcccgacgatatctcactgattattgatggcctgctcggcaccggtctgcacagcgcgccgcgcgatcccgttgcggcgctcatccaccaggcgaaccaccacccggcgccggtggtggcgctggatatcccttccggcctgaatgcgcagacgggcgcgacgccaggtgcagtggtacaggccgaccatacgctgacctttatcgccctcaagccggggctgctgaccggcaaggcgcgggatgtcgtcgggcaactccaccatcatgcgctggggctcgaacgctggctcgccggacaaagcactcctctgacgcggttttgcgctgcccacctcccataa

SEQ ID NO: 248689 - DNA, 780 bp, Klebsiella pneumoniae; identical to SEQ ID NO: 248553

SEQ ID NO: 248690 - DNA, 351 bp, Klebsiella pneumoniae; identical to SEQ ID NO: 248555

SEQ ID NO: 248691 - DNA, 297 bp, Klebsiella pneumoniae; identical to SEQ ID NO: 235373

SEQ ID NO: 248692 - DNA, 1257 bp, Klebsiella pneumoniae
atggaggctaaatcagttctggagcaaattgttaatgttgacaatcaacttaacggcttgactttccgtgaagcggaaatatcacaactatataccaaagagcacccgacctataaagcattaatggagaagcgacaaacactgcaggaagagaaatccaagctcaataaacgggtgagtagcatgccatctacgcagcaggaagtattacgtttgagtagggatgtagagtccggtcgtgctgtgtatttacagttgttgaatcgtcagcaagaactaaatattgctaaatcaagtgctattggtaatgtgcggattatagataacgcaataactgaacctgatcccgtaaaacccaaaaaagtgttggtggttgcaattggcattattttgggcctgtttgtttcgatcagtctagtactggtaaaggttttcttacgtcgtggtattgaatcccctgaacaactggaagagatcggtgtcaacgtttatgctagcgttccagtttcggagtggttggcaaaaaataaccgtaaatctaagcaattacgtaagaatgaatctgatgctctgctcgcagtagagaatccggctgatttggcggttgaggccattcgtagtttacgcactagtctacattttgcgatgatggaagccaaaaataacgtgcttatgatttccggtgctagtcctaatgcaggtaaaacatttatcagcagtaacctagcggcaactatcgcattaaccgggaaaaaagtgctgttcatagatgctgacttacgtaaaggctatgtacacaaaatgtttggccgtaagcaggataaaggattgtcagagatcttagctggacaagtggctgcagaaacagtgatcgaaaaagttactggcggtgagtttgattatatcggtcgtgggcaaattcctccgaatcctgcagaattgctcatgcatccacgttttgaaaaattattaaaatgggcaactcaagtttatgatttaatcatcatcgatactccaccaattttggctgttaccgatgctgcaatcattggtcgttatgctggtacatctttattggttgcacgctttgaagaaaatactgcgaaagaaattgaagttagtatgaagcgatttgaacaaagtggtgtaattgtaaaaggctgtattctaaatggtgtcgtgaaaaaggctagcagctattatggctatggctataaccattatggttattcttattctgataaaaaacacgattaa

SEQ ID NO: 248693 - DNA, 207 bp, Klebsiella pneumoniae; identical to SEQ ID NO: 223153

SEQ ID NO: 248694 - DNA, 246 bp, Klebsiella pneumoniae
atgcctataactgaaacggaatggaaggagcaccatcagaagttcggtacgcaaagtatcgaaactatgtcgatagaagactatcggcgtgctttggtggaagaggcatttttttgggatgaaccacacggttttatagttcataccctttccggagaacgtatcgtcacaaatactgagcaacttgatacgttactggagcacttagagggttatagagataatttaccattacttcgcacataa

SEQ ID NO: 248695 - DNA, 522 bp, Klebsiella pneumoniae; identical to SEQ ID NO: 193892
